United States Patent Application Publication US 2022/0102000 A1 - sequence listing, part 7

SEQ ID NO: 1295 - DNA, 21738 bp, Unknown
  16S sequences of unknown bacteria
gcaaacccgcataaacactggacttttcgcaaaacgtcaaatgttgccgtggcagatgaaaagtacttttatcattgttgcataacctcgcatttcttagtttttcttggtttttcgggctttgtaagcctttgtaaatttttgctttctggcataacctggtttattttcgcataatatcgtccgcaaaaggtgtaaaatagggttcgaaatactttggcactatatctaccgctcaaatacatactatagcaatacagcttacagccacattctttattctgacttaattcaccatcccccggaacacagaaggacaaccttccatcttccagaataaaaggagccaccgcaatatttttcatccgcggcatatatgactgttcaaaccagtaagctttcttctcatccatttctcttcatctccatgatagccacctgctctgaaaactggaatctatctgatactatcataaaatttctgcaacacgattgccaactcttccggagcttccaggtttgcctcatgacctgttttcataagttcatgaaagcaggaattgttcaaataatgacaaagttcttttgaagtttttttatttgcattgtccttctctccgcaaacgatcaataccggacaagacaccttatgcagtgaatcacggaaatctaattcagccatcgtaccacataggctgataacatctgcttttttgaatcccattttattgaatgccgaatttggcataagatgaaacaacatattctgaactttcaatattttttcaggcattttatattgtgctgcaattaatacgagcgcttttactttatctgggtagtctattgcataattaagtgccaaaacagctcctagagaaagcccacataagacaattccgcctttctccttgccgcattctgatgagaatactgaatataattccttatatgtagcagatttcccttctagcatctctgctaaactcaaattgatactactttccgatactttcgttccttttattactttattccaactgtctggtttttgtcctagtccgtgcaaatataaatacttcatatattgtcactcctcaacttcttgccctgattcatgtcaaaacggatattcgcaatccgctttctcctccatccccccaatatcagcctttgaagttgctgcggaacttcgaatcgccgaggtgctcaaataactgactgtaccattcctcttttgtcatcagagcctattccctttacatcttttatttcatggactcatttttcttacaaagatctttttcaatcacattcccgatccatcccgctgcaaaccgtgatccatccggagatgcatgctgcccgtctttgtaatacatctctacttccggatgcttcttcttatagttccaccagtattttccaaccggagcaagcagcgcctcgatttcctctgcgatctgctcatgcgccagcgtcattctttcctggttgtattcttcctctttctttgcccaggtcatatagattacggtcttgctgccggcttccaaaatccactcattcagctggcgaactgctctgaaaaatttttcttctggaccaaatggatgcgcatgttcctgcagcaccacataatcgtaatgtccgtagagaatattgaaacggacatccggttcgtttacgtgctgctccaggaaccatccgccatgcgcgatcattgtcacttcgcaatcgtacttcgtttttcgaaaccgttctgctaccatctccggcatgtcgttaaaatatgtatgactgttgccaatgaataagattcttaatttcttctgatctgtcatttttctacctcacattcaaaaaaattgttttaaaaattccattttcttcatctacaagatcttcctcttcttgaaaataaagacaatcaccgcaatgaccaccaggctcagtccgatcacaaaaggatagccgtgcgtcagctccggcatattttgaaagttcatgccataccagccggtaatcaaagtcagcgggaagaaaatcgtggagatcatggtcaggaattccatgttggcattctggtgttctgccacttttccctgatacgtatcgcggacctgaccaatgtagtccagcagatacatggtgcggcccatgagccggtccgcacggtcggagatggtaccgaaataggccagatttttgccggagaaaaagttattttcattctcctccagctgcttgccaaagtcgtgcagttcatcgtaatactctcttaaaattaaaagttcttttcgaagatgtgcgatttttgtcgtgacatcatccagatcatcaagcgtgatctgctcctcgatctgcatgatcttcttctcatatcgtccgagattgtccaggtccgtatccataaatttaatacaaaagctgtacagaaaacgttcacggctctgccccggctttgttctgctggctataatgcgtttaatcagtttttctgcaaattcctcatcgtcgatgatcacgatgttcctgcggtttgcaaaaaagtacatccgtatcttttctccaagtacatcactgagttttggaatatgaaggtttccgcagatacatttctgctgcgactccaccttgcagaactcgatatcatccagatcgatatccccctcataggaaatgcctgcaatttccagtgcctgcagcgcagtatccgaggttgaaacaaaaaccgcacgaagatccttcttctgcttttcttccagtgtcttttccgggttcgtctgcttttccagccttttcttctcttttatctccgccttcatctcgagatattcgtcgacggatgatttcatgattgacttcttcagaatgtatactttaattgccatcggttccctttctccgctcgtctcctgtctccagatacctctgcatttcttcccggatcgtctcaaactgctgacgggtcacaggattttcactttcgaagtgcagcatgcgatccagatacccctgctctttcaaaatcttccggctttctggatatgcaagttcaaacgtaaggcagatatgtcctaccacgtgatccaccggtgatttctttttgctgcgcaataccgtgtgatgtccttttactgcctccatcacttccggtgtcacttcacttgtccgcagctccttcgtggtcacattgtaaatgtcctccagcggcgtttccaggtttacacgcagaatatccagcttgtccgcatccctcagaatccggcagaacgggtcttcttttaaattttccggcagctgataagcactgtgccagtatatcgcatctctgatctgttcatcccatttcgtctcttccagaaaacggcgaatcagttgctcttccccaaaaagaatttctgccccaagctttgcatggtccaccgactccgcgtccagaaaagtgtgaaaccgctgaacctgttcaaaccttccaatgtcatgcagcatgccgcaaatccaggaaatctcagtcatttcttcggacagtgacagactcccggcaatccgttcacataaatcagccacccgatacgtgtgatcaattttcagccggattttgggatctgacgggtcgtaatgactcacataactttgaaattctgaccgtatcttttctctgttcatctctctcccctgtgcgtgtccgaaaaaagctttctgtaatctgcggaaatgctttttcaaacacgctccaatcctatttttttatttcaccctgtgaatccgctcctctttaaaacgatcctgctgtggacgcgtttctgccgggtatccgcacggcacaagtgcaaatgcaaaaagatcctccggtatctccaatatttttcttaccttttccatgcggtcttcccccggtgcaattcccatccacacagcaccaagcccaagagaatctgcctccagaagcagattttccaccgccgcactcaaatcaatctgataatatccaggagctacccccgtttcccgatagcacggtacaaatacgagcggtgcacctttggcgcatcccgtgtacggcgatacccgcgacaattcttttatcttctccggattcgtcaccacataaaactcccatggctgctgattgcaggccgaaggcgccgccattgccgcccttaacatctgcataatcttttcctcttctatcttctgatcggtatatttccgaatgcttactctgtggaaaatgctgttcatcttttttcctcctttttctgctttctattgacacggcacgtcttactccatcatttaagtttacttccaaatttatttataacctcttcactgtctcgtcccgagattgtttttccggttgcatcttcaatcgcatccaaaagtttttttgctcgttcaacgatgtgtttatcaaagtcatccgttctgcaagcctctacattaatccaatgtgattcaagatacgtattaagcacaggagctgttacctgccctttgccttcaatcttatctaaatatttactcggtgccactccgccgatttctctgttggtggaatatgaaattggtgtcttatttattacagaattccatttttctttcggatacctttgcttttcacaataatctcttggaaaaatatgatgaatatcaatatattctgctttatatgcagtaaaatccatctctctccccgaaataaagtcctgactgtgattttttaaaattaacgccataatccctttatatgctgcagaaactctggattgtaatgtcaaaagtctaagtggattaaaataagactccgctaccgttttcggcaatttagaatcatcactgatccagtccataacgccaacaacatcatttacatatcgcgtctcattggcccctccatacaattctccaaacaccccacaccagtaccactgttttattttatttttaatattggtgctttttatcttattaccttccgcaagaactgtacataatgcagcaagcggaattaactgcgttgtatatggaatatctcttccagcaaaaattctttcttcctgcaaaattttttctgcttcaataaacccatttgttaatgcatcggcatattttttgtactctggcaaagtaagattcaaaacatctttctttttacagctaaccgtaccacctttcttataacttgaaagcagcgttgcagctgtcaaaaaatcggttgctgtgacaccggaaagaagatctccggcaaaatatttctcatatctttccttccagtcttttctaagttcaaaatcatccatggcaaatatcgcagttataagttcaaatacggtcagtgaaacaccgcccgtatttacattctcaaatacctgacaaactgcttctttcggcgttactttatcaagtaaaataacgggcattttatacttgaatacctccatgataatttttccctgaaactcactccattgttccataaccgcagcatcatttttataatggagcatatagccctgcatccacgcaaatgtttttgaataatcaagaataatatttaatgggaacaatttttgttcatattccaagtcaggagtagataaatcaagttctatatctctgccgaaattagaagtcacctgccttgtttccggtacagaaataatcgcatccacacgatcacacgtctggtctaacgctttttcaatatcaatataatagaatctttgaatatcttttcccttatctgttcttgtatgtactggattaggactatacaaagaagaatacaatgatgttattcgctgctgaccatcaagaattaattccgatggaacaactccaatagccggaacgccttcaattactcgatatttgaaacgaatgtttacattcccgtattctaaaaacattgccgcaccaaccgggaaagtgtttgtaacgctggcaatcaaagctttgattctattatcatcccaaacccatccacgctgaaaatccggaagctgtgcatttccgctgtcaacagctttcattaattctgttatctgcctgtcatttgtctgcattatttctccacctttgcataattagttttcctaaccaagcttcttatataccttatcaatcaattcctgatccgccggcagacattccacactgttaagagactcccggttcagtcattttgcagcttcatgttctttcaaacacactctaaagcttatcatacttatccgccttccctttcgccttttccaccggatattttgcctcgttctggttcattttcatattgatgatctcgttcgcatcaaggccgagcttgtcgagcaggttctgactgtacaccagaacgtctgcaagttcttcctttacgtgctggagatcgtattctttgtccgaccactggaagcattccagcagctctgcggcttcgatcacgatcgattttgcaagattggccggggaatggaattgatcccagtcgcggtcttcggtaaattttcgaattcgttcgattgtttcctgattcatggtatctcctttctctttcgttaatgtctggacattttactacagtttccgtttccgtaatttttccaaaagaattcttaacgatttcacgcacacggtcggactttgaaaagctgcaatccgctgtttcccatgccggaactggctgaaaccgaactcttctcgttccatctgccagttcttctgcaatttcattatctgaatttttgtaactgccaccaatcatattaatcctatcatcccttcctctaaaaatcaatttagtctttttatcagaaatgaataaattacatttattttgactaatttatttacttttccccgatccttgctataataaacagcagttcgttccgaacgaaaaatcaaaagaacagaaggaatgaaacatgagtatcattgataaatttggatccatggtcggaagtgaggccttgcaggatccggaaaaggcgcgtaacctgctccttgccggttatcaccttcaggaagcgcggcttctgcttgctccggataaggagctaccgccatccggccggtatgcggcgcgcgtcgttatgaaaaatatcattcaggctcttgcaaagccggaaaatgcggcgatggtcagcatttttgtgccgggagagcttttgacggctgtggggctcactccttactccgtcgaagcgctgtcctgctttatggcaggtacaaagtgtgaacaatcgtttctgcgaaaaacagaagaagagggctttccggaaacgatgtgttcctatcaccgagtctttttgggtgcggcactgaccggacttctgccgaagccgaaatgcatgatttacacgaatctggcctgtgatggaaacatgatgaccttcccttatctgcgggagacgtatggtatccccggattttatatcgatgtcccctatgaaaaaaaccaggaagccatccagtacgtagccggacagctgcgggaaatgaaacgttttctggaagagatgactggaaaaatgatttcagaggaggcggtacaggcagccgtttccaacagcaaaaaggcggccgcgaattatcagcagcagctggcacttcggaaaacccatgatccgtccacgactctgaccaatgagctgtacgctatttttatgtgtcatctgctctctggctccgaaaccgctgtcaaatatacacagatgctgctcgacgatgtgaaaaaggctccgcgatcagaagggctgcatgttctctggatgcacatcatgccgtttctgcaggaaccggttaaagaagtcttcaattacagcaaagacattcatatcagcgcctgcgattttgtagcagacggcttccgtgagatgcatgcttccgatccttatgaggccatggcagaaaaaatggtgaactgcatttacaatggcgcggtagatcagcggattcagctggcggaagatctggagaacctgacgggcgcagacggcggaatcctgtttgcccactggggctgtaagggaaccatcggcgcttccagtcttatcaaaacttctcttgaaaaagcaggacttccaaccatgatccttgacggcgatggctgtaatcccgcgaatacgagtgacgggcaggtgtccacgcggcttcaggccttcatggaaatgctgcaaaaaaacaaggaggaacaacgttcatgatctattacgtctgcaaatatactcctcttgaactctttcgtggatttggggaatcctgcgcggtgctggaagcaatgccggaaaattttgatctttccgaccagattgcacacgcaaacctgtgcggcttcggaaagtccgtgattcaagctgtcctggagggaaaggctgaccagctgattctggtcaactgctgcgactcgatgcgccgcgtctacgatatcgtaaaaagcaccggaaaatgtaaatttctttatctgctggatcttcctcatgaagataacgagtgtgaaaaggtaaaatttgcggcttcactttgccgcctgaaggatgcttacgaggaattttccggaaaagtttttgataaatcccgctttctgaatgcgttttctacatccacaaacgaatctcgtccgtatatcggtgtgctcggcgttcgcgtcagtggtgtgctcgaaacaatgatccgcgatcatatttcgatggacgtggaaaatcttacctgcaccggcagcagaaagctgtccgtctctctttcagagcttcagaatctggagaaaaatgatctctttctggcatacgcagatgcactgcttcggcagattccgtgttttcgcatgaatcaccgcagtcagcggacagagctttatctggatccaaatctgaagggaattatctatcatacgatcaagttctgtgattattacggtttcgaatatgcaagcataaaaaagaacatcaaggttccacttcttaagatcgaaacggattttaccagtcagagtgccgggcagcttctgaccagaatcgaggcgttttccgaaacaaccgaaggatcacagggtataggctctggaacgggtatcagtgaggaggcaaagaaaaaaatgaaatccggaatttattacgttgccggaatcgacagcggctctaccagtactgacgttgtcatcctggatcaagatggaaaaattaaatcaacgatgattatcccgaccggcggcggtgctatgatgagtgccgaaaagagtcttgaactcgccgtagaaaaagctggcatcaaaaaagaggacattgtccgcatcgtcacaacaggatacgggcgcgcttatattgacagcggcgatgacagcatcacggagatcacctgccatgcaaagggcgctcattacttaaatccaaatgtgcgcaccgtcatcgatatcggcggacaggacatcaaggcaatcagcattgatgaaaacggcgctgtcaaaaactttctgatgaacgataagtgtgcagccggaaccggacgttttctggaaatgatggcccggacgcttggcctctcgctcgaagacatgagcaaaaaggggctggaatggaaagaaaatatcgtaatttccagcatgtgcacggtttttgcggagtctgaagtagtctcgctcgtcgcgcagaataagaatgtagccgatatcattcacggactaaacgtgtctgttgcttccaaagtcggcgcactcgctgcccgcctcggcaaaaacaatccgggtgaatacatgatgaccggaggcgttgccaaaaatcagggcatcatcaaagcacttgaggaaaaaatcggtgcaccgctttatatctgtgacgaagcacagctttgcggggctttgggtgccgcgctgtttgcgtttgaaaaatgcagagaaggccgctaatcgcggccttctcttttctcttacttcacttctacgagttcgatcttgaaattcagctcttttcctgccatctcatggttcgcatcgaaggtgatcgtcgtctcatcctttgctgctaccttgaccgggaatggctggccatactgattggtcaggtaaacctgctgaccgacagtaagaccctcggagcccggaagctgtgcgatttcaagtgtaaaaatcgcattcggatccggctgtccatacgcctcttccggcatcagatggatctctctgatttctcctacttccatatccgccacggctgcatcatagccccggatcatctggcctgctccgcagatgaattccagcggttcgccgcggtcataagaggaatcaaactgagttccgtcattgaaggtgcctctgtagtgcgttctgcaggtctttcctacattttttccggtcagtgcgctgccgcatccgcctgcgcagctgccgcaggaaccgccatcctcatggccgccgcaggaatgctcttctccatggccgccgcaggaatgaccctcttcgtgatggtgatgatcgcagttcgcaccggtcgatacgagttcgccattcagatacgcttttgcagcttcatccgcatctccatgcactccggcacaaagtttcacacccgcttcatcaagtgccgcctgtgctccgccgccgattccaccgcagatcaggacatcgattccctgatctgcaagcagcccggcaagcgctccgtgaccggtaccgtttgagccgatcacttcacttgaaataatctgattgtcctctgcttcatacaccttaaaaaattctgtttttccaaagtgctgaaaaatttctccgtcatcatacgttactgcaattttcatattaaaatcctccattttttatttcagcaaattcagaagcgtatcataaatcggctcattttgctgcacaataatcgccagtttctctttcgctgtgctcagctggtgaaacagccgacgcacactcgcctcttcactgcctgaccttaaatagcctgtcttttcataataccagaaatccaccagcaaaacaaccagccgatctgtttcttctccggcgttcgttctctgataaccctgcttttcataagcatacagcaatttttctgcctcagtgtcagtatttgcatataccaccgcaatatgcggataggatttctgcgttttctgcctgggaagatgcatcatatcgcgaatgaacgaggaaagctctgcatttgtccgtatccggttggtgaggcggaagctctggatttccggcagagtttccagaagcgtcatcgtatttgacggcagctcctcaggcgcaatcatgtcttcccggtctccgccaaaaatcagcggacgattctggcagaaaccaagtaaagctctccctttttcctccgaaagcagatgcgcttcatccaccagcactgcatgaaacaaaccacgaggcagctgtgtttctatctcattcgccgacaaaaaggtaactcgctgcagtcgtttctgcagaatattccatttctttccttcttctttgcagtgaatgatacagaccggctgccggttcgacagcttcatcgccagatcataaagcagcagcgtctttcccgtccccggaagaccggaaaaactgaaaattccggccttttccgcccggatctttttcagaatctgccgttcaatatcccgctgctggcacgtcagaaaatattcttttttcaggaaacgctccggctgtgtccacggtgaaatcaggtacagttctgcacgaaacagcctctcgatctcatcctcatagtctgcactctcctgcatcaaatcccggcacagcagctcccagtcggcctccacgatatgatcgtgactgttcagacgcaccagacgattcgcactgctgatataggtgtaggaacgaatcggccttccaagcaccgacagatagtagcggttctgcaaaagctgcctgcgaatcgcatgatccggcaccgctccgcttttcagctcgatattcaggatctggccatccttaatctgaagaaggtcaaattcttttccaagccgcggaatctgaaacgaatagaaaaagcgcagcagcggcacttcctccatatgtgcttccagctgattcaccagcactctcatgctcccgatctcccagtcgcgtatcttcaaaagggaatctcttccggagagctgatgctccattttctgcagctgatcgccgctctgatttcttgtgagtgcatagatcgataccgatttcacgtttctgcctccttcaccagcgcatgtttgaaaaatactttctgcaattggcttttacttctttttccttctatatcccggaaaaaaggtgcgaattagcgcagcgttccgtccacagccaccgtcaccacctgccacggcagccgctttccgcttctttgcagtgccctctttgctgcctgctcaagacctccgcagcacgggacttccatccgaagcacggtcacgctgcggatctcgttttcccggataatttccgccagtttctcgctgtaatcgatcgcatccagcttcggacagccgatcagcgtaattcttcctcgcatgaattcctgatgaaagtttgcataggcataggcagtacagtctgccgcaatcaaaaggtctgctccctcaaaatacggggcactcaccggaaccagtttgatctggcacggccactgtgcgagcccggatgtgacaggctctgccactgtagtatccctcatcggtttcagtctcatcgcctgtgaacccgggcatccgtgtaatgcttctgcttctttcttttttttgtttgcaagtaccgcggcctcatcatactctgctgcctcccgctccacaaatttaattgctccggtcggacactgcggcagacagtcacccagtccgtcgcagtaatcgtctcgcagaagctttgccttgccattcaccattccgattgcgctctcatgacaggctgccgcgcatgcaccgcagccgttacatttttcttcatttatctcgatgattcttctgatcattgttctgcctccttgtttttgtacgctcagtatagtacaatactcacgaaaactccgtggttataacaacgaaaagaggaaaaaatgaatttaaaaaatcacccgctctttcaggatctttcagaaagtgatctcgatcagctgtaccacgctgcctgtatgcgcagtcagttctttgaaaaaaatcagacggtcttccatgccggtgaccgaatctgcgaggttggaatcgtccagaccggaaatgtccatattgaaatgattgatctgtggggaaacaagagcattctgagcagcatcgcaccggggcagatttttgcggagacgtacgcgatctgccgcaaaccgctgctagttgacgtgacagcggcagcgccctgcgaaatcctcttcttaaatcttgagtttctggctcgttccttttctgagccgggcagctgccgcgacgcgatcatgcaaaatctttttgccatctgtgtccggaaaaatctgattctctccaaccgaatcttctgcaccacaccgaaaaccgtgcgtggcaggctgcttgtatatctctcctccgaatcggcaaaagcaggctccacttcctttaccatccccttcgaccggcagggaatggcagattatctgaatctggaccgcagtgcactctcaaaggaacttgggcgtatgaagaaagacggaattcttgattttaagaaaaatcacttcattttataccagaatcccctctgaaattcatagttttgcctgaactgccaattctctttttctctgcctgcccggcacatgcccgaaaatgctttctgccggatcatacacgcccggatgtatcccgcgtcagatccttcacccaccgatactttttataatggtacatcacccagggaatcttgccaacctcgtccagacaggtgcaggcatataccaccacgaccggccagtgaaagaaaaatgttcctgccgctgcaagcggaatcgccagacaccacatgcacactgccagactgtacatgtcaaacagtgtatcgccgcctgccgcaaaaataccgttgatcgtcacgtcattgaccgcacgcccgatcagatagattgctatcacaatcagcatccctgtcagattctgctttgcaccgtctgtcagctttacaaaatgcagcagcagaggtgtcacagccagcatcagaagtgatgccgcagcgccgcatgcaaatgcgatttttaccaggcggtctccatagctttttcctttttccaggttgccggctcccagctcatttccaaccatgataccgcccgcgcttgcgataccgccgctgaagcagcagatcaggtcacgcacgaccgctgcaacggaattggccgctgccgcatccgtcccgagatgccccataaatgcggaataagacgtaaatccgatcccccagaacaggcacgcgccgagaatcggcatcgaacattttgcgaagtcctgatccagtaccttgttgtgacggaagagatggcgaaaatccggatggacaaaatcttttcgcccggagactgccacagaacagacaaactctgcgatccgcgcgatcagcgttgcgatcgctgcaccctgtacccccatagccggaagtccgaaccagccgtagataaagactgcattcattacgatgttcaggatcaccgccataccgctgatccgcgcagtctgacttgcatgctcgctgactttcatcatcgtcagatagcactgcgtcagtccggtcagcagatacgaccagcctgcgatccgcagataagcgactcccgcctgaaccagtacatcttcatttgtaaatatccgcatcagcagtcccgggaaaaaactgcatgcaacaaaggtcaggatggaaacggtgcctgccaggcgaagcgccagacagaaaatatcgttcattgtctctttatcacccttcccccagtactgtgcgccgaggatcgatacaccggatgtgaccgccgccagaaacatgttctgaataaactggatctgtgttgccagcgatactgccgacatcgaattctgctccacactgccgagcatgatcgcatccgctacagccacagatgccagcagcaggttctgaagcacgatcggaatcatcagcttcatcagcttttcataaaattcacctgttatttttttcttcataagtacccccacatttttctctttctgcaaagcagcaaagcggtgattcgttctcactttttcctttgaaatacggatattcgctatctgctttcgcttatgcagtgcccccattctctcttattttcagataggtgtcaagcgattcctggcattctttttcttcttttgggaaatactagaacgtgtctgaagcttcccacacttgaatcgtgggaatgctgatctgcgttcaaactttaaaaggaggattctatgccaattcttacaattcacgattctgattttgaaacaaacgtatgcgcttcctctgctccggtactgctcgacttctgggccgactggtgtgccccctgccggatgcttgcgccgattctggaagaagtttccgctgcaaaacccgatcttctgatcggaaagatcaacgtagaggaagagcccgagctggccgaacgatttcagattttgagcattccaacgcttatcctttttcagaacggacggacggtaaaacggatcagcggagtgcatccaggggatgtaattctcggaatgatttcctgatttgtaactgttcagagccaagcagattttcatgcaaaagtgtgaatcatgcttgcatgaatgaacacttttacatggaaatctatttggcggatacgccacaccgacgaaatgcgtagcattttggaggttggctctgaacagttaccctgatttttgttctaactgttcacttacaaaagggagtgcatccgtttcgatacactccctttctgatatttttcccatactcacagccgttggctttcatctgtgagtttcttctggcaggaacagatggcctcttccgcactgccgtttcattctttcagatatctcagcacagctccttcgccatcgcctcgatctgctccacattctcctgctttacggctgacatgatcgtcacggttgtgtcagtccacttgatattcttgcttccttccatcatcttctttatcactctggctgccgtcggcgcccaggaaccattctcaatcagcccgaccgtacggttctggaagttgtgctcgacaaggcgggtaacgaaatcgttcatgaacggataaatactgccattgtatgtaatcgttgcgagcacaagcctgctgtagcggaatgcatctgcaactgccgccgacatatcatcccttgccagatcataaacgactactttcggcgctccatttgcttttaatttctcagcaagcagttctaccgctttctttgtatgtccgtaaacggaagtataggcgatcacaacgccttcctcttccggacgataagaggaccacgtgtcatacagcccaatgtagtgacccagattttcggtcagaaccggtccgtgcagcgggcagataatggaaatatcaagtgccgccgcctttttcagaagcgcctgtacctgtgcaccgtactttccgacgatcccgataaagtatcttctggactcgtcatcccagtcttcctccacatcaagtgctccaaactttccgaagccatccgctgaaaacagtaccttttcgctgctttcatacgtcaccataacctccggccagtgcaccatcggtgcgaatacaaaggtcagcgtgtggcttccaaggcttaaggagctgccattttccacaaccagcttccggccctccagatccagttcaaagaaatttttgatcatgacaaatgtctttgcatttgctacgacagtcgtctccggatatgctttcataaaattggcaacgttcgccgcgtgatccggctccatatgctgtacaacgagataatccggcttgcgtccatcaaggacacgtgcgagattgccaagccactcgtcggtaaagtgcgcatccaccgtatccatgactgctaccttctcgtcaagaatcacgtaagaattataggacatgccatttggcaccttgtactggccctcaaacaggtcaacctgatggtcattgacacctacgtatttaatgctgtctgtaattttcatatgacgttactccttttattttcttttgccggctgatgtctctcatacagccggttttctctcttgcctaccaaccgtattataaccgattttcttccaattgtattgctcttttttcacattattttgtaactgttcagagccaagcaaaatttcataaaacaggcggaaaatgcttgcatttttaagcctgtttttgaaattttatttggcggatacgccacacctccaaaatgcgtagcattttggaggttgctctgaacagttacattatttttttcgttaattccgaacattctcgtttttttctgctttcagcacagctttgtcttctgccttactccgtcttttcttccttcagctcacacatctgaaggctcacggtataaccgtttctgccgcggcgcttcgtctcatacagcgccccgtcagccgccttatataaatccatgtagcagtcgccctgttccggtgcgaatgcaattccgatactgcttgtgatatgctccggcatgcctgaaaattccagctcaccgatcttctgcaccagacctcccgcccggtttcgtacggagtcttttgaatccacgtttttcataaggacgacaaactcatctccgccgatccgtccgatcacatcattttcccggaaataattccgcagcagtcctgcaaactcacgcagaacggcatcgccggctgcatgtccgtacccatcgttcactttcttgaaacggtcgagatccaggatcagaaatgcatgcatcgcttccggctgctccaggagcacttcattgattcgctcctctgtcacctttttgttgtaaagtccggtcagcgcatccatctgggatgccttaagcagttcccggttcttctgactgttttttttcaggatacagacaaagagaatcacaaccagaatgcagaatccgatgataaaaaaaacttcatacgtcgtaaaaaaacgatacggctgcagcgccgccgaaagcggaagcatgtaacagatcatccagttattcattccaagcggtacgtaagagagatactgctccgatgcccgcttcccctgtgcatcccgcatccggaacagaccggattttccctcgttgaaatctttctgcacatccaggagcgagatattctccatgattttcttatcactgtaaaattcaaagaaattgtcaccataagaaatcttatggtgtgacggttctccgtcatatgcaataatctctccgtcctgcgtaacgatcaggctgtacccgacaccgccaaacgtatcattgaacatcagacggctcagagcagtgacattgtatgatgcaccaagtacaccaaccaccacttcatcccgcttgattggaacactgagcacaacccgtgtctcctggtcaacactgctttccagcgggtcactgagcgcctgctttccttccatcgcctcctgaaaataactgcggtgggctacatttttttctgttccattgtcataatgcgaggttccgtccggttctatgatcgcagaaagttccagatccgtatattcatgcaggttggcgatcatcttcatattttcatcggaaatgatgtcatccgtctctccgatctgatcggcaacgatctgcagatactgataatgcagttccatcatagagcgaagatgttcgctctggcgcgttacagtcgcccggaccgtatcctgtgagttttcactgatcgaatactccgcacacacgaaaaatactgcaacgccaaacgcaactgccgctataaataatagaattgttttcgtataatctttcaggtcaaatcttctctgactgataacgacacccccctgtccaaaatttttgttttcaatttctctgtcaaggcggatattccaggtccgcttcgctacttgcaggatcataagggatcctcccgcaagcgggtccttccttatgatatttcataaccgagtagctgcttcacagcttgactcggttaaattgtcatcagaccctttcttacaaaatactgtaaaacggaatatcgtcatatgtcaatcaaaattttagcgagttctgcattttctttatataaaacgagataccaaagtgaaagaaccggaaaaacaagtcatctggttttccagtcttctgcaaatgcattcactgccattgcaataatcggaattgtcccggcaggtataaaaaggacgagaagccgcttcccgggcatatctcgtcctgctgtatgtttcatatctgattattatttctttcttctacagaaaatccagcagctccggatccggatttgggatcacgtaatgctcctgcagatgcagattcagtgcatcacagccctttacaaccgcgtttaccgctgcttttacggctcccacatcaccggaaaggatcacgacaccttttccgccgatgccctggccaaggcgtactctacaaagacgcaccgccgcctcttttgccaccatatccgccgcataaagcgccgataccatcattgagcactccagaataccgactgcctcacgcgcttccacctttttccgggtagaaagcacctcaagcacctgctcatggatgtgcgggatcacataggaattgcgcagatgctttcctgcaatctccgctcccgcctccatcgccgccttcacctctccggtatctccggcgatcaggatcagatattttcccggacacgccggtgcgctgcgcagaagctttacctgacccgctttcagcatcgcatcggatgctgcaatgccgtacgtaatactggtcaactctgccagtccgattgtttttcccattgtttcctccctgtctttctttgtctgcaacggttctgtctgcttcattgtactccaggattatgctttatgcaaggagaagaattcgatgccatatgatcgcgcgactgtctcaaattttgccatatcccacggttattcaacataatagacagccgtaaaatcagcagttttccctgttcccactgcttctcaactcttcgcatatagtcttcttaatttttttcatccaatggctctgcaagatgtgcgttcattcctgcaattgtatttcactatagcaattcatgaattacctttatcagtaattttgcatcaacaggcttagcaatatgatcatccattcccgcttcttttgctcttattctgtcctccgtgaacgcatttgctgtcattgcaatgatcggtacctcctttgcatcctctctgtccagagacctgatcatctttgcagcttcataaccattcatgaccggcatcatgatatccataagaatgacatcaaattcaccaggtctgcttttttcgaacagttcaacagcttcctgtccattccatgcttttgtcacaacagcaccctcattctgcagcataaattctgcgatctccatattcagctcattatcttctgccagaagaatatacagcccctttatagatttttcggatacatccttctgttcttcacgtttgtccgcatccatatctattttaaacggaacccgaatcacaaatgtcgtccctacacctttttcactttcaaaagtaatcgttccacccattttctcgaccagattctttgcaattgccattcccaggcctgttcctgcaaattttgtgcggcttcctgtatgttcctgtgcaaatggttcaaacacacatttctggaactcctcagtcattccgattccagtatcacgacaaacaaattccattgtcgccatttctggctgttcggatggaatttccatgcagctgatatagatatgtccgttttctctgttatatttcactgcattcgacaaaatattcatcatcacccgtttcacataccccgggcttccaataaaatcacgatgtgtgatttcttttttctcccacacgatccggatattctgttctgcagccatctgctcgatcacaacaaatacttccctggaaatactgctcagattaaatggaatctcttccagaataatttcacctgactcaagcttactcatgtccagaatatcatttaccagttccagaagcagatgggatgcttctttcacctttgtcctgtattccgtctgtttttccatatcatctgcataatactctgccatattgaccaggccgcagattccattgattggagtccggatatcatgactcatccgctgaaggaactctgtttttgcctcattggcggcttctgcctttttagcggctatcagaagttctgatttatatttttcgtccttttccacttcctgtttccggtgcgactgattggttctgtatgtccagaaccagaatatactgaacatcaggaaataaagaaaaataacgcttatcacacttaatagaagattatggaacacttccgcatccgaaagatatgcatagatataataatccctctgcttcagcatgattccgtagcatccaattccttcattcttcaaatgataaatgtgctgactgtctgtatgctttttcattg

SEQ ID NO: 1296 - DNA, 3641 bp, Unknown
  16S sequences of unknown bacteria
tattgatgaaatatttgtgtccgcgcgactttaggcgcggggaaatggaggaaaaaatgaagaaagtaatgagaaagctctccgtgctggcgctcgtgtgctgcatggtcctcggactggggattggcgtgcgcgccaatacgtctgccgtatcttcccgtgcggcatcgacgaacctggcactgggagcgacagcaactgccaatgatgtcgaagacggcacgagctttacggccgatctggccatcgatggcaatagcgagacgcgctgggcaaccaatcagggaactggaagccctcggccggagaaatggctgcagatcgattttggagaagtgaccgcattcgacctggtcgacatccagtgggaacagcagaacatccagaattttgtgctggagatctctgatgacgcacaggattgggcagtgatccataaccggtctactgcgccggtctctaaactggacagcgtgtcattcagcgagctgcagtatgcgcgttatctgcgtgtcagagcgacagactacaatggtgactggccatccgtatcgatctttgaggtttctgtgtacaatacacaggatacgagcgaagaggagaccggaaattacaagatctatccgatcccgcagagcgtgacggattctgacgcggcaatcagcttgagcgatgaagtcaatgtcatcgcggaaagcggcatcgacagcgtgacggaagaccgtatcgaagaggtcatcagcgagcatgacatgaccccggtattcacggatgagccgcaggaaggcgaagtcaacctgtatgtgggcatcaacggatcaggcgaagctgccgatacgcacgcggacgtaccgcgcgatgtgttcaccgaagcggaaaacaaatacgacatgcatgtggtcaaggtgttcgaggacggcgacatcgtcgtgctgggcgaagacacagatgccgcttactatggtctggcaacgctggagcagatgctcgatcagagcgttgacggcacgatgaaggtgtctacgttcgaagactacgcattccagaaataccgcggcgtcgtcgaaggttactatggttatccatggaccgtggacggcacgctgagcttcatggattatgcaaagcgttataagatgaacgtcttcctgtatggaccgaagtctgatccttatcatctgggattatgggatgaggactatccggaaaccgtcagcgaggaagattccaagaacggcgtaaggaccgcggatgagatggcgcagatcgccgctgcggcaacggcaagcaaggtaagctttgtctgggtcgcacatccggccatgcagaagccgatcgactttaccaatgaagagacgaccgatgaaggcatcgcccgtctgatgaccaagttcgagcatatgtatgaactgggcgttcgtcagttcggtatcttcgttgacgatatctctaatgactatgcgacgagcacctgcgacatgcagatctacatgctcaatcaggtgcaggaacagttgtatgcaaagtacaatacggaaggcagcgcacctgaggatcaggtgaaggggctgttcttcacaccggcatggtatacgaccggttcttccggtgcatcgagcaacctgccgaagttccagcagctgcatgaagacattgagatctgcttcaccggcagtgatgtcttctccagcatcagcaactcttccgctacgacgttcaagaactggatcggacgtacaccggtcatgtggtggaactatccggtcaatgacgcggaagacagcgtattcttcaccaacccgatcaactttgattattctcaggattctaatccgaccaacatcaagggcgtattgtctaacccgatgaattattcagaagcatctaaggtagcgctcttcggtgtggcagattatacatggaatccgcaggcgttcgacgctgagcagaactggtatgactgctttgacgccatcatcccggatgatccggaaatggctgacgcgctgcggaccgtttatggaaacctgaacgatgactatgtaccgacagagatcagccgtctgatcgccggttactccggaacgaaggaatcagcagcagcgatcaagaacaagatgatcgagatcatggatgcggttgaaaaagtcgagacgctcgcagacagcgacaatgcggcttatcgtctgatcgtaaccgaagcgcagacatccatgaacaagctgtatgacatggcagcggccatcggcggcgccatggcggtcgtatccagcaatgatccggtagaacaggtgcagggctattaccttgcgaccgctgccaaggaacgcctggacattccgcgcaatgagcgttatcagatcatctctctggaaggtgccggagaagatatctacaacagcgtgctgcaggcagtgtcttctgacgaaggcctgaagccgttcgtcgacaccgcgtacagcgcgatgggtgattttgacccggacagcgcagataccagcggcgtgcagatcgacagcatccagatcgaaccgagcgaaaacgtcgaagttccgcagggatcgacttatcagtttaccgcatccgtttcttccccgcagggcgatctggatgccgtgaagtggagcgtatctggcgcaaccgctgaaggcaccaccatcaacaacaatggcgtgctcagcgtggatggcaacgagctgtctcagacgctgacggtaacggcgacttccgcatttgacgcagacgcaagcgcaagcgtgacggtacgggtaaccgaccgtatctatgtggacccgaccattccggtcaacctgggtccgagcgcgaccatcctcggatcaagcggatcctccgcagccggagaaggtccggaaaatatcttcgatgatctggacacgacaaaatggtgcccgggcaacggcacgaacacgaaccagtgggtagcattcgatcttggttctgttaagcagatcagcagctggcagatcgtcggcggcggcatcgagcatgcgctgtatgcgccgagctcctttgcgctgcaggtgctcatcgatgaggatccgagcgaggaagagctgtccagcagcagttatctgagcaataacgccaattggagagatgtctcccgttatgacaataacagcgagaacatcgtcaatacgaccttcgatgaactggtcgaaggacgttacttccgtctgtatatctacaatggttcacagaccggtgcgccttatccggcaacccgtatcttcgagaccagagtatacggtgtggataaagcgatcgtcgagcgcacgcatgcgctgaccatcgatccggaaatcgagcatggatcgatcagcgtcgatgcggcacacttcgaagaaggcgcaaaagtcaatgtgtacatcgaaccggatgaaggctatcagctgaaggaaggttcgctcaattacaacggaacagcggtcgaaggaacaagcttcctgatgccgggagaagatgtcgtcctgagcgcagaatttgaggcggccggaacagtttctgaaccggacaaagaagcattgaatgcagcaatcgaaaatgcggaaacactgaatgaagcagattatacgagcgcaagctgggcagcgctgcaagaagcgctgaataacgcgaag

SEQ ID NO: 1297 - DNA, 16602 bp, Unknown
  16S sequences of unknown bacteria
agcaagcgagcagcgcgaagttcttttcgggtaccgcaaggcggagggggcaaatgctgccgcaggctacctttgaagcgcatctgtgcgcagtacggatttggatttttcgccccaaaaaaatctaaatccgtatccagcacagctaagcgtcaaaggggtttgtcaagggggaagctcggtcccccttgaccgtattttggttccttttgtacgcacaaaaggaacgccccggcggcgagccgtacaggctttgcaccttgcaaaatcaatgcgccgccgaaggcaactacaaactggcccccgccagatgggcgtataggttacgcctttgcaaaagactccgcgacgccgataggcgagatgaagctgggcatagtttgttccgtcaatccctcagtcagccttacggctcacaactccccttgcacaggggaggcatttttgagaaaggcaaagcagacccggtagatagcccggcagtgccgcagatagaaggcttcgaaatcgggcggcatggcttcacttccttttactcctataatgatacgacctaagagtacaaattgtcgggcgggatgtcaagattttttgcgaaagcggcagaaaacactggacagtaagggagcggcatggtatattataatcaaaatgtaaccagttacatcgccggagatacgccacaaaggaggaaacgacatgaaagaaaccgagagaatcaaagcggggctgctgtttaggcccaactccatggagctgcgggacaccaagcacaaggcgcacgagacctgccgcctggtgaacacgctggatgagtacgacgagcgcattccggggctgatgcgctccattctgggaaaaatcggggagcggttctacttccagacgccggtgcagttcaactatggcatccacacctacataggggaggatttcttcgcgaactataacttctgcgtgctggatgacgcggatgtttacattggggataatgtcatgatcgcgcccaatgtttcgctgatggcggcctctcacccactgatcgcgcatgagcggctggggctgatgtgcggcgacgacggactgcccaccattgccgaaaacgccgagcccatccgcattggcaacaatgtgtggatcgggtgcaatgtgacggtcatcggcggggtgaccattggcaacgatgtggtcattggcgccgggagcgtggtgacccatgatatccccgacgggaccctggcggcgggcaacccctgccgggtgatccggaagatcaccgaggcggacagcatgaaggaactggcccgtgaggagctgtaacccgtacaaaaaagcaaatcacacctttcccttttgggagaggtgtgattttgatttgggaagagaggatggaggcatgcgggccggggctttagtcctccggctctccctaatcgtcctcccagaacagctcatccagtgttttgcccaacacccggcagatctgccggcacaggttgatggtggggttgtaatcccctttttcgatggccacgatggtctgccgtgaaacgccgcacagctccgccagcgcctgctgggaaagccccatcgccgcccgggccgcttttaacttcaggttcttcatggcgtcactcctcatcccgggcagccatgcgcagccggatggccaatgccgccagtatgatgaggcccatggcagcgatgatgaaattcatgctgttctccaccgccaggccatcggcaaagcccaccgattccataacggaaaatcccgcagtcaggttacctaccaccacgatgccgagcacaagcagcatggcgcgcgggttctgccggatgccgaggtaggcatcgttggcaacggcaacacaggcaaagaccgtcacccccacgcagatcaccgcaaagggcagcagggctgtatcctttggctgccactcggtaaagatcgggatgaggtacaccgccagcagccccgccagtaaggtatagaagccagccttataggctttgccgcgggccagctgctgccgctcatcgaattcggctttgccaagtttttttcccgccagcttgccgaccaccaagccggcgacagccatcgccgccataaagcccaaaaatacgaagtccatatccgcgcccccttatttgcgatccaacagagcctttatcagctgtactacaccccaaacgactactgtcagcagcagcggcgcccatgggctttgcagaaaagcatccatcgcttctcgcctcgctttctgctttcagcatagcactgttccattataatgtcaagtatattttacattttaatagagcttgtacgacgcagcggtgcggggggaaggcttttccgcaaaggggaaggggttgggaaggagcaggggccgcaggcccggcggcggagccgccgatgcgggcaaaacccgcataagccgcccagagggcggcttggcctgcggccctaccctgccccctgctgaaacctgcatttgcaattgtgctgtgggcgtggtacaataggggctcgtgatttttgcagaggaaaaggagacagcaaattggagaggatgtttagccgggcggacctgcggaagctgctggtaccgctgatggtagagcaggcgctggccatgaccataggcatggcggatacggtgatggtggccagctgcagcgaagcggcggtttctggggtatcgctcattgattcggtgaacgcggtgttcctgtggctgttccctgcgctggccaccggcggcggtgtggtactggcacagtacatcggccggggggaggaagaaaacgcgcggcgcagcgtggggcagctgaccctgctgctggtgggcttttcgctgatgatctcggtgctgtttatgctgttccgggatgagctgctggtgctgctgtttgggcagatagagccgcaggtgatggcctatgcccgtacctactttaccgtttctataataagctatccctttttggcgctgtataatgtaggggccagcgtatttagggcagtgggcaactccaagctttcgatgacggtgagcacagcggccaatgcactgaacctcatcggcaacgccatattgatctatggctttgggctggaggtgctgggcgccgggctagctaccctggcttcccgcattctgggtgctgttattatgctctataagctgctgcggccggactgcagggtggggatgcgttcctttggcgacctgcggtttcaaaaggagatgttcggacggatcttgcgtatcggcatccccagcgggctggagagcgcggcctttaacattggtaagctgctggtggcaagtctggtctccacgctggtgacggcagccattaccgccaacgcggtgatgaacacgctgcagagcatcatcctaattccgacctcggccattcacctggcggcagtccccatagtggggcaatgcctgggggccggcaaagctgcggatgccaaatactacaccaagtggctggtggggctggcttatatctgcctctttattacggcgggcgggacactgctttttgccgatcccattctctcactgtttaagctgacgccggagaccacggcggtggcgctgcggctgctgcggttctacttctgcattgtggtgatgctgtacccgctggcctttaccattaccccctgcctgcgggcggcgggcgatgtgcggttctgcctgatcggcgcgatgaccggcatgtggctgggacgcatcctgtgcagccacctgtttgtttccttcgggtggggcattatgggcgtgtgggtggccattgtggcggactggttcatacgcattgccttttatctgccgcggtacctgagcggccggtggctgaagaaaaaagtgatataacgataaaaaagaccctcaccgtgcggcgggggctttcttttgatattatccggggactgttcaatgggctctgctgttccatttttcaaatatccagtggatgaggggcgcggcgacgaacatgttccagaagaaggccatcgggaagtttttcatggccgtcccaatccagatggccggcagtcggaatagcggctggccgcccagaatgatctgaaaaagaatggacgcgataaggctcataaggggacacatgaccaatatggtgccggcctggcgcataacgcggcagaaataggggttatccttgtcgggggcacagtattttgccataaaggcggccccggcccgattgccgaccaaattggagacgataaaaacaatcacgctcatccccactgcttccttcagtgcttcgagaaacaccggataagtgatggacgaaaagccctgtcccacggtcagattgtaacccatgcggatggcgatattgtaaacctccatgccatatgccataaaaaatgacatcaatatcccgaatacgatcctttgtgttttggtctttggcattttactgccctcctgtaaaagaaataataaagagcgtaatcttttgcacttgcaatagactacgcccataggacttatttctattagaagagatgctgcggaattttagatcacactttttacgggaaatagtatagcacacttttctccaggatgtaagtcttttttgcgggctttccttaaaaggcgacccggccggggcatttccgccgcataaaggcggggaattcctccagggcgcccttggtgaaggcggtcttctccagcagcagggcggttttgccggggagctccagcagataaagccgggggctctgacggacggctaaaatctgctcgtagcgaaggtccccctcggaatcttcctgatggttgtggacaatgaccttatcctcatagaagcagagggtggcggtgacctcactgccgtatttcttaaaattgcgcttggcgatcttgagcgcgacccgcgcgggcgcgccgtaggtggtcataaccaaagcaaaggccgccagcagcagaagtccggcccacagactgatgccccgccgggcaagatcccaaatggcggcggcgaccgccaaaaccgccgggatgatgccgaccagcaggctccaccgggggacggtggcccgggccatttcggtcaggttctgtcgggtgagggtggtggtattctcaaagatgctttccatggcgtcctccggtcttttgggtaagaatagtgggaaaaggctcccccatcgcccgatgagggagccggccaaatgttacacttattcgaggttcttcttgagagtctccagctcctcccacagcttggcgggcagacgctcgccgatggaggtatagaagccttcgatattctcggcatcctcgcgccacagggccttatcgacgctgagcagctcatccagcatcatgtgggtgaactccttgccgtcgttttccagaccctcgatatcgatatccttgacatagggcagatagccgatttcggtctcgcgggcgctgaccttgccttcgcagcgggccaggatccacagcagaacacgcatattatcaccgaagccgggccacaggaagttgccttcatcatcggtgcggaaccagttgacatggaagatcttcggggccttatcgcccagcttttcgcccatctccagccagtggccgaagtaatcgccgacatggtagccgatgaagggacgcatggccatggggtcacggcggactacaccgacagcaccggtagcggcagcggtggtctcgctggccagaacagagcctacaaagacgccgtgggcccaatcgcgggactggtagaccagcggagcggtcttggcgcggcggccgccgaagatgatggcggagatcggaacgccattgggattctcatactcgggagagaggcaggggcaattgtggctgggcgcggtgaagcggctattgggatgggcgccgggggtgccgtcgctgccgtcccagggctcgcccttccaattgagcgcgtgcttgggaggattcttatccagcttctcccaccagacagtgttatcatccaggttctgcaccacattggtgaagatggtattcttgcgggtggtggccagggcattgggattgctcttggcattggtgccgggcgctacgccaaagaagccatactcgggattgacagcccaaaggcggccatcggggccgatacgcagccaggcgatatcatcgccgacacaccaggccttgtagcccatttcggcgtacttcttgggcgggatgagcatggccaggttggtctttccgcaggcggaggggaaagcggcggtgacatacttggtctcgccctcgggattttcgatgccgagaatgagcatatgctcggccatccagccctcggatttggcctggaaggaggcgatgcgcagggcgaagcactttttgcccagcagcacattgccgccgtagccggagttgatgctccagatggtgttatcctccgggaagtggacgatgtagcggtcctcctcgcagagatcctttttggaatgcaggcccttgacgaaatcatcgctgtcgcccaggaaatccagcaccttttggccgatgcgggtcatgatggccatggaaagaacgacatagatggagtcggtcagctcgatgcccaccttggcaaagggggagccgacatgcgccatgcagtaggggatgacatacatggtgcggcccttcatggcgccgtcaaagagcttgcccagcttttcgtaggcctccttggggtccatccagttatttgtaggaccagcgtcctcttccttgcgggtgcagatgaaggtacggccttctacacgggctacatcattgaccgcggaacggtgcagatagcagccgggcagcttttcctcattcagcttgatcatctcgccggtggagcaagcctcggcgcgcagcgcctccagctgttcctcgctgccatcgatccagacgaccttatcgggcttggtgagggcgaccatctcgtccacccatttgagaacggacttgttggaagtaagtgccatttttatatctcccttctgataaagccggaaaaccggcctgtttttacgcatctattataccctatccccgcgggaaatgctaccaccaaatttgttaagtttccgcgaacggaaaaagcgcgggctaataagcccttatgccccaaactgttcggtgatctccatggtgggcaagccattgagggattcatccgccgtgtggccggccaaatactcgtagtatgcctgcgcgccgatcatagcggcattatccccggtgagagaaagcggcggcatgtaaagctgccagcctttttcggcacaaccctgccgggcacgctgccgcagccagctattggcggaaacaccgccggccagcacgattttatcgcagccgcagcgctcggcggccagggcggtcttttgccacaggatctcgctgacatggcagcaaaagctggcggcaagatcggcgggaaccagaggctgtcccttttgctcggcattgtgcgccagattgatgactgctgttttgagccccgaaaaggagaagttgaactccccttcggcatggggggtaggcagcgggtaggcgtggggattgccctcgtgcgagatggcatccagcgccacaccgccgggatagggcaggccgacacagcgggcggccttatcgaaggcttcgcccgcggcgtcatcggtggtgcggcccaggatggtgtagtcgcagtaatcccgcaccaatacgatatggctgtgcccgccgctgacgatgagcgccaaaaaaggcggttccagctcgggatgagccaaataatttgccgccacatggccacggatatggtgaaccgggatgaggggcttttccgccgaaagtgccaagcccttggcgaaattgacccccaccagcacggcgccgatcaggccgggggccgcggtaacggcaaccgcatccacttcgcgggcggtaaggccggcctgctccagcgcttcggcggtcaccccacagatggattcgatgtggcggcgggaggcgatctccgggacgaccccgccgtagagcttgtgttcttccacctgcgtgtggatgaccgaggaacagatcttccggccatcttcaatgaccgcggcggcggtctcatcgcagctggattcgatactgagaattttcatacaggttccggattaattttcttttttatgatggcggcgggcaatgcggcgtaccagtcggctgatgcgccagaacaggaacagtccggccaggaggatgacaccggtctttttcagcttatccagagaaagctgattgctgacgaaaatgacctcggggtggttgccttcggcatcctcacgggtgacgaccaggccgtttttacggccccagtaaaagtggatgggattctttttcatagtgatacactcctttttatttttactcagttacagagtgactgtcatcagtatagcatcttctgtgggcgaggtatagtagtttttgcggcggcccaccggtacaaaatcatgtttttggtaaagagcaatggcaggggcattggtttcccgcacctccagcgtaacggtggcaaggccaagacctttggcccggcgcagcagctcattgagcagagcatcggcgatgccctggcggcggtggactggaaaaaccgccacattagtgatgccgccctcatccagtacatattccatgccaaggtagccaagcgcttccccttcccgctccgctaaaaggaacagcgagcggccgttgccgagcgtttctgccaggcttttttcgctccatgggtgggcaaagcaggctgattccaaagcggcaagggcgggcaggtcgctttcggccgcgggacggatggtaacggacatggggtaggctcctttcggcggggatggggtgggtttctgcagggggcagggcgggccgcgggcccggcctgcggcccgatcctgcggcttgcagaaattagcgagggatcagtgggcttcgccccaggttcttcccaccttggcatccaccaaaagcggaaccgacagcgaggccgcggattccatctcctggcgcaccagctcccgcacctgctcggcggatccctgcggtgtttcgacaatgagctcatcgtgaacctgcaaaatgagctgggcggcggggacttccgtctttaggcggcggtacacccgcaccatggcgatcttgataatatctgcggcggtgccctggatgggggcgttcatcgccacccgttcgccaaaggcgcgctgcacccggttggaggctttcagctccggcagggggcggcggcggccgaacagcgtttcggcatagcctttttccttggcgtcctctatggcacgctccaggtaggcggcaatgccgctgtaggtctttttgtaattcttaatgtaggtatcggcctcctgcatcgaaacaccaatatcccgggaaagggagaaggcgccgatgccatagacgatgccaaagttgaccgccttggcgcgggagcgcatctgtggggtgacaaaggcctccggcagatcgaatacctgcgcggcggtacgggtgtggatatccacgccctcccgaaaggcttcgatcatagcgctgtcattggccagggccgccagcacccgcagctcgatctgggaatagtcggcatccaccagcaggttgccctcctccgcttcgaagaaatcccgcatacggctgccgggttcggtacggatgggaatattctgcatgttgggctccgcactgctgatgcggccggttcgggtatcggtctggcggaacaccgagcggatgcggctatcggggccaatggtgtccttaaggccctccacataggtggaggagagctttttgtacttgcggtactccagtatcttgctgataatggggtgataggggatcagctcctccagcacctcggcattggtggaatagccgctcttggttttctttttggcgggcagctccagcttgccaaaaagaacatctcccagctgcttgggggaattgatattgaatttgccgccggccagctgatagatctcctgctccagctggatggtcagtccatccaggtagatgccgaactcccgcaggccctcgcggtcgacgcgaaagccggtgagctccatcgaggccagcacctcacagaggggctgctccacctcccgcagcagcttttgctggccgttcgcttccagctcccgttccagcaggggagaaagcgccgaaaggcccaggcattcccgtaccagcggcagcagcttctgcggggcctccgccgcagggagggaaagcccatgctgggccagctggcgctccacggcgtagtcactggcattgggattgagcagatacccggccaggccggtatccagccatagggcggcaaaggtattattcgcctttagcgccgctttataatagggtttggcgtcggcggtgatttttggattgggcaaagagaaaattttctgccacagggaggcagcgggatcctcgcagccgcatagctgctccccgcaaaggacgcagagggcggcaggcgtaccatcctccgcccagcgggccgaaaggatgatcggggtttccttgccccaggcggcaaggtcagattcttcggtaagagggacaaaggtcacagcgggagccgcctcctccgcggcgggttcctccggcatcgtttccggggcggcaagacccagcctggtgataagacggttgagctccagccgggaaaggaaggcataaagggcgtcctcctgccggggccggggcttcagttcgctccactggggtaccggcacctcgcagcagatggtccccagctcccggctgagggcggcggattcccggccctcggccagctttttacggagcgccggggtcaactccaactcctccaaatgggcatagatatattcgatggtgtgatacttttggataagggccagagcgcctttttcgccaatgccgggcacgccgggaatgttatcggagggatcgcccatcagggccttgacctcgatcatttcccggggtgtcacaccgtatttttcatgaatggcggcggggtccattatctcataaacggcgccctgcggggcagtcttggccaagatgacgctgaccttatcggtgatgagctggagggagtcccggtcgccggtgcagataaggacggtatcgccgttctgctccccctgccgggccaggctgcccaggatatcatccgcctcgtagccctctacttctagaatgggatagcccaaaagccgcagcatttccttcaccagcggcatctgctggcgcagttcctccggcatccccttgcgggtgcccttgtacggctcgtacattttgtgccggaaggtgggtgcgtgcagatcaaaggcaaaggcgaccgcatccggcttctgttcctcgatgagcttataaacaatattgaaaaagccgtaaacagcattggtataggtgccctcccgggtggagagcagccgcacgccgtaaaaggcacggttgacgatgctgttggcatcaaaggcaaggactttcatgatgggcctccttgtggggagatttgagaacatacatttatattttattataccatatcctgccccggagggaaagcaaaatcccgggattttaggcggggcggcggaatttgtgccgtaaagccaaacctgctataataaagaaaaactgccagagggaatagtatggaagaaatgcgccggaaagaccgggaagtaacagagctggagaccgtcaaggagatcatccgccagtgcgatgtgctgcggctgggactggccgatggggactacccctacatcgtgccgatgaactttggctgggaggaaaaagaggggcggctgtatttctacctgcacggggcagcagaaggccgcaaggcggagctgctgcggcaaaacggggcttgttccttccagatggactgtggccaccgggtagtgcagctgccggggcacggcattaccacacggtacggctgcgtaatgggcaaggcgactgttaccccgctgaccgaggaagaaaagccccaggccatgcggcttttgattgaccggtacctgcccggcgcaccgggctgcccgccgcagaccatggcccacaccgccatgtggcggctggaggtggccgactggagcgccaaggagaataaggactgaaccgcacgccatctgcttttctttttcgggatggcatggtaaaatagagtcagaattcgcggcccgggtcgggcccgcagggcaacccatccggaggatgggtttggcggctgcgccgcctacgcccgcctacggcgggcggccctgcgggccccatccctgcggcttgcagaaatcatggggaggagccatggaagaaacagctgttattaaggtaatcgcggagatccgcagcgactttcccaccaaatttggcatcccgcggcagagcgggctggtgccggagctggaagcgctggtggtgttccggccggagtaccgggtaccggaggcgctgcgggggattgagggctacagccacctgtggctgctatgggaattttccgaaacgaagcgggagggctggcggcctaccgtgcgtccgccccggctgggcggcaaccgccgggtcggtgtatttgccagccggtcaccgttccgccccaatgccattgggctttcctgcgtcaagctgctgggggtggtgcaccatccagaatggggcacggtgctgcgggtagccggggctgacctgatggacggcacacctatttatgatgtaaagccctacctgccccatgccgattgccacccggaggccaccggggggtattcctccgatgggctagcacatgtcctcacggtgatactgccgccggagtgggaagaaaaggttcccgcggcgcaccgggcttccctgcgggcggtactggcacaggacccccggccggcttatcagcaggatagcgaccgggtatacggctttccctttgccgggctggaggtgcactttaccgtggcaggtgatgtgctgacggtctgcggcattttccctgccgaaaaagcatgaacgatttgtaaaaaggacggcgggagcattgcttttcccccgccctttcggttatgatgagcatggaatagaatccgctgtggatagatgaaaggagagcatcactatgctgggtttagcactggaaggcggcggtgccaaaggcgcctatgagatcggcgcataccgcgcccttaccgaactgggttatcattttgatgtcatctgcggtgtttccatcggcgccatcaatgcggcgctgctggcgcagggcgattgtgaaaaggccgcggaattttgggagacgaccgccaatgacgatctgttctctgaggaggacaaaggctttttggaaatcatcaaccggcaggtgaacctcaataccctttcggccctcaaggaaaatatcaaagccgcgctggaaaacggcggtatcgatacctccaaaatccgtgccttcctggagcagaacattgacccccagcgactgctggaaagtcccattgattatggcatgatcgccgtggctttcccggagcttcagccgctgatcgcctataagaaagatatgacccccgaaaatgtgctggaccatgtgctggcctcggcttcgttccccgggttccagcccaccgtcattggggataagaagtacctggacggcggcctgtacgatgcctgcccctataatgagctgctggactacggctgcgatgaggtcatcgccatccggctcaatggcttcggcatcatccatccgctgcgggataagcagaagatccgtcagatcttccccagtgagcagctgggccctgtcatgcggttcgatcccgccaccagccgccgcaatattcagatgggctactacgataccatgcggtttatgcgggagctccccggccagttgtattacttttccgaaaaagccgatggctttgcggcctttgccgctctgccggagaacgccataaaggccgccggtatcccgttgcgcctgccggaggggctctcccctcgccgtgccctgttcgagcacattctgccggccgtagccgcggagctgcgcctgccccgggaagccggctatgatgacctgctgctggccctgctggagcaccgggccgaacagcttggcattggccgcttccgctggtacacccccgcccagctgcaagctgtcatcgcggaatccaccgccctgccggaggaaccccgccgccccctgctgcgcagccgtccgctggaggccgccgaaattctggcagcggcgctgccgttgctgggataatgggcagttttgttgtgcttttctctcctttttgccgcctttttgtgcgataaggagatttgatgcaggatatcttgcattagcgcacaaaagggctataatacctatactgtcctcttaatctctatgccccagcagcgcccgcggcgctgtactaggctttttcccaatatgcacaaagaaggagcgttgtttcccttggctactgcacgccataagtatgaaatagatatgtgtaccggtagcttgccgcagaagatcctgcttttttccctgccgctaatggccacaggaatgctgcagcttcttttcaatgccgccgatatcatcgtggtgggacggtatgtgggcagccacgcgctggccgccgtcggctccaatggctccatcatcaatctgatcgtcaacctgtttatgggtatctccatcggcggcagcgccgtcattgcccagcactacggcgccgcccagtacgaggatgtctccgaagccacccacacctgcatgctggtgggactcatcagcggtttctttgtcatggtagtgggcgtggtgtgtacccccgctatcctgcggctgatggatacccccgacgatgttctcccactggctatcctgtatctgcgcatctactttttggggatgccaggcagtatgctgtataactttggtgcggcggtactgcgcggcgtgggcgatacccgccgcccgctcatctttcttttcttcgccggcatcgtcaatgtcggtctcaacctgcttctggtcatccagttcaatctcagtgtggcgggcgtcggcattgccaccgttgtttcacagtatatctccgccgcgctggtgctgtggtgcatgctgaaaaccgacggctgctaccacatcgtcctcaaggagctgcgcatccaccgggataaactcatccgcatcctcaaaatcggcattcccgccggtctgcagggtgccatcttctccatctccaatgtcctcatccagtcctccatcaattccttcggcagcaccgccatggccggtaatgccgccgctgtcaatatcgaaggcttcgtttttaccagctgcaattcggtagcgcaggcttcccttaccttcaccagccagaacctcggcgccgggcagtacaagcgcctgcggggcatcaccctttggtgcttggccctgggcatcctcctttcggagattctcggctttatcgcctacggctttggcaattcgctgcttgctttctacaataaggattcggaagttattgccatgggcatgatccgtatgatgatcgtcggtaccacctacggtctggatgccattatggatattatggcggatatcatccgcgggatgggcagctctgtcatgcccatgatcgtcactctcatcggcgcctgcggcttccgtgtggtgtggatctataccattttcgccactcaccacgatctgcgggtactctacatctcctaccccatcagctggatcttgacctcgctcacccacatcatctgctatttcatcgtcaagcgccgccgactgagcggcctaacggagggagttccatcagtatgagccgtatgaaactgatcgccttgaccttggccttgctggccaccctgctggtattcaccgcctgcggcaatcccatcagcgagatcgtccatggagatccgccccaggctggaaccccggatgcttccgatcccctctccccagagcccgaaccggaaccggaggaaaccgaggaacagcgccgtgcccgcctcataaaaaagatggaggatatctttgcggcggcagagccgatggagaactacaccttcaccctcaatgatccggtgacggtggagggccgggaatactactatggtgtgtggcagcgcgtcatcaccgattacgatacccagtcccgctatctttccaccgtagcggagttcttcattaccccggatggggaagaatgctacatcggcaaccacttccccgccaatgaaggcaacggcgaaacagtggtattttcctctggcaatatctttgaggaaatcaataatggctgaattctatcccctgctctttggcaggggattttctttgtctcagcttctgtttttttgctgcttctcctcacccttgtgcagggccccagtaccggcccgcagggcaggcgacgcttcgcatcgccctaagggcggcctgaaagactagatcggaaga

SEQ ID NO: 1298 - DNA, 5799 bp, Unknown
  16S sequences of unknown bacteria
cgtgatgaaggcggcattgctggccagcggttccaaaggcaattgctgcctggtccgccatggcaagacgagcatcatcatcgactgcggcggcacgaagcgctatctcacccaatgctttgaccgcctgcagtatgatcctgcctgcgcggacgcgctgctggtgacgcatacgcataaggatcatgtggcacagctcaacacgttcaagcatctgccgatctatgcctgggcagatctgggcgttgcggatcagcgggtcggcgagccctttgagacctttcagatcgccgagatgcagatcacggtgctccccctttctcatgacgccgcgcatacggtgggctatgtgatcgaggccgggggagaaaagctggtctatatcaccgataccggctatatccgcaatgatgtgaaggaacgcatcgtcaatgcggactattatatctttgaaagcaatcacgatatcgagatgctcatgcagacgaaccggccggtctacatcaagcagcgcatcatcaatgacagtgggcatctcaacaatgaggacagtgcccgggtgctcagcgaagtgatcggagagcgcaccagggagatcgtgcaggcgcacatctcgcaggagggcaacacgcgggcgcaggcatatggggtgctggaggcagaactgtcccggcgcggactgctgcgcagcgatctgaagctctttcccgcggaacagttcggcatccatctcatcgcagggaagaacaacgcatcatgagcgatcagtcaggaacagcttcctggctttttttctgccatgacctgcaggttttgcaaaatactactgtatttcatagatgtttcaccatttttcaaacttgtttcaaaatacatacacaatgcactgatccatgctataatggaatatatgtaaggggttgcacctgcttgtgcggccttcatgcatgaaaaaaaggagaatgagagatgaagaagagaacgacacagacgtattcgatcttgctggcgtccatgctgggcgtcagttccgtggtgcctgcttcgatgatgccggtgatggcgcagaccgtccgggcatcggccaccaggacgtatgccgaaggcgagatggtgagcgtgaatggcggagaaggcgccatcgatgccagcagcgatgtatccgccttcgtcgggctggaggactttaccttcaacgcgacctttaccgtgacgggcagcagcgtcaattccctgtttttcctgggagacagcacccggcagaacaactacatcaccgtttatgtgaacggacataccatcggcgtggaatcccgcgacgcttcgggcgcgcatcagatcagcggagcgaccgtaacgctcaatgatgtggatttttcccagcagcataagctgacctttaccatggacggcggcaatctttaccgcatctatctggatggcgaaatggtcaaggaaggcagcgtgagcgtcaacttcagtgccggcttgttcgacagcgcggactacatgggattcggcaatggcaaacgagccaacggcggcaatccgtatccgctgaccggttcgatcggcgatatcgagctgtatgacagcgccttgagcgaagaagatatcctgagctatcaccgcggcgagctgggcaatgccgtgtacacttatgaaaacgcctatggcgagagcgtgaacgacaccgagggactcagcgcggtgaaggatctgacgcagggcagcatcagcgtgcgttaccgcatcaatgatcctgcggacggcccgatgatgctcatggcggtatcggacggcacccaggaccgcagctatctggggctgtatgtcaatccgaccagcaatcagctgggctttgacgcgccgggcaatgcgctgttttccgggaagacgctcagcttgagccgctatggcaaatcgatcgcagatacatcctggcatacgctgaccgtgaccaaggcagatggcggcatccgcttctacctggacggcgagtatctggatcagtataccaacggcatcacctcaggcttcttcaacaccgtgagcagcccggacagcctgggcatcggttatgtcaaccgcgcgacaggcaatgagatggcgctggacggtgcgatcgactatgtcaatgtctatggcagcgtgctgagcgagagcgagatcgcgctcgaacatgagacgacggcgtgggagccggatcaggccccggacatgagcaacgcctacaagagcgatccgatcgatctgtattacaccggatatcagaatgtgacggcgtaccgtatcccttcgctgctcacgacgagcgccggtacgcagctggccttcatcgatgagcgaaacagcggtgcgggcgatgccggcaacatcgatgccgtcgtgcgccgcaagagcgcggacagcgatacgttctctgcgccgatcacgctgatcgacctgccgaacaacggcggatccgcggcctttaccatcgacgcttccgcggtgcaggatcaggagaccggacggatcttcatgctcatcgacatgttcccggaaagctccggactgatggatacctcgcagctgaccaccggcaccggatacaaggaagtggacggcgagatgtgccagatcctgtattataatgacggcacgcatgcagaagccggcgtcatccgcaatgtggatgaaaacggcatcggccatgtctatgacgatgagggaaacgacaccggctacacggtcatcgtgaataccggcggcgcatccgatgaaaagggcaacctgtataaggacggggaatataaaggcaacatctacatgctgagaaacggaccggacaagggcgaactggtcgtgctgaacacgacttatctgtggctcgtctattcagatgacgatggacagacttggtctgatccggtcgacatcaccccgcaggtcaaggaagactggatggtattcctgggcaccggaccaggggcaggcatccagctgcaggacggcaacctggtgttcccggtctacagcgccaacaccaacgtaggcgcgagccagtcctccgcggtgatcatcagcgaggacaatggcgagacgtggaagctgggcgacagcccgcagacccttcgcggatatgaccgcgagacgatgaccggcggcggcatgctgacagaatctcaggccgttcagctcaatgacggccgcgtgctgctgttcatgcgcaacagcatctccaaccatgtctatatggccacgagcacagacggcggcatgacctgggacagcatcgaacagatcagcgagctgaatgagtattactgccagctgtccgtcattcactacaataaggatgacggggaatatctcctgctgagcaacccgaacgtgtccggacgatatgacggctgggtgcatctgggcaaggtcaatgaagacggatccatcagctgggaatatgcccagcagctcaatgaaggaaaattccagtattcctgcctgagcgtattggagaatgacggagaaaacccggtattcggcctgctgtatgaagacgataccgacggttcattcgacatcaagtatacagaattcgatgagaatttcgtcaaggcgccgctgatcaccgaagagctgagcgcgccgcagatcgttgattcatccgctgagatcgacggcaccgacatcaccgtgacgctgacgttcgatcaggacatcatggcggtaggcacgccgaagctcgagctgaccctcggcagtgaagcatttgaagcagactatgcggacggttcaggcacagagacgatcaccttcaagggcacattgccggaaggtgtcaagggcatcgtgcgcgccaagggcatctcgctggaggaaggcctgttggagaacatcagaaacaagggcgtggacgagatcgacctggagctgtatgacctcacccgcatcacggaaggcctcagcatccatgactactcatcccagcagtccgcaagcacggcgccggataccgacggtgcggccgtgaacgtgctggatggcaacgtgcggacttactggcactccgtatggagcgatgcttcttaccagctgccgcagtatgtgagcgtggatctgggagagacacaggaaatctataaggtcggctatgtcggacgttatggcaacgccaatggccgcatcgaggaatacagcatttccgtcagcaccgatggagagcattacaccgaagtgcagcgcggcacgttccagaacatcgatggcgagcagcaggtggaattcgcgccggtagaagcgcgttatgtgcggatgacggcatattccgcatatggcaacggcggaacgcagagctgctccatggcggagatgatgatctatgcttatgcggaaggcgtcatcgagcagggcgatcttactgccctcaacgagctgatcgcttccgtgcaggagctggatgccgatacttactccgcggtgagctgggcagcccttcaggatgcgctggaggatgcgctcgtcatcagtacgtcccaggatccggtctctcaggcgatgatcgacagcgcacgcgacgcactgcaggatgcggcagatgccctggtggacatcactcgtgtcaaagacaagctggcagaagcagaagcgctggatgaaagtgactataccgaagcgtcctgggcggcactgcagaccgtgttggcacaggcccgcgaacagatggatcaggcgacgagcagccgtgaagtgaccgacatcgtcatgcgcatcgacaatgcgatgaatgccctggtggaagaagtgagcgacatcgccagcgaagcagccgtacaggcactgcgcgatatggtcgacaaggccgttgccctgggctctgatgatgcggcactcaacgcggccattaccgctgcacggaccgtgctcgataaagcagccccgaccacgaccgaagtcgtcaccgcactgctcgacctgagcgaagcgatgcaggatctgggcggatccgcagatgtggatgccctgagagcagatgtacaggcaacgatcgacttcatcaacgaaaacattctgaacgatgtagaaggactccgtccgggcaaggtccaggcgctgagagacgctgtccaggccgcacagacactgctcgatgaccctgaagcgaccgcagatgcgctgaaggcagcgaacaaagcgatgaccaaggcagcacaggagctgtgggagatcgtctccaaggcagagctgaacgcattgatcgaagccgctaacggatatcttgacggcgactacacggcagacagcctcgaggcgctgcagacagcgatcgaatctgcacaggccgtagcagccaatgaaaacgcgacaactgctgaggtaaccgaagccatcacaaacctggcaaacgcgatcgccggactggaggtcatcacattggatacgagcgcgctcgtccatgagatcgagctcgtgaatgagatgctcgccaatatcgataactatgtgccaagcagcgtagaaggactggcagacaagctggctgacgcgcagaacgtgctggagaatgcggcgagccaggcagagatcgacgaagcgacgaaggcgcttcgtgaagcgagactgagtgcgcgcacgaaggctgatgtgagcgcattggaggcgctgatcgcacaggtaaacgcccttgatctgcgcgcttacacgctggacagcgtggtgccggtcaaccggttgatgacgctgctgacgcaggccgtgaacgatccggagatcacccaggccgaaacagatgatctggctgcgcagatgcaggcgggc

SEQ ID NO: 1299 - DNA, 7951 bp, Unknown
  16S sequences of unknown bacteria
actgggcttactacggcctgtttccgccactggcggcggccttcgtgcgccccttttcccttcgggaaaaaggaggcttttggatagggctacttcatacggtagtgccacttcccaaaaggctcccctttggctaaaggggagctgtcagcgaagctgactgaggggttataccgcgccttatgccgctttgcgccgttttttggggcgcagattggccacaaccgcgccggagagcgcgcccaacaccgcgcccagcagcatttcgcccagcatcaccagcggcgcgctcacgctgccgtggaaggcccaatagacgccataccccagcaccatgtacacaaagcccacggccgcgccggtgacgaagccgcgctgcccgccggggccgaccgcgaaatacgcgcccgcgaaaatgctcgcaaccttggccagttggttcatcaaaaacagcgcgttgtccgaaatgcgcaaaaacaccaccgccaacgccaacagcaccatgcaaagcagcgttgcgcccgtcgcgacgcacacgcccttggccgccttcaggaaagccgctttcctttcttccatagcctgttcacccccatacccaacggtatgcggcggcaggcgcaaacatgcggcttacggcttgagagaaccgtcggtttcgatgagatccgcctggtacaggcggatggccgcgtcgcgctcttcctgcgtgtgcaggatccacacgccgagccggccgatctggtgcaccgcgcgggcgctttcgggattgacgggcgcggtggggtgccaggcggtggtggcgttgtcaaagcgcagccatatggtgagctgtccggcgggcaccagcgcgctgagttggcgcaggatttcctgcgaagcaggcccgtcatagtggatttgcgcgccgggcaagcgcgttaaaacgcgcgcggcgaattctggcgaattggccgtgaagcccacaaagggcagcgcgcccatgcgctccaccgtttggaagaaggtctcctgctgcgcggcggcatacttttgcagcacgttgtcgaatttgaccggcatgcgcgcttccagcgcaaaggacagcacttcttccagcgtgggaatcttttctccggcgaacgcggggtcaaaagccatgcccaaatccagatcgcgcgcctgggcgagcgaaagcgaatccaggggcgttggctgcgaaagcggcgtgccatccgcgtttcgcgcggtgcggttcagcgtagggtcgtgcagcagtacgcaatggccgtccgccgtgaatcggggatccacttcgaccatgccatagccctggcgcgcggcggcgcgcagggcgcagagcgtattttccgggtattccgtcgatacgccgcgatgggcttccagaatgcatgcgctcatggttgcttcctcctcttaatattccgcgctgtagtcctttgccaggttggcatacagcgcgtcaacctcttctgtggaaaggccggtgctcaggatgtattcgcgcgcggcggccgccaaatcgatggcccgcagatccgcgcccgcgatggtttccagcatgggcacgatgttgctgttcttcacggcttcgtattgctcgcttccctctgtgaggtggaagtagttttcgaagctggtcatatagtcgtcgatcgcggcttcgtagtttgcgcccataaagcagctcaaaagcgcgcaaacaaagcccgcgcgatccttgccttcgctgcaatgcacgagataggggccttcctgggcggacatgaattgcagcccgcggcccagcctggccttgaaatcatcggtggtgaaatccacgcccatttgcaaggcgatgacttgcccggcgtcgtaaagcgccatgtattccgcggagtcgaagccttcctgcgcggcaaacgcctcgatctgttcgcgggaatccgacagattcacgacggttcgtacgccgctttccgccaacaaggcgttggcgtaggccgcgcggcccaggtcgttgttgagcgggctgctgctgcggaaaagcgcgttttcgcccagcgcgccgcccgcaaccgcgcggaaattggcaaagaccgcgtcggatgcgtaatcctcgcgcgcgttggtggagaaaagctggcgcgaaaggtattcgtcgcgatatccgcccttgacggcaagcacgatggaaacctgcaaatcgccgatttcgcgcccgccggaaacttgccatgcgaaggcgtcctcgccggtcgcgactttggcggcgatgccgttttgtgtggcgaaatcgcccatgttgatggcgagcgttagcacgccttcgctgtcgcgcaggacggtttcgttcacgtccacgtcggaatagttggtacaaaagggaacctggtattctgtgccgtccacggtgagggagagcacgtcgccatattcgtagccagcttccgccaaggcggcgggcgccagatcgagcaccaggttgccgaacacctggatgtcccgcacgccgcaggtgagcgcagccggttccgccacggcgggcgccgccagcgccagcgcgagcagcacgcacaaagagcaaaggaatgatttgcgcatagaaaacactcctgtctttaagattgcagcatcttttggatgcgggccaggttcaccgcatcgatccggcagaccacggtagcgccgttttcgccgtattcctgggatagcacttccgccacggcgtgcagcgcggaaagcgccgcgcctttgtcgaaaggaatggtcagttccacgcgcgcgcgcatggccgccacgcggcgggaaatctcttcgcgtagccggtcgaggccttcgcccgtcttggccgaaatatacacggccccgggcggatcgatgggttcgcgaaaatcgaccgcgtcgatcttgttgaacgcctccacacagggcttgtcgcccgcgcccagctcgcgcagcacgcgcaacacggtcgcgcgctggtccgccatgtccggcgcggaaagatcgtgtaccagcaccagcagatcggcgttgagcgcttcttccagcgtggaatggaacgcttccaccaattggtggggcagtttgttgataaagcccaccgtgtccacgagcaggcaagagcggttttccggcaattccacctggcggaaaatcgggtcgagcgtggcgaaaagcttatcctccacataggcgtccgcgccggaaagcgcgttgagcagcgtggatttgcccgcgttggtgtagcccaccagcgccacgatggtttcgccctgcttttcgcggcgcgcgcggcgcatagcccgctggcgggagagctcctttagctctttggtgaggtcttcaatgcggccgcggatgatgcggcggtccagttccagcttggtttcgccggggccgcgcatgcgcaggctcgcgcccgaacccatgcgcgaaagcgacgcgcccagcccggccaggcgcggcaggcggtatttgagcatggccagctccacttgcagcttgccttccgccgtttttgcccggcgggcgaagatgttcaaaatcagcgccgtgcggtcgagcacgtccacgccgaggatcttttccagattgcgctgctgcgcggcgctgatctcgtcgtcgacgatcgccatgtcgatttccatggcctggcaggtcagttgcaactcttccgctttgccagcgccgatataggtggaagtgtcgggcttggcgcgcttttgcagcacgcgcgtgagcacgaccatgcccgccgtgtccgccaggttggccagttcgcttagggaatcgtcgctgtctacggagatgagcatcaccttttcggcgttttccaccgtgccgccttcggcgatggcgcgccccacgcgctcttccgccagctcgatttcgcgcagccaggttttgtgcgggatgcggcccggcttcaccgggccataggtcacgatggaaagccgcccatactccacttcgcccaaaaaggccgcggtgatgcccgtgcaatactgctcgcccacgccgatggcgcacatcgcgtcgaaccgcaacagccgcagcgcctgctcgtccacgatggaaaggcgcgcgtccccgcccgggtgcgtgtggatgcagcggaagcccgccagccgctcggtgttgcggcgcaggtgcaattccggcaagcccacgttcgaggccgaaccgaccgcgatttccagcacgctgccatcgcgcccgagatagaccatgatttcgcggttgagcgcctgcgtaaagcgcaccagcagcgcaagcaggcggtcgggcaggaattcgtcgcgcgcgaattccatgccataaagccgttccagttcattgagttggctttcacgaatgccttcgatattgccgtagatcatgcatcctccatactatgccgaatgcttcgcgcggtaatccgcgatggccgcgtggagcgcttcctcggccagcaccgagcaatgcagcttcaccggcggcagaccgcccagcgaatcggcgaccattttgttggtgattttcagggcctcgtcgatcgttttgcccttgaccatttcggtcgcgcggctggacgtggcgatggccgcgccgcagccaaaggttttgaatttcacatcggtgatcacgtcgttttctactttaatatagaagcgcatgatgtcgccgcacttggcgttgcccacttcgcccacgccgctcgcgtcctcgatttcgcccacgttgcgcgggttgatgaaatgatccatcacttgttcggtatacatggaaagctcctccttactttttctcgtacaggggcgacatggcccgcaggcgctcgacgatttccacgagcgtgtcgatggtgtaatccacttcttccgccgtgttttcctcgctcaggctcagacgcagggaaccgtgcgcgatttcgtgcggcaggccgatggccaacagcacgtgcgagggatccagcgagccggatgtgcaggccgagccggaggagccggcaatgcccttcatatccaggctcaaaagcagcgcttcgccctcgatgtagcggatggaaacgttgacgttgccgctcaaacgctgcgtgcggtggccgttgagccgggtttcgggaatgcgccgcaaaatgccctcgatcaggcggtcgcgcaggccgctcacataggcgttgcgcgattccatggattccatcgccagctcgatggccttgcccatgcccacgatggaggccacgttttccgtgccgccgcgctgggtcttttcctgcgcgccgccatagattagccgctgcagcttcacgcccgagcgaatgtacagcgcgcctacgcccttgggcgcgtggaatttgtggccggagagggaaagcaggtcgatcccgtcagccttcacgtcgatgggcacgcagccaatggcctgcaccgcgtccgtatggaagagcgcgccatgcgctttggccaatttggccgcctcgcggatgggctggatggcgccgatttcgttgttggcggccatgatggaaaccagggtcgtatccggccgcagcgctttttccagcgcttccaggctgacgacgccgtccccatccaccggcagataggtgacttcaaagccctctttttccaattgctccgccgcgtgcaaaacggcgtggtgctcgatttgcgtggtgatgatgtggcggccgcgccgcgcagcgcccagttgtcggcctccgtgccgctgcccgtgaaatagatttcgcccgcctgcgcgcccagcgccgccgccacctgcctgcgggcttgctctacggccttgcgcgcttcccggccaaaggcgtgtacggacgatggattgccaaagatttcgcaaaaataggggcgcatcgcctcgaacaccggctccgtcacgcgcgtggtggccgcgttgtccatataaatccgcttcatttcgtttcctccccgcgcatttgcgcgtaatcgttcagcatatcggcaagggtgatgccgtccacaatggcgttcactcccgtgtgaattttttgccataccagccgggtggggcaggcgcaggccttatcgcaaacgctcgcctcttccaggcagtccacgctggcgagttccccttccatcacgcgcaaaatctcgcccacggtgatggcttggggcggccgggcgagcatatagccgccctgcgcgccgcgcacgctggtgaccagccccgctttgcgcagcgtggcgatgagctgctccagatacgcgtcgggaatgcgctcccgctcggcgatggccttggtgggctgggggatgccgctgctatattgcagcgcgagatcgaacatggcgtgaatgccataccgcccgcgcgtagatagcttcatgatgcgtcgccctccaattccgatgaattttgtcaactttacaagggcattataccattcttcccaaaggcctgtcaatcaattccgactaaaacagtataatttaacaagcgagctttgcgggggaatttgggcgcaaaaaatgccccataaaggcaattccttggggcgagggagcttttgcgcttttttctgacaattcaggggctgcgaaagaacttttgccgttttttcgcagccccaatttttattcaggcagccgccagattttttgcaaaatgcgcgattgcccaccgttgttttcataatagacggtcagaagcgaaccgtccctgcgttccaccgtggccggatagcccagatcgccgctggggccttccgcgtccagcacataatccgtgtcccaggtatttccgccatcgcggctgaacatggcgcggatgccataaggcgcttcccgatggccatagaccgaaaggagcgtgccgctggaatgcaagagcaggtgcgcgggcgcgccgcccaaagcgcccagcaacgggtggggaggggaaaacgttttgccgccgtctaaggattcgctttggtagagggtgaaaacccggtgttctccacccctttgcatgcggagatgcaccagaatctttccgtccggcaactgaatggcatgcggctcgcagctatgcaagaggccatgttcatccgccacgttttcaatggaggacacgtattgccattctttgccgtctgttcccatgtgccagcattcaatgtagggttttgcgccgtcatcaaaggaatcgttcgcgctgaaacgccgtcccacatacaaaagggaaccgtccaacatgcggcacggcccgtgcggcgcggtgacgggggatttgcgcaccgggccaaagcgatagccgccatcctcgctgatgcgataggtggaacccaaatatgtttcttgcaagcccatcgcgtcgacatagcgggtgtacgcttcgatcaattcggctttggctcgttcctgggcggaagaggatagaagccggtccgcgttgcattggcgctgaaaggcggtggtgttgttaaacgaggtgaggatcaccttgccctcgccaaagcatgttaacccgcaatcccggtcgtccagcggcgtatcgatcaccacggcgggatgcgtccagctttcgccctcgtctttgctgtaggcgatcacgcccttgccaaaggggcatacatgttccaggcgaaagccagaggcggccatcgccagagtgccatccggcagccgcgttaccgtgggccagccgaaatagaaaaatgggctgtcggcattttggcaaagcaccgttttgcgcccagccgcaagggttttcatctccattcctcccttcgcaaaagaaagggggctgtgaagaaactttggttgttctttcacggtcccgcagactgtcaaaaaactcaagggagagcgcgagagggacggagcttcgccgccgccagtggcggaaacaggcaaagcggaagtccaatgagcaaagaagcgttgcaagcggtagcgcagcaaggcaactattgcgaattgtggaaccgaagccctttcgcgttttaatcgtccccggcggc

SEQ ID NO: 1300 - DNA, 6730 bp, Unknown
  16S sequences of unknown bacteria
cgattactacgccgcgtgcatccaggagaacatgagcgaaggcattgacgcgctgttcggcccggcgtacaagggcattcccctggtgaccaccgcatcggcttcgctgtaccgcaactatggccgcgaccttccctactgctttaaccgcaaggaggccaaagatcacggcgagggcggcagcatcgtgggctataagcccaaagacggcgaccgcatcgccattgtggaagatgtggttacggcgggtaccgcggtgcgcgagagcattgagtttttcaaaagcgtggccgatgtgaagatcgtggcgctgtttgtgtccgtggaccgtatggaaaaaggcaccggtgagcaaaccacgctcaacgagctgcgcgaacaatacggtatccaggtgttccccattgttacggtgcgccaggtgatcgacacgctgcacaatcaggccattgacggccgcgtgctgatcgacgatgcgatgcgcgggcgcatggaagaatatctcaaacagtacggcgggaaataagccgccgtaggctcaaacaaaagagcgtaaggagttgcacagcgggtggagagaaaagaaaacccccacgcggggcaccgccagcgcaagaaagagcagttccgcaggcatgggctggatgcctttgcgccgcacgaggcattggagctgctgctgtattacgccattccacgggtggataccaacggcatggcccatgcgctgctgcgtcgtttcggcagccttgacggcgtgttccgtgcgccggtggaggaactgatgcaggtggagggcatcggcgaaaatgccgcgctgctgatccgtctggtgccgcagttgtatcagcgcagcctgatcgaattggaccggccgggggtcattatcaaagattacgagtcggcggggcattttttcctcaaatatttctggggagagcgcaccgagattgtgctggagctgtgcgtggacggaaaaggccggatgctgggctgccaccggctcagccagggcggttccagcgccgcggcgttcaacgtgcgcgacgctgtgcgctatgcgctggccgataatgcggtgtcggtgtatctggcccacaaccatcccagcggctacgcagtgccatcggagcaggattatgctgccacttggaccgtgcgggaaagtttgcgcaccgtgggcgtggagctgttggatcattttgtggtggcggacaacgattttgtttccattgcctccggggggtacctggatgcggcggagcatatgcggaagtgaggaaaacgatggcaaaaacggcagaaaccaaaaccaacgtcatgcgtattttggaccaaaagcgcatcccttatacggcccacagctatccgcacgcggaagggcaggcagtagacggtgtgacggtggcgtcctttctgggcatggcgccggagcgagtgttcaaaacgctggtgacaaaaggcgcgtccggggcatactatgtatttgatatcccggtggaaaagacgctggatctcaaaaaggcggcccgggcggtgggggaaaaatccgtcgccatgctgcctggacgggatctgctgcccctgactggatatgttcacggaggctgcagccctgtgggtatgaaaaaacaatttcccacggtactgcatgcgtcggctttggagcaggagacgatcgttgtttccggcggccgcatcggcgttcaggtggagctgcagccacaggtgttgtgcactctgctgcgggctgcggcggcggatgtcgttgcagaggcataaacttttgacacaatcagacaaggaagcagaaattcatgcaggataaaattatcatcaaaggcgcgcgggcgaataacctgaaaaatgtggatgtggagatccccagggacaaactggtggttatgacgggcctgagcggttctggtaaatcctccctggcctttgacactatttacgctgagggtcagcggcggtatgtggagagcctttcctcctatgcccggatgttcctcgggcagatggaaaagccggacgtggactatattgacggcttgtccccggccatttccatcgaccagaagaccaccagcaaaaacccgcgctcgactgtgggcacggtgacggagatctacgactatctgcgcctgctctgggcgcgggtgggcacgccacactgtcccaaatgcggccgggagatccggcagcagactgtggatcagatcgtggatcaggtgcttacgctgcctgagggcagcaagatccagatcctggcgcccgtagtgcgcgcccggaagggcgaatatgccaaagtatttgaggacgcacggcgcagcggatatgtccgtgtgcgggtggatggcagcctgtacgacttgggtgaagagatcaagctggagaaaaacaaaaaacacaatattgaaatcattgtggaccgcctggtggtcaagcgcgaaatcaaccagcgtctgacggacagcatcgaaaccgctgcagcgctctccggcggcctcatcattgtcaatgtgcttggggaagaagagcaggatctgctgttttctcagaactacgcctgcgaagactgcggcatttctatcgaagagctgacgccgcgcatgttttccttcaacaatccctacggcgcttgtcccacctgtacagggctgggctttcagctgcgggcggatccggatctcatcgtgccggacaagagcctttccattctggatggggctatcactgctcccggctggaacaacatccggggcgacggcatctcccgtatgtattttgaggcgctggctaagcagtaccatttctccctgacaacgccttttggggaactctccaaagaggtgcagagaatcattttttacggcaccggtggggaaaaactgaagctgcactatgaccaggccaggggcagcggcacgctgatgcaggcgttcgaaggcgtggcaaacaatgttgagcgccgctatcgcaatacgcagagcgattactcccgcaaagaacttgaagagtatatgagcgaatgcccctgccctgaatgcggtggaaaacggctgaaaaaagaggtgctggccgttacggtaggggagatggatattgattgctatacccgcctgccgatcaatgatgcgttgcggtttatggaagaactggagctgaccggttccaaggccatgatcgccgaccgaattttgaaggagattcgcagccgtctgggatttctgcgctcagtggggctggaatacctgacgctgcagcgcagtgccgccacattgtctggcggtgagagccagcgcatccgcttggccacgcaaatcggatcttccctgatgggagtgctctatatccttgacgagccgtccatcgggctgcaccagcgggacaacgacaagctgctggacacccttaagcatctgagggatctgggcaacacgctgattgtggtggagcacgacgaggacaccatgcgcgcggcggactatatcatcgatgtgggacccggcgcaggtatccacggcggcgagattgtggccgccggcaccccggaggaagtggcggccaaccccaagtccctgacggggctgtatctggcccgcaaaaagaatgttcctgtgcctccggcgcgccgcagcggaaacggaaactggctgacggtgcacggtgcggcggagaacaatctgaaaaagatcgatgtgtccattccgctgggtacctttacctgtgttaccggcgtatccggttccggcaaatcctcctttgtcaacgagatcctcttcaagcgcctgggtgtggatctgatgcggatgaaggcccgcccgggcaagcatacaggcatcgagggcgaagagtatctcgacaaggtgatcgacattgatcagagccccatcgggcgcacgccccggtcaaatccggccacttataccggcgtgtttaacgatatccgcgacttgtttgctgccacccaagacgccaaagcccggggctatgggccggggcggttttccttcaacgtccgcggcggccggtgcgaagcctgtcagggcgacgggctggtgaagattgaaatgcactttttgcccgatatctatgttccctgcgaagtgtgcaagggtaagcgctacaaccgtgaaacgctggaagtacagtacaagggcaagaacatttatgaagtgctggatatgacggtggatgaagcggtgccgttttttgaaaacctgccccgcattgcccgaaagatccagacgctgcaggaagtgggcctgggatatatcctgtctcttatacacacgaccactctttccggcggcgaggctcagcgtgtcaagctggccacggaactgagcaagcgctccaccggtaaaacgatttatattctcgatgagccgacgacgggcctgcacaccgacgatgtgcgccgcctgatcgaggtgctgcagcgtctggtggatgcgggcaacaccatggtggttattgagcacaatctggatgtgatcaagacggctgattatatcattgacctcggcccggagggcggcagtggcggcggtgagattgtggctgctggcacgccggaggatgtggcgcagtgcgaccgctcctataccggtcggtatttgaagaaggtcctgaacgaagcataggagcagggcacgaaatgctctcctttctcataggataaggaagaaagggggagcgacgatggaactttttgagcagagtgttgtggctttttttgcggcagtgggcattgcctgggccgcatggtcaatagcagaagcgctgtttttatccaagcgggagaaactggagcggtgcctggtgctgatcccggcggcgcgggacgcgtccgcgctggagcgtacggtggcgcggctttcctgggccagtgcgggcggcgcgccctttgaacgcattttgattgcggactgcggcctggatgaacggggccgggcgctggcccggcagctggaacagcagtacgcggcggtgcgcctgtgcaccatggaagatgcggaggcatacgtccggaagagataggctattttaaggggggatgcggaatggcagcggaacgctgcactgtggacggaacggtgaacagcctgatttttcaaaacgaggacaacggctataccgtgctccggctggacaccaccgacggtgagcagattaccgtggtgggctgcatcccctgcgccgcgccgggggaggaattgatcatcaccggcgaatggaagcaccaccctacccacggtgtgcagattcaggcggaaactgtggagcgctatatgccccgttccgagagcgggattttgaactatctttcctccggtgcggtgaaaggcgtcggaccggctacggcgcagttgttggtgcagcgcttcggcgaggaaacgctggatgtgctggaactggagccggaacggatggcgcttttgaaggggatcacggcccggaaagcgcaggagatcgccgccagtttccgcgcccaggcaggtatgcgccgcctgatggaatttctggcggaaagcggattgagcgcggcgctggccgtcaagctgtgtaagcggttcggtgaccaagcctccgaagcggtgcgtgccaatccgtatcttttgtgcgacgagtttttcggcgtatccttcgccgcggcggatcagattgccctctccggcggcgccgaggcagacagcgatgcgcgcgtggaagcggcggtgctgtttaccctgcggcacaactgtggcaatggccatgtatttctcccgcggcccaagctgacggcggccaccgctgccatgctggatctgtcggaggattgtgtggagcgggccgttgattcgctgatagagaccggcaagctggtggaggaaaccgtggccaatgtgcaggcctgttatctggcggggatgtatgaggatgaagtgtttgtcagccgccgcatagggcagatgtgtgaagaagacgccgatcaggggcgcaatgtggaggcgattttggaggagatccaggcccggcaggggatcgtttatgctcccgagcagcgccaggcggtagaaacggcggcatactccggcgtgtttctgttgacgggcggtcccggaacgggcaaaaccacctgtgtgcgcggcatcgtggcgctgctggaacgtatgggtctgcgtgtggagctggcggcgcccacggggcgggcggccaaacggttgggcgaggcctgcgggcgtgaagcccagaccatccaccgtatgctgggcatgagctacaacgagacactgggcgaagtggcgtttgcaaaaaatgaaaaagaaccgttggatacggatgcggttattgtggacgagatgtccatggtagatctgaacctgatgcgctcgttgctggcagcgctgaggcccatgtgccggttgattctggtgggtgacgctgaccagcttccttcggtggggccgggcaatgtgttttctgatctgatccgcagccgccgcctgcatgtggtggagctgacggaaatctttcgtcaggcgcggcgttctgccatcgtgcgtaacgcccacgccgtcaacgccggtgaaacgccggtactgacgcccaatcagggagattattttttcctgcggcgccgcatgccggagcaggtggctcaaacgattgtggagctgtgccaggttcgcctgcctcggaatatggggatcgacccgggacagattcaagtgctgtcgcc

SEQ ID NO: 1301 - DNA, 3974 bp, Unknown
  16S sequences of unknown bacteria
ctctttggtaaagagagctgtcagcgtcagctgactgagagattgaaaaacattttgtttatatacgatattcggttgcaaattaggttgtcgtaccaaggccaatccctccggtttttcttacgaaaaaccacctccctttacacaagggcggcgaaattgcggaattttgggtttgttatttgtagccgaaatttgatataaacaggttgtcaatgtgcaaacctgcggtttgcataggcgttcaatgaacgcccctacgatgctaatttacaaatacatttccttgtaaccgacaaaaataaattacggatacaccgtaggggcgaccattggtcgcctcttttcaaattatttaaactgttttcccttataaaacaacaacccaaacaaaccacaaagccggctctctttggtaaagagagctgtcagcgcagctgactgagagattgactgagcaagcgccataagcccaatttccgctacaagtcagcaactcgcactttactaagcccattcaaaaacacaaaaacacaagcccggcaatgccgagcctgtgttccctaaaattaaatttatctcaaagagaagcccttgaaatgcaataattattaaaacatatattagcgcccttttgttacacacaaaatgctaacatcacaaattgcctttattaagcatttcggtaaactccgcccggcttcttggggcggaatagtaatacccttgtataacaaaacaaccttgggactgcaaaaattctatctgagctctgtcttcaacgccctcggcaactataatcaaacccaaatctttggctgtgccgatagtgtgctttaaaattatctcacccttaggcgtacctatccggtcaataaggcttttatccaactttaactcggagaaaggcaactcgcttaaagacataagtgaagaatatcctgtgccaaaatcatccatatagattaaaaaaccagcctttgcaaaagacacaaccgtttccgtcaatcgcttacttccggtagatgcggattccgtcaactcaataggcacaagtttaatgggaacccctgttttttcgacaatattcatatatgtttcaagagttctgtggcggtaaacgctgtttctggaaaggtttacggatataggcacaactttaagacctttttccagtctgtctttctggtacatacaaacctttgtaaatatatgctcatcaagcctgccgataagtccgtcttgctcaaacaacggcacaaaatccccgggtattatcatagttccgtctgcttttacccagcggacaagagcttcggcagatataatttcgcctgttcgactgtccacctggggctgaaaataagggataaactcatttgtctttatggcagtgtcaaagtcattttcaagtctttggtttttaacaagctgattgccgatttcatcggtgtaataggcaagcacatcattataatcgttttttatgctcgttgccgccattgtggcacggtcgcaaagaattgaaaccgactggtttttgtcgatatttctgtaaaagccgtatttgatgtttatattttgaatagggccgtgattgctccgtttgtttaaacaggaatagaaatcttcctttgacggcatttgatcgtctctcaaaaggaagaaaaatttatctccgtttcttgccgcaactgcgttctttaaatatgagcgataggttctgccaaggtaagccaaaacttcgtttccctttttcacaccgaaaaagctgtttattaacttaaagtctcgcaaatccgcaacaacaatattgtaaaccgtattggcattttggcctataagctgttccgcatggtggtaaaaagccggcattgtataaagacctgtaagtgagtcaaactccacaaccgcaagggtcgaaacgctttctttcaatttgataatgctgtgtactctgcccaaaacaacctttggattataaggttttcttacaaagtccgaagccccaaggtcaaggcatttttcctcgtcctccgggtgttcgctgccggtagtaacaataatcggcacgctggacagcaaggcgtcgttttttactttgcttaaaaattcaaaaccgttgcaaacaggcatataaacatcaagaagaactattgaaagattgcggtagtttttcgacagaatttcaagaccctcttttccgtctttcgcctgtaaaacttcgtactcatcgcttaaaatcgccgccataatttcacggttaagccgattgtcctctacaacgagaactttcctcttttgatttgctatttcctcctcggttttagttgactgttcggcggtaaattctaccggggcggcttcgacagcctccttcggtgcatacatttctttatacgcaaccacaacgcagtttctctgctttttggcctcatacatggcacggtcggcctctttcaaggcctctttgtcaaatttgccgcagtagtacccgcctatcgttgcggtttcacgcaatccgggataatcgcttactctgatatttgtaatagatacacgaatttcttccagctttttgttaaggttttccgctttcattccctgaaagacaataacaaattcatcgccgccgtatctgataaccgcatcgctttttcttatgcagtttttaattgcattggccgcctgtaaaataacactgtccccggcgtcgtgtccgtaggagtcgtttatgtccttgaaatggtcaagatccagcatggcaactgccgtaacattcggcagggtatctaccttactgtcataaaaacgacgattgaacacacctgtcagcgggtcaatatatgcagtgtcggtaatgtcatttaaaaagtcaataagagcagggtcatccttaaaacattgtatatctttcttgtctatggtgtttacaagttcaataactttgtcctctccccgaacattggcataaacagaggttatcatatagattttattattgaaaaattcaaactttctcttttggcatttgtctctcaaagcttttttagaggtgcagttttcgcatcttttctccctgtcccaaatagcaaaacaaggttcttttttgcgttgcaaattgcctttttcatcgacatggcactgatggatacaatcatcgtccagcactctcacaaaagagaaaacttttttgtaatcagcaagcgcccttttgaaatcttcttttgtgttaaaaatcattgttatccctcgatttcttttaaagcaacaaaatatgtcctaaataaattataaatactttgatgtgcaatccaagacggcaccgaaattatgccgactgtacttgttcacattttacaccgtaaaagttgaaaaatcaacatattagcactgaatgtcaatagatttaaggcgaattatcgcaagtcacttacagccgtataacaaattagttaaaacaatttttcacaataaatcaacaacccaaacaaaccgcaaaacaggctctctttggtaaagagagctgtcagcgtagctgactgagagattggaaaacattttgtttatatacgatgttcagttgcaaatctgcacttcaaaccgaacgagtaacaaggctctctttggtaaagagagctgtcagcgttagctgactgagagattgactgagcaaattgtttgactatatttccgctgtgaaatatcaaatcgaacaaactgcaaacttgccctccttgtgtaagggagggtgtcggcaaagccgacaggagggttgtcaaaaacaattttccgccataaatcagcagtccaaacaaaccgcaaaacttgttctccctgttaagggagatgtcacgaggtttacgagtgacagagggttgtcaatgtgcaaacctgcggtttgcataggcgttcaatgaacgcccctacgatttaactttataattactgtttatgaccggcaaggcacttaa

SEQ ID NO: 1302 - DNA, 24211 bp, Unknown
  16S sequences of unknown bacteria
ccttgttggtaacggcgtcaatgctgtagccctcgttttgaagcgcgcgcattgctttccatatcgctgttctcgaaaccttgagagagtcagccattttttcgcctgacagaaaaacgcctctgttttcttcaagcagctttaatacattgttttttacagacataagtttaaccatcctttatatctcatatattaaccttttttgaccttgaggtcaacctttgcgggaagctaagctgttcgttatcaaggtgctggtaatttttgtttttaaaaaaattcagagacttccaaatgtttttagtgtacaatctagctgtgaataaggctatatgtaaagataaccattgataataacgtatatagaaagtcttaaaaacagaagaaaagaatgcttatgtaaatcaggaggtaactattaatatgaaactgatatgtattggagatagttttacaagaggttttggtgtaaagaaaaaggaaagctgggtatcacagatcagtatagaaaacgcagatgtaatcaatatgggtataaatggagatacgacttcgggtatgctggcaagattcacaaatgatgttattttggagaagcccaattatgttctgataaccggaggaacaaatgattttatatcggggtcggactgttccataccgcagaacaattatattgctatggtgcatcaggcgtttcacagcggaattatacctgttgttggcatagaaccggggttttcaccggaaaatgttagagcagattgggctgtgttcagtgatttccaaaaagtttttgataaacagctgcagttgggtgaatggctgaaaaagatgtgtaaaacatttggcgttttttatattgatttttatgagggattaaacctagtgactcaaaatgcgtcggaaaaagctatgtttattgatggacttcacttgactgctgaggggcataaacttattgcaggaattgttaataaagaactgcagaatattatttttggaaaagactgatatactattgaaattataaatagtgagaaggaactttcctttttatgagagggtaattttatcacaattcgcacagttaatatattaaaaccgtgtggatttttgtacatggagatatagagtatttttgttagacgagaatagaaatgaatgaattcaacaaaaaagtttgaaaagtggcacaaaatttgcattaactataagtgtgatatatcaacagaacaaacatcagaatttgcaaattcactaaaaagactgaaatttcgacactgttaaagactgtgacggatttctgcaagatgaaatgtgtagataaaaagcatctgtgtagtcgttttggaacacaggggtgtcacatatttcgacatttctgaaaggagaaagtatgaaaagctataaggattacgataattaccgtaaactgccggttgatgttcccggcttgtctccggatatgtgcattgctttagaggataagattacagaatttgaagaaaatcatctggatagtgcacttaacggaggagatggatttgttcccagaataaaaaaaggggatgtaatctttgcggcagcgattaatattgccattcttatatattatatttgggcacttataagttaattatgcagaattagattaattattcgactttcataatgagatttaaaggaaaggaaattaataatgagtagtaaaaacacaaactcggaagtatattacacattacttcctacggcggggcgtgaaagaacctataagttctgggacctgcttgctgtgcagatatgctatggtattgcagcgtggtttttccttgcgggagcacagacaggactatatcttccagcaaaggaagccgttccgacaatactggcaggaaactgtattccgctgtttatgattgtaggctgcggacttgtggcgtcaagatatggtgtggaacagctgacttcaacaagaggaatctttggaaacaagggaacaactctggtgctatggatgtatcttctttgcctgtatccgagtcaggctacattatgccttctgtttggacaaagcgcaactaaattttcgggttctctttttggagaaaacctattaagttccgagggctttggagttactttctttggtcttctggcactggttataggcggatttattgcatggcttggaccaaacgcattaaaatggttcacaagaatttcggcaatctgcatgtttgctattttagcgggactgatagtatatgttcttaatatgtatggaatagactacatatttaatgctgagcctagagaaccgataatgattgacggtgaacctagcgcagcatggtccagggcttctgcgcttgaaaccaatgtcggtataggactttcatgggctttcttcttcggacagtggacaagacttgcagattctgaatcgacagctttccatggcactatgtggggctggggtcttctggctgccattgcgggcgtatttgcagcatttactgctttagcaacagggatttatgatccgacaatctggcttgttaatataagtgaagacacaggaattccgttcctctcaattttaggattactgcttatggctattgctaatgtatcttcatttgcaactgctacatatcctgcgactatatcgctgagaagcagattccctaaactgaaatgggtgcccgcacttatgatctgtattatacctgtgcttttcctgcttaatgacgatgtgtataatgctatcaacaaggtgttctcatttatcgcatgcctgtccagtatatacggagcaattgtaattgcagatctgctctttgtatgcaaaggccgtttcagcatcagagaaatgtttaattacagcaaaggatattcttactggaaaggatataatccgggagcgctgattgcaatagctgtaggacttgtgttctacctgactacgctcaatcctcttacatgggagtctcctaacggtctgttcccatacatttcagcaggtatacctacatttgtgattacaggtatcgtatatgttattcttatgaagtgctgggttttaaagaaattccctgtaacatttatgaatgatattaaatatgatgatcagaaataaaaagtcttaatagttaagtaagaaaaatttgtattttcaatgttaataaatttaaaaagaatatagtaatgcctcaaaaaacgggcagaacagatgcacaaacaaggtgtacctgttctgtctgtttttatataaaggagctgaagtcggaaactgtaaagcagtaaccaaagggataccccgagaggttatccgaaaggagtatgtgctgcggaacgccatgctaaaagtaaccgttaagagaattgtaaaaaaaaacagacaatttaaaatgtaagtataaagtgatacaggttaaaaggaatcagcgaattaataaattatgcaaggaggaacttaaatgaattttgagaagacaaaagtattttatgatgaaattaaaaattatatagttgatggagttgccagctcatttcatataactgacgtagaagaagcgccgttatgtgtggaatatggcaaaggccccagagtctatgatgtagacggcaatgaatatatcgattatgtattaggccttggaccaatgattttaggccatgcagatgagaagactgataaggcggtaattgagcagctttcaagaggaactcacttctctgcgcctacaccgcagctgaaagaactggcaaagagaatgtgtgaaataattccttgcgctgaaagagttatgtttgaaagtaccggaagtgaagcggacatggttgctttcaggctggcaagagcctatacacagaaagaaaaaataataaagtttgaaggtcattatcacggctgggctgatgagcagaatatcacatttaaaacaagcacagttgctgagcttggacctaaaaacaatccgaataaaatatacaatgtgctgggacagaggagcgctacagcagatgatatagttcttgctccgtggaacgaccttgaaacattagaggaaataataaaggcaaacgaaggtgaaatcgccggcatgattatggaaccgtttatgtgtgacgaaggacctatccccccaaaagaaggataccttaaaggcgttagggacttatgtgataaatacggaattgtgctgattttcgatgaaatcattacaggtttcagacttgctttaggcggagcgcaggaaaaatacggagttactcctgatataggtcttttcgcaaaggctcttgcaggcggatatccgatgtcaatgatatgcggtaaaaaagagatcatggaatgcggcgtaaaagtatcaggttgctttaacggaaatccggtagcttcagcagcgggaattgttgtggcagacgaactttcaaagccgggtgtttatgaaaacttccagaagcttggcgatatgctttgcgacggatttaaagaactatgtaagaaatatggtgttaaaggatatgcagaggcgcatggagcaattgcacttatacttttcggcaaagaggataactttgaggacataagagattatatagaaaacggtgatgttgatttctataatcagttctttgcgaaagcaaaagaatatggagttagattaacatacagaagaggtagaattttcctatcaacaaaacatacagcagatgatattaagcttactttagaagcttttgataaagctttaaaagacataactatataactatatctgaataaacaataataacaatcacagcaaaacaacctacaatttatattctgtaataagttttatacagattttacttaatgacaacatccttttttaatattttgataggaaaattcgaactttttcaattgacagactaaaggctaacagaaaggaatttacagatgtacccatatgtgtttgatatccagaagttcagtgttcatgatgggccgggaatacggacagtagtgtttttaaaaggttgtccgatgaaatgccagtggtgtgccaatcccgaatcacagctttatacaccggaagtgattattcatcccgataagtgcattggttgcgggaaatgcaaagaggcttgtgacattttaaaaaattctcaatctgtaaaagttggaaaacctgcggggtgcaaaaattgcggagattgtgtatctgtatgctgcaccggggcacgaagtctcatcggaaaacagatgacaccggaggaactgataagagaaatagacaaagatattattttctataatcagtcaggaggaggagttaccttctcgggcggtgaggcgatgatgtatcctgaattcatttcagagattgccggatactataaagaaaaggggatctcaacagcagttgaaacatgtggtgatgttccatgggagaactttgagaaagtgattccgtatattaatctggttttatttgatctgaaactgatgaattcagatcagcatctgaaatatacaggaagacctaatgacagaattattgacaatttaaaaaaaatatcaaatcaggttgaaacaataatcaggattccgataattcccacaatcaatgattatgaggaaaatattgaaggcataggcaaattcattgaatcattggaaggcaggataaagaaagttcatatattgccttaccataattatggaatgagcaaatatcaggggctcggcaaagactatctccttaaagatctgaaagcccctgataatgagcacatggaaatgattcgagaaagcctttgccgatatggagcagacgttattataggcggttaatttaaaatataatattttgaaccgaaaggttgtaaaaggaggtttactaatggctattattaagggtaaagatgtacataccggattattaaatcccactcatgattcaccattccctcgtatacagagaatgatggataaatatttctcatatgtgcctgaactggacattgagcgtgctgtcctttggacagaatcttacaagcagacagaaggtcagacagcaatgctcagaagagcaaaagcatataagcattacgcggagaacagatcaatccttataaaagatgatgaactgttccttggaaaatgtgcagatgcgcctagagctggtacagtttctccggaatacgtaagtacatggcttcgtgaagaaattgatggtattgctacaagagagagagatacttatcagatttcagaagaaaagaaaagaattttaaaagaagaggtctttccttactgggaaaacaagaccatatatgacggttgggtagcacagattcctgaagatactaagactctgatgcttaagacaggtattatagatgcggaggtaaagattgtatctgctcctggagaactggcgcctaatatggaaatggtaataaacagaggcttcaaagatattaaagaagaagctcagaaacaccttgaaggtttggaccgctcaagacctgacgattgtgccaagatggatttctatgaaggctcaattatgactattgatgcgctcagcacttatataaaaagatgtgcggcagaagcaagaaaactcgctgagactgcagatgaagaaagaaaagcagaacttctggaaatggcagaaaatgccgaatgggtaagtgagtatgaacctaaaactttccaccaggcattacagcttatgtggttcatacttataggtattcagatggaaggcaatgctcccggagtatctcctggcagagttgaccagttcttatacaaatactacaaagcagattatgaagccggaagaattgatgatgacagagctttagagctcatcgaaaacctgtatatgttaatgggtgaaaatacatggcttacaagtgaaaacacttctatgtatttcacaggataccagtgtttcctcaatatgtgtgtaggcggtgttgacagacacggcaaagatgcaacaaattcactgtcatttatgttccttacagcaaagatgcactgcagacttcattctcctaacgtttctgctcgtgtacataaagggactccacaggatcttatgctgcattatgcaaaattaatcaaatatggaatgggatatccggctcttcatacggatgatgttggtatcagagcaatgctttctcttggcgcaactatggaagaggcatataactatcagcttgtaggctgcgtagaaccgtttgttccgggcgttatgaccaagtggtcagacggtggacattataactttggttctgctatagaatttgtacttactaatggtgtgagtgtaatgaatgacaacagacaggtaagtatacagacaggtgatccttgcaagatgacatttgatgaaattaaagaagctgttaagaaacagttagactatttcgtatatcatatgagcgttggtgctacaatttgcgaaagacttcattcacagcttgctccgcagccgttcctttcagctctgattacaggctgctatgacagcggcaaggatattacgcatggcggcgcaaagtatcattgcggtccggcgtttatcggaacaggacttgttgacttatgtaactcactgtcagcaataaagaaattcgtattcgacgaaaagacagtaacaatggaagacatggtaagagcatgcaaaaataattttgaaggtcaggaagagcttcttaagcttgttcagactaagactccatgctacggcaacgacattccggaagtggatacatgggcggaagaattctcagattacgccaaagatcagattctcagctacacctcctttaacggtacaccattctgtaatggattgtaccctgtaacagcccatgtaccacatggattggtagtaagtgcacttccttacggaagactggcaggaacaccattatcagacggcatttcacctaagggaggaactgaccatgaaggacctactgcggtactgaaatctgtatcacatgtaaatcatgaaaatcatacttcaggaacgctacttaatatgagactggatcctgtaagtgttgaaggcgaagttggcctcaagagaataactcagattataagggctgctgcagatttgaacttatggcacatacagttcaatgtagttacaactgagacgctgcttgcagcacagaaaacccctgaaaattacaagggtctgattgtaagagttgcaggctacagtgcatacttcggtgaacttaataaggctgttcaggacgatgtgatttcaagaacaatacacactgcttgatatttagttacttgtgggaagagggagtgtatgcgctccctctatccttcatatatgaaaggaattttatatgagtgaagcattgagaaaagataaaggaattatttataatatccagcgtttttctatccatgacggcaatggaataagaacaattttttttatgaagggatgtccgctgaaatgcatctggtgctgcaatccggaatctcaaagtgtcgagccggagattctttttctgagagacaaatgtataggatgctttaactgcatcagatcatgtccgtttaatgctatggagatagatagagagaagtgcaaggtatgcggttcatgtaccagagtatgcccatcaaatgctaaaagaatttccggcagatacatcacagttgatgaggttataaacgaagcagaaaaagacagagtgttttatcgtaactctgacggaggcgttacttttagcggtggtgagcccacgttgcagtatgaatttgtgtctgaagcggcaaaaaaatgcagacagcttgacatacatacagcaatagaaacctgtggatacggcaaatgggaaaatgtcagtcaggtgcttgaccatattgatgaaatcttttttgacataaaacacatgaatccggaaaaacataaagctcttaccggagtgactaatgaactgatactggataatgccagaaaagttgcagctttaggaaagaaaacaactttcagacttccgctgatacctggatgtaacagtgaagaggaaaatattacagcaactgcagattttataaaaagcataacaaatgataatgtgtttattgaaattctaccatatcatagacttggtgaaatgaaatttgaatggctggacagagtatacgagcttgacggaactgaagcgccttcagcagagcaggtggatagatacaatgatattttcaaaagcaagggctgtaatgttgtaaaaaacggtcagttgctttaagtgaggaattcaagtatataaaggccggatttcatgccggaggtattgacattaagttttttggttaaggtgatagaaaggagaaaattgtatggctgctgcatgtggaacagattttaacagaataaagcatggcgactggaaagacggctgcacagacagaataaacagattaagaaataaatatttcaataatatgcctgaaatcgatacagagagagccagagcgtatacagaaatttataaagaaaatgaaggtgatgaggttattatcaaaagggcaaaagctctatatcattatcttgaaaacaaaacattatttattgatgaagatgaactgataataggtacagacggtaaaaaacagaggtctgtggttatgaatcctgatatgtgttacagctggtacagagatgaactggaaacaatgtcaaccagaccgcaggatccgtattttattacagaagaggataagaaatatataagagaagaaattgttccgttctggacgggtaagtcaatggaggactggtttcaagctaatctcgaagatgatcttgtaaatgtcggaatcgggacaaatgtagtctttggtgatttaaaatcacagggcggcgcaggagaatatgctgtaggttacggcaatatccttattaaaaaaggttttggggcaatcaggcaggaagctgttgaaagaatggaagcattagatccttttgatcctgaaagctttgaaaagaaaaagtattatgaagccaccataatatgctgtgatgctgtaaaaatgatgagtgaacgctacgcagggtatgcaagaaggctggctaaaaatgcgaacgaaaagagaaaagcagaacttttaaaaatagcggatatatgtgaaaaggttccgtataatccaccggaaacattccatgaaggactgcagtttgtatggtttacacagatgtttctgtgggcagaggaaaactccaattcctactgcatcgacagaccggatcagtatttatatccactgtacaaaaaagatcttgaagagggaagaattactgaggaagaggcgcttgagcttattgagtgtttctggattaaaattgcagagtttatttttactatttctaaagatggcgcagagttttatgcgggatatatgtcatttaccggtcttactcttggcggatgcgatcaggatggaaaggatgctgtaaatgaactttcgtacctgatgattcaggctactatggatttaagaatgcattcgccgacaattaatgtaagagtttgcgatgagactcctgatgaatatctggagaaggtttgcgatcttgttaagcttggaacaggacagcctgcaatattcttcgataaaaccgctataaagctgtttgaaagacgaggtcttccggagtcacttgcaagaaactggtgtgtaggaggctgcgttgagcctaatattccgggcattacaaacatgtggggcgaaggttgccgttacagctatgctacagctgtagaatgggcacttttcaatggatactgcaaaactcttaacagacagatgggattgaaaaccggtgatccaagagatttcaaaacttttgatgaattttatgaggcggtaaaggctcagctggcatatcttattaagctttgcgtaaggtttacacagctatcagaaaaagcacatatgagaagagctccaaagccggtaagatccatgaccatggaaggctgtattgaaaatggtgtggattgttctgcaggcggagcaaaatacaataatggtccggggttggaacctacaggtgttgccgatatcgcagattcactggaagcagtgaaaaaactggtttacgacgataaaaaaatatccatggatcagctccttcaggcattggaaaataactttgagggctatgaggatatcaggcagttgcttattaacggcgctcctaaatatggaaatgatgttgatgaggttgacagatttgcagctgaaacagttgaattttcatgcgatgaagctgtgaaatacagaagtatgcatggttcaacattccttagcggacttgttcctgtttcatccaacttacctcatggtaaggctatatgggctctcccgtcaggaagaaaggctacagaatcattgtcagacggcttatcaccgttccctggatatgataaagaagggcctacctccgtaattaaatcggtttgcaaggtagaccatacaaagaacggagtcggcacattattgaatatgaaactgaatcctcaccttctggaaacaaagaaggataaacagaacttcatctctctgctgagagcagaaaatgcgctgggaggataccatattcagttcaatgttataagctcggaaacattgagaaaggctaaagcccgcccgcaggactatgcagacttactggtaagagttgcaggttacagtgcattctttgttgagcttgcgcctgaagcgcaggacgctataatcaacaggactgaaaatactgcatggtagatatgattgaatagcactgagtgcaaaaaggataaacttcaaaaaagacgaggaggaatgttatgaaattttcaaaaaaatcactgcatattaatggcgctgtacgtacttttgtatgcgatttggaaaaagatactctcgcaacagtacttagaagactgggtttgacaggcactaagattggttgcgggataggtgtctgcggagcatgttctgtaataatgaacggaaaagtagtaagatcgtgtacaagaaaaatcaaaacaatagaggatttcagcgaaattattactatagagggcctgggaaatccgctaaaccctcatccgcttcaggctgcatgggtacatcttgctgcagttcagtgcggattctgctcgccgggatttattgtatcagcatatcagatgcttaaggaaaacaataatccgacaagagaagaagtaagggactggttccagaagcacaggaatgtctgcagatgtacaggttacaagcagattgttgatgcggttatggaagcagcggctattatgagaggtgagaaaactgtagaagatatcaggtataaatgggaaggtgtaaaggatctttacggtaaaccgcttgcaaggcctaatgcactggctaaagcctgcggagtatgcgattacggtgatgacctcgcattaaagatgccggagggcacattgcaggctgttctggtaatgcctagggttacaaaccatgcaaacattttaaatattgatatatcggcagcagaaaaagttccgggagttgttaaagttataactgcgcaggatgtaagagatgcaggatgtaagaatgcccttacaccgtttacctgccagccgagaacagtagttttcgataatgtacacacacttatccaggataagaaaatagtaaactggggtaatgttatagccatagcggttgcagacaccaaggaacatgctcagcaggcggcggatctggtaaagatggattacgagcagctgcctgagtatatgagctatctggaagcggtaatgcctgatgcgattgaaatacatccgggagtgcctaatatatactcaagattccctgttcgcaagggagatgctgatgatgtccctgaaattattgaagattccacattctcagttgaaggaagcttttatgcttcaagagaaccgcatatgtcaattgaaggtgatactgtgcaggcatattatgacgaagatggcatgctcaccgttcactgcaagagtatgactaactactttgacagagatgatgtggcagaggcagtcggcgaggatccggaaaatgttagaattgtagaaaatcctacaggcggatcatttggctgggcaatgaatgcaggctcctatgcgcttggagcaatggctactaaagtaacgcagaaaccgatagctttacatattgattattcgcagtttatggctttctccggaaagagatcacctgcatatatgaacggaagtctgtcatgtgatgaaaacggaatgattacagcaggtcagtttgatgttggtcttgaccatggttcatatcatgaactgggcgatgacaaattaatgagaataagcagattcatgttcttcccgtactatattcctaatgcgcttggagtatcaagggtggctattaccaaccatgcttttggtacagcatatagaggatacggagctcctcaggcgtttacatgcggtgaggcgctgattgatatgctggcagaaaaagcaggaatagatccgtttgaattcagatacaagaatattgcaagaccgggacaggacaatcttaatcaggtgcctttcctgcagtatccgatggaagctataatggacaaaatgaaacctatgtatgatgaagctgttaaaaaggcgaatgagtttaatgcatcgtcagacggttcggtgagacgtggtgtaggacttgcatggggcggttatacagttggtcttggtgccgttgatgaagcaagtgttgccattgaattaagacctgatggaaagtttactaaatatgatacatggcaggatcaggggcagggaggcgacgcaggttcgctcatctgtatgatacaggcattaagagaatacttcccggatgttacacctgatgatatcagattagtacaggcagacaccaagctctgccctaatacaggagaatctgcaggttcaagatctcacttcgcaaacggtaaggcaagcatactggcagcaaagaaccttgccaatgcaatgagaaaagaagacggtacatacaggacctatgaagagatggtcgcagaaggaattccgaccagatataacggtgactggacatctgcgagtgaatgggatgatttatatgaccttgaccctaatacaggtaaaggaaatcctgcttatgcatatatttacgcgctgttcctggcagaggcggaagttgacatgaatacaggaaaaacaacagttacaggtttcagatgtgtagatgaagtcggaaaagtaggtaacattcagtcactggatggacaggcctatggcggaatttcacattcaatcggctttgcattaagcgaagattatgaagacgttaaaaagcatacaaatatgtatgcagcaggagtaccttacattaaggatatccctgatgatatgacagttatacatatgaatggacatgacgagagaggtcctttcggatcctcaggatgctcagaggcgttccagtccggagatcatgttgcagtgcttaatgctataaacaatgcaacaggagtaagaatttatgaaatccctgcatcacctgaaaaggttaaagcgggtattgataaacttgcagcaggagagactttgactccgcctgaaaaatattatctgggttcagattttatggacgaggtagagtttatgaaagaaaatcctgtaagctggtaataagttataaagtgtagtaaaatcctggtgattggcagatgacttttgtcgtctgccaattgtctattaaaaacataatagtaaaaatagcataaaaaggagttataaggcaatgaatatgtattttccgattggtcttatagttgtttcaaatatattttatcatgtgtgtgcaaaatcatctccggcaaagatggatccgtttgcaatgcttgttgtggcgtatatattatgtgcgattatatcccttgtgatgtattttgtaactaatccgggaagcaatcttattaatgagatctcttattccaactggactgtgtttgtaatgggacttgcaattgtaggacttgaagcaggtaatatatttatgtacagagtagggtggaatataaataccggctatttgcttcacagtgcgatatttgcagttgcattgctgattgtaggatatctgatttataaagaagctattactttaaacaaggtgttaggggtgtttgcctgcatggtaggcatatattttataaataaataacagcaggtagcgaatatggaaaaatattttaagcagtttgaagcgtgcagacaaaaagaagaacctgcatgcacaaatacctgtccgtttcatctggatgtaaaagattttcttgaaaagacaggcagaaacaaatatgacagagcatataagaactatagagatgccgtggttttccctgaaattgtgtcgaaaatatgcgatgccaggtgtcagaatgcatgcccgaggacacatattgatgacgcagtacagataaggctgctggaagaaacctgtgtaaacaaggctcgtaaaaaggaacctttaaagtataacttacctaaaaaacaggggaagataggaatcataggaggaggtctcagcggcttaacctgtggattgagactggcaactaaaaaatacagtgttgttatatttgaaaaggaaaagattccgggcggacagcttaagtatataatggacgaagctgaataccttgcggccattgatctgcaaatgtcgaaagaagaatatgagcttttgacagatactgaaattgccggccttgacagtcttgcggaatatggctttgatgctgtctatattgcaacaggtcagggcggaaatgattttgggatgacagatttgcctgcagggcagtatagtgaaaataataaatttgcagtgtggtgtggaggaagtctgaaaggaaaaagtctggtagaagcaattgtagatggtgcaaatgcagctatggctattgatttgtacataaaaacggggagcggcaatattgcagaaacagcagcagataccagaatagtacctgacctgaagaaaatagtaaaatgcgagagagttgtacctacggaaagcggaattttttctgatgaagaggcagccgcagaatcagcaaggtgtataagatgccagtgcaactcatgtcaggaaagctgtgatctggttgcatattataacaaatggcctgcaaaaatgagagaggaagttgcagaaacggtaatggagtccggctctatgctgagaaaatcccctgcaacatatcttgtgaactcatgtacccagtgcggactgttcgaacaggggtgtccttcccatatagatatgaaaggtatgatgctggaaacaaggcgtgtgctgcacagacagcagcagatgccaccggcatttcatggattctggctagatgatatgcagcatgcaaacagagagaagagccgcatatgtaggaatgcgccgggaagtgaaaattcggaatatgtttttttccccggttgtaatttgggtgcttcaaggcctgaacttgttgaagccgcatatggatggctgaataacaattttgaaaatacagggctgatgctgcgctgctgcggcattcatgctgaatgggctggtgatgaacagcttgcagaacagcttaaaacttctcttatgcaggactggaccgcgcttggaaaacctgtgttgattacggcatgcccgtcatgtaccagatttttaacagaagctgtgccggaggtgaagtgtatttcacttcctgaatttatttgcagcaacggaatatatcccgatatggataataatatcgcaaagggcagagaatttgctgtttttgatccgtgtgccgcaagagaaaatcacaacatgcaggatgcagtaagaaaaattttaaataaaaaaaacattaaattttttgagctggagcaaaagggaaactatggctgctgtggttttggcggtgatatttctgttgcgaatcctgagattgctgattttattgcagaaaaaagggctgatatgacacaggctccgtatataacatattgtataaactgcagagatgtttttgctgacagaaataaagaggcagttcatattcttgatgttttatttggggactcttgtatatcaggagagtccgcagactttacggccagacgaagaaacagagaaatgctgaagaaaaaaatgcttgaaacttactggggtgaacaaatgataaacgatgaaagtaaatatggatttgaaattatttatgacgataatataaaacagaagataaaaaaacttcaccttgttgaggaggatattaaagaggttatttatcgtgcagacaacctgaacagaagaatctataatgctgatacggaagaatatacatgttattcgaaactgaattatattacatgctgggtaagttataaagtaaaagatgataaatactgtcttacaaatgtatatactcacagaatgaatataaaactggaggaagtatggaatggaaaaaaaatcaacgctgatctgtgatggatgtcaggtggaaatggaggaacttgaagttcagtttgagtatcttgacaagttcttcaggcataaagttctgcgatgtcctctttgcgggcaggtatttcttccgcaggaacttgtagagggcagaatgaagactgtagaaaaaagcatggaagaaaagtaaacgaattaaataaataaaaataccgtcatttgtcgatggtatttttatttggcacgatagttgcattaaatataagtgtaaagtaaatcccttatatttataagccttgtgcccgcaggaagtaaaagggcagacctattgaaattaggggcattgtaagattttaaaaacatataacaagacaagatgtgtagaaaaaaaactacacattgatgaaaaaacacaacaataaaggagcgcgaagaaccatgaaaaaaattgacggtatcggcaaggatcttttagagaaaatgtattgccagatggaagaaatcagacagtttgaattgaaatcggcagatctgtatcaggccggtgaacttccgggattcctgcatccgtgtgttggacaggaagctgcagaagtaggagttatttcagcacttaatcaggacgactttatagcaactactcatagaggacatggacatattattgccaaaggtgcaagcctggacagaatgatggctgaactgtttgccagaaaagatggaatctgcagaggtaatggcggttccatgcatatgatggacagatcactgggtattatcggagctaacggtattgtaggccagggaacaactcttgcgacaggcgcaggccttgcttgccagctgaatggcaaaggccaggtttcaattgctttcatcggagacggagcacagaacgagggatttttccatgaaagtatgaatatggcatctatatggaatctgcctgttatctttgttgtagagaacaaccagtatgcagaatccacaccgcagacatatcatatgagaccggctgacgttgcaaaaagagcagacggatatgatgtgaagtcatttatctgtgatggaaatgatctgtttgatgtatataaaaaggctactaaagcaatagatatatgcagaaaaggagagggccctgttcttatggagcttaaaacctacagatggtttggtcattatgttggagaccctgcagtttacagacctgaaggtgagcttgaaatgtggaagactcctgaaaaagaggcgtttgccaaattcagaaaaaaggcaactgacagtggagtatttacagaagacgaattgaatgcaatcagagatgatgtaacaaaacgtgttgaggctgctgttgctttcggaagagcaagcgatccgctgccacaggaatttgcattgcagaatgtatacgaagaagaactgatttaattaagaaaagcatagagaataaggaggcttttacaaatgagaaaaattacatatcgtgatgctataagagaagcactgcaggaagaaatgagagctgatgaaaaagttatagtatttggtgaagatgttgccgatccgtttggcggttctttcaaagttactaagggcttatcgacagaattcggtacagatagagttagaaacacacctatagcagaagcagtaattgcaggagctgctgtcggagctgctattgcaggctacagacctgttcctgagattatgtatatggatttcacaggctgctgctttgatgctatcgtaaaccaggctgctaaaatcagatacatgtcaggcggacaggttcaggcacctatcacattcagaacacagcagggagcaggccgatcttctgcggcgcagcacgcacagagctgggaagctatatacgcgcatatcccgggacttaagattgttattccttcaacaccgtatgatgttaagggcctgctgaaaacagcgattagagataatgacccggttatgtttattgaacataaaatgctttacggaataaaaggcgaagttcctgaagaagagtatacaattccatttggacaggcgaaggttgttaaagagggaacagatgttactatattagcatattcaagaatggtgcagatggcattagatgcagctaagaagcttgaaaaagacggaatttctgcagaagtaattgaccttagaactatagttcctcttgacaaggaaacaataatcaaatctcttaagaagactgaaagacttgctatcgcacaggaagcggttgagagatgcggatttgcatcagagctggctacatttgccatggaggaagcttttgattacctggatgctccggttaagagaattgctgcaaagaatacaccggtagcgtttgcaccggcactggaggatttcattattcctaatactgatgatatttataacggtgtaaaatcaatgttttagtgaaaggcggggtgcaaaatggctaattttataaacatgcccagacttggactgactatgacagaaggtgtcattacaaaatgggttaaaggcataggtgagcatgtggaaaaaggtgaaatcattgcagaaatcgagtcagataagtcagtggtaccttttgaatcacctgaatcaggaactatattaaaactgcttgcagaagaaaatgatacgcttgatatatatgagcctatagctattataggtgagcctggtgaaaatatagatggtatggaagcaggaaaaacagcagaagctgcagcctcagaggaggcgccgcaggaagcggaagcagttcctgcagcagctgcggcaactgtgcctgcagtaagacaggagggtaaggtttttgcttctcctgcagctaagcgtgtggcaaaagaaaatggtatagacatagcggatgtcccggttccggcaggcaaacccagagtaacaaaaaaagatgtactggaatatatccagaacaatcacgttaaggcaactcctcttgcaaagaaacttgcggcagaaaacggcattgatttaaacaacgtggaaaaggctgcaggtgaaagaatttacagtacagatcttaaactgtcagcggctgcagcagaagaaaaagctgtaccgacaggtatagccgaagcgacggctgatgatgcagacactattattcctgttaaaggaatgagaaaagtcattgcaacaaggatgaaagaaagccttgatatcgcagcacatcttactacagttatagatgtggatatgacaaagattattgaactcagaaagtctgtaatggataaaattgtggatcgttacggtgtcaaaatttcatataacgatattattcttaagtgcgtggcagcggcaatttcggaataccctagagttaattgcgaattcacagcaaaagaaattatcgtaaagaaaaagattaatttaggtatggctgttgcaaacggagaaggactggttgttcctgtcattaaaaacgcagacaagctttctctgggacagctggcagctgagagtaaaagactgacaaataaagttaaggacacaggcctatctcctgaagatatgtcaggcggaactttcacagtatccaatatgggtatgtatggaataacaagtttcacatcaattattaaccagcctgaaagcgcaatactgtctgtaggcggtttgcagaagagaacagtggttattgatgatgaaattgcaataagaccgatgatgactctgacggtttcttatgaccatagagcaatggacgggtcaatgtcagcgattttcctgaaaacactgaaagaaataatggaagacccatatagaataatgatttaacaattaaaggagaacgaaaatggcaaaatacataaacatgcccaggttaggcttgactatggaagaaggagtcattacaagctgggtgaaaaaagaaggagaccatgtagagaaaggtgatattattgcagaaattgagtcggataaatcagttgtaccttttgagtctccagagtcaggtacaattttaaagctgctggcggaggaatcagacacacttgatatttatgagcctatagctattataggcgagccgggcgaaaatattgatgatctggcagaaggcgatgcagcggaagctgctgacaagcctgcggctgaaggaaacaaaaccgaagcaggcgatgcagactacgatattgcagttatcggtgcaggtccgggaggatatgttgctgcgattaaagcagcgcagcttggaaagaaagtatgcatagcagaaaaagaacattttggcggaacatgcctgaatgtgggatgtatacctacaaaagcgctgcttaagagcgctgaaatgtttaatgaggtaaaagaggctgcggcttacggtgtgacaggtgtggatgctgctgcactgaaaattaatctgaatgatgttcagaaaagaaaacagcaggtggtaggaactctggttaacggtgtcgaaggcctgcttcgaaagaatggtgtgactgtaaaaagaggcgcggcagaatttgtggatgccggaactattaaagtaggagatgaaactataaaagcagataatataattattgcggcaggttctgcccctaaaatgctgccggtggatataagcagcgaaatgcctgtatatacaagcacagaaattcttgatatgacagaggctcctaagaaaatagctgttataggcggaggtgttataggtgtggaactggcatacttcctggcaaacatcggcgttgaggttactattgttgaattccttgacagaatacttccaatggtagataaagaaataacagatcttattgagaagcagtttgcggaaatgggtattaagattaatacttccgctaaggttacagcaattgaaaaagacggagttgcttttgaaaaagcaggagaaaaatgcaaggcggaatgtgatgcagtgctgatggcagttggcagaaggccgtatacagaaggtcttaaacttgaaaatgcgggagtacacgttgagcgcggtgcagtagttactgatgatacaatggcaacaaatgttaagaatatctatgctatcggtgatattaacggtaaagtgatgctggcgcatacagcatctatggaagggattgttgctgtggaaaatatctgtgggcataactcaaaaatggactacagtaaaattccgagcgcaatatatataaagccggaagttgcttcaataggtctgacagaagagcaggcaaaagaaaagtacggcaagattaaagtcggtaaattccctatgatggctaacggaaaagcccttattgagggagagacccgcggacttgtaaagattattaccgatgaaaaacatcttgagattgtaggtgcgcatttctactgtatccatgcaacagatatgattgcggaaatgagcgtggctatgaatcttgaatgtacagctgatgaattggtaaagatgatacatccgcatccgacagtatcagaagttgttcatgaagcggcgcacgctgcggaaagcaaggctatacattgctaggagataataagatatgatttatataaggaatgattctaatgatccgttttataatctggcttttgaggaatatttctttaagtcagaaacaatagaggatgctgttctgctgttgtggcagaacggcccgtctgtgataatcgggagatatcagaatactatcgaagaaataaacgaagacttcatagatgaaaataacataaacgttgtaagaagaaataccggaggcggagctgtatatcatgattacggaaacctgaattattcctttatagtgccgtctgaagagaaaaaaatagattttgaaaccttcacgaagccggttatagatgcgttaaaagaaatgggaatagaagccgctcttgcaggaagaaacgacctggttgtagaaggtaaaaagttttcgggaaacgcacagtatacatataatggcaggcttttgcatcacgggacacttctttttgatgcggatctaagtaccttggacaaggcacttaagatgaaaaaaggaaagattgagtcaaaaagcattaaatcagtaagaagcaaggtgacaaatctaaagccgtacttcaacgaagatgctgatgttaatcagtttaaggaaaagcttttggagcatttttataaagctgaaaatcttaaagagtacaaagtaactgcggaagacagaaagaacatagaaactctggctgatgaaaagtacagaacatggaaatggacttatggggaatccccgaagtgtaacgttgttcgaggaagcagatttaacagcggttatatagaatttcgtttccagatagaaaaggggttaattgttaatgcatatatttacggtgacttctttagcggaaaaaatgcctacgaattgcttgataaatttaaaggcattgaatataaacgagaagcgattgaaaagtcgttgaaaaatgttgaccttagggcatatcttggagatgtctcactggaagaactgataaatactatatgctagataaaacaggagaaaataaatgacagcaattttagaaaaagataaaaaatataatattcactcatggagtgctcagggtgcgcttaacccgcttgtagta

SEQ ID NO: 1303 - DNA, 2232 bp, Unknown
  16S sequences of unknown bacteria
ggtatgaggtggagctttcgaacgggttcatcccgggcgagccgatcggtacgctgacggcttcgttcaggacgcagtcacaggggctgcttgagcttatcgggcggttcttccgttgcctacagcgcatcgagaacaggctgcttccgatcgacgtgtcctattcgctcgatcaggggcggttcgtcaggacgctcgcttatccgacgcttgtcggcggcggggcgcactcgagggtggcgatgagcccggcggagatatccgaggctatcaccgattacgtgagattgattgaccgcctgttaaaggcgtgcgtcggcggcgcggactcggcgtatgtcatggatgagtacgcggaggaccttgagaagcgcaagctgctgatataaaacacggcaatactccgtgaaaacggcaaaactccgtaacaaagcaaattccatttccttcaagaaaggatgaaaatatatgaacgcagagaaattcacccagaaaacaattgaaacgataaacaacgcgcaggagatcgcgcgtgaacaccataaccagacgatcaccccggagcatctgctcctttcgctcctgtctcaggacggaggtctcgtcggcacgctgatctacaggatcggtcagaagaccggcaacaccgatattgtcggcgcaatgcagggcgagcttaacgcggcgataaaccgtctcccgcaggtctcgggcggctcggatgagctttacccgtcgggcgaggtttcggctgtgctgagattcgccgagaaggtcgcgggacagcttaaggatgagtacatttcggtcgagcacctgatgctcggtcttctcgccgagggcggacgcactgttgagcagatctgctcaaagtacggtgtcacgaagcaggctttcacggatgagctcgcgaaggtcaagacctctccggtcacgagcgataacccggaggacacctacgacgtcctcgcgaagtacggcaccgacctcgtcgagcgcgcgcgtgagcagaagctcgacccggtcatcggacgtgattccgaaataaggagcgtcgttcgaatcctgtcccgtaaatcgaagaacaaccctgttctgataggcgagcctggcgtcggtaaaacggcggtcgtcgagggtctcgcgcagcgtatcgtccgcggcgatgttccggacggactcaaggacaagacaatattctcgcttgatatgggcgcgcttgtcgcgggcgctaagtaccgcggcgagtttgaggagaggctgaaggctgtcctcaacgaggtgaagaagggcgagggcaagatcatcctcttcatcgatgagcttcatacgatcgtcggcgcgggcaagactgagggctcgatggacgcgggcaaccttttgaagccgatgctggcgcgcggagagctgcattgtatcggcgcgaccactctcgatgagtaccgcaagtatatcgagaaggacgcggcgcttgagcgtcgtttccagccggtcatggttgacgagccgactgtcgaggacacgatttcgatacttcgtggtctgaaggagcgctatgagatattccacggcgtgcgcattcacgataacgcgcttgtcgcagccgctaccctttcgcaccgttacatcaccgacagattcctgccggataaggcgatagaccttgtcgatgaggcgtgcgctatgatcaggacagagatcgactcgatgccgtctgagctcgacgaccttcgccgcgacataatgcagctcgagatcgaggagatgtcgctgaagaaggaggaggaccagctctcgaaggaccgcctcgcaaagctgtccgaggagctcgccgggaagaaggagaagttcaacgagatgaaagcccgttgggactccgagaagcaggcgaccgagaacgtcaagaagcttaaggcggacatcgagaagatgaccggcgacatcgagacggcgcagctgcgcggcgagtacgagaaggcggcaagacttcagtattctgagctccctgccctccagaagaagctcgaggaggctgaaaaggagaccgagaagcagaatcagaatatgctcgtccgttcgaccgtgaccgaggaggagatcgccgaggtcgtcgcgagatggacaggtatcccggtttcaaagctcgtcgagggcgagcgcgagaagctgctgcaccttgaggatatcctccataagagggtcatcggtcaggatgaggcggtaaggctcgtc

SEQ ID NO: 1304 - DNA, 7910 bp, Unknown
  16S sequences of unknown bacteria
atccggcggttcagttcattggccgcagcactggcacacagagcaaccgcggcgctatgtctcatcttcaatcaaaatctacattgatgaaaatcggggttttctctattttccggtagcattccatgtgatgcgtctcctcgttgtatgcatacaattccctgccctgcacgataatgtcacgggaattggcatctgccgtaattgtgatatagtttccattctgacgatacgttcccttcgcaaggggttcccattcccgccagcagtaaaattcctgctgactcgtaaacgccaagtaggtcgcatcacaaatagaattactggtgctgtacgtccccacgacattggctgtctggatcatatctatattttttatgacaaggccccaaccgacaaggttgcccaatgccaataccgctatcagaatggccgcacctgcacaatggcggaaagcattcaaattttgttgacgcatatatcccccaatatcaaactgcgataggcgttaatttgacagaataaagaactttttgttgaccagaactatattctttccactggtagccttccatatcgctcacccatacgcgtttatagacaatgtagtgtgatacagtgtaagtattatccacatagagacgataatatttgaatcccggaatattagcgctgtattgtgacacctcactgacacgtttacccaactcgaaatttacgctgacaacaccgtacgggtcaccaaaagcgacacttacagaagctgtaggaccaccattcggagtataatatatagcaccgcctgacgaagaattaatacatactccacccgcaggctgattcccagcatagccactgacaaccactcgctttgtagaaacaacttctgttttgtaatcatcaatgttattggctaacataggatctcccggtaaataaacagttccgctttctattccacgttcttccaaagaaatcgcaatatgttcacgcaaagcagcttcccattcttcttctgaagaatatatttcataagttttcacaagtgtgtcagcgccatcagcaccttctgtaacagcaaacaccggaaccatcaaactcgcactcatggcgatggccaacacaacggacaataatttctttgtcattttcataataatcttccttcaaactttttgcaatcatttcttggttaaatgtatgcaggggaaggatctttgcgcaattttttcagtgttaccttctttcttcggctccggccattagaacgacgccgtaaagtctttcgtaacggtatcccatttgccattcacataggcctgtccggtcacagttaacttatagcttttaccatctttgattgcataagaaaccgtctttttacatttgttagtgtttgcgctagctgaggcggagtccacttccttgtagccaagcacccctttttcatataacgtcatgcttagttttgttttcgtcgtaccggttggccccatcactgtagcggtataaatcccatcgatttgtgaaatatatccggtaacattagtgctgtccacattccagggctgcatatcagaagcgaatgcgctgaccgaaagggtcagcgccatggcaattgccatggccagagccaacgcgcggggcaggggtcttcgtgtgttgttcattggaacatctctccttttctttcgttccgttttcttttgcggatgaatgatgctctgccctcccttctatcgaaccttctatttataaagtgttttcgaccgagtttttggacagattttttgaaaaatcttttcgtttttctattctttggatatttgcacaatgcaaaccggataaaattgtgcaaaaacacacggcagccaaacagtagactgccgggtgtcttgttttcttttcaggaagaaatgccgtccgctattttgaacacttcttcccggctcagctctgcgctgatatacaattcgtgctcgatgccgtcggcaaaccagaacatcgcatagccgtcgccgttctcaaaggtgccgaaataagcgtcgccttcgccataatcgatccgttcaaacgaggtgtgttctgtgtccatactggtcaaagaagcattttccgcaatgcgtgcggtcaccatgataaaacaaccgtctgcattctcgtaattatattgaaacgaaccacgaaaccgttccgaaaactcttcatcaaactcaaatccctcaggaatataatgcggcgcatagccttccggcagttccgtcagtttatggccgtccacctcatagcgaatatccacgttcggccccgtccaaatggcaatggtgcgtttcaaaaacgcccgcatgtccgccgaaaccgtgagcagacccaaaaacaatgccatcagcaccgccgccagcagagccgcgcgttttgcccctttccaggatacctgccggggccggaacgccctgcgctcccgctctgcccgctgctgccgcagggcggagcggatccggcggtccagtccggaaaggttcccgcagatgcggtgcagctgcgcccggggtggtactgcattcagttcctcttcacacagttcccccagcgattggccaatggcctgataaagcgaaatctgctgttcgttcaaaattctcccgcctccttcagccgctgcgccagcgcctcgccggcccgcttcagccgtttatacacggctccttccgtcaggcccgtcgcctcgacaatctgccgcacggtccactcattgtaaaaccggtattccaacatcaaacgatatcggtccggcagcgctttcagcgccgctttgaccgccgcgcaccgctgcatgtcgatcatgcggtcttccaatccgatcatgccgtcctccgtctcatcttccaacgcgcttccttcccatttttggcggcgcagctcctgcagcgcatagtgacgcacacactggtataaataggccgcaacacgctgatcgtcctccgtgtccagctcatggaaatggtgaatcagatacaaaaaggcatcttccaccgcattctccgccaaatcgcgctgctgtagaagctgcagtgcagcatacatcagcttttctttcagcttttgatacaaaaaccagacccgctcccggtcctgttccatcggcagcagcagcaacagatgtgccagcactttgccatcccccctatggttacactgaaaatattatagcacagcaacattcccagtgtaaatcagcgccgcagctctgcctcctatgtataaaaatatttttggatgggatttgggaaaaattttttaatttttacgccccggcaccccgctctcaaaagcggagcgccggggcgcaaagagtggtttctttccccttagaagaaggggttgaagaacaccagcatatcaatgataaacacagggatcaggcagctcagggaccaggccatatagccgaagaaagacggcatctttacaccgttctcatcggcaatggacttaaccatgaagttcggtgcgttaccgatataggtattggcgcccataaacaccgcaccgcaggacacggccaccaacatcggcacagccacagtgcccacggtggtcaccacaccggtagcggcgcccaaagtgccggccacggtgaggaacaccagataggtgggcgtgttatccaagaaagaggacagcgcgccagtgatccagaacatctgccagggctgatccaggcccagggaagcaccgtgggcattgaggaacagcagcgcggggatcatggtaatgaagatgccgatgaacaataccgccacctcttcgatggccccccaggtaaagttgttcttcgtgcgtacttcttttttggtggtcttgaaagacagcaacgctgccaccaggatcagaacaatttcgataatgttggtatacgtcaggctgacattgccgtagatgtgcaggctcagaacattgccagcggcatcctggaacatgggcagcttgggcagaacgccagacagcaccacggccgcaacaatcatgagcatgaacagaatgttgtgcgcgccagtcagcttgatcttagcgccgccggtcagcggcttgcggccggcagccaaatccttcttataggcacggctgtccataatataatacaggatcagcagcagcaccacgttcagtgccatcacaggcagcatgtggatgagcgtccactggaaaggaacaccgcgcataaagcccatcagcagcgggggatcgccaataggagtaagagatccgccgatattggacaccaggaaaataaagaacaccacagtatgtacgcagcgggaacgccactggttcgcccgcagcagcggacggatcatgaccatggaggcgccggtggtgccgatccaggaggccagaagcgtaccgatgagcagcaggatcaggttggttttgggcgtgccggccaagtcgccttccaggcaaatgttgcccgccacgcagaacaaaccgaacagcagcacgatgaatgtcaggtagtccccaatcatggaatgcagcaactggtcaagcatggtgggtgcgccgaaagccatggcaaagggcaccagaaacagcaccgaccagaacagcacgaaagcccagcgccacttttcccattggtgcggaatcaccagcggacaaatggcaatgctcagcagcatccccacaaaaggaatgcaatacagcagggaaacctgtgcccccaattccgtgccatgcaggatatggccgccggaagcaaagacagtttggcagagaagcgcagccatcataagcgctgccgctgccgcggatagtttctttttcatattaaattggaaccccctcttgttgttctccgcacccgcggcttccactttgccgtgtgcatctgcgcagaaactgccgcgcgcggatttctctcttcttttctataccatagcaaaagttgtatctactttagcaaacccgctctatgatgtcaatatctgtcagagcgattcttgacacagttcgcccgttttcgcggaagaaaaaatcaattggcgttaaatctttcaccaagtcctgcgctgtccttttcctgagcggtttttgtataaaatcggtttttgcagccacactatacagcgcatggttcattttacttctttacaaaggaggactttttatgtctttgctggaccgtattgcattgatcgttgtgatcattggcgccgtcaactggggctgcattggcctgtttaacctggatctggtggcgttctgcttcggcggcaccctttccctggccagccgcgtgatctactgtgttgtaggtctggccggcttgtggtgcatatcgcttctgttccgctccagaatggactaatgtgcatctgtgcggctggttgctccgcctgcgggcggagcaacctttttctctcttgcttttccctgcaaagcttggcataataggattatctttttatcaaaggtgcgcgataccatgcgggcagaacagaacacacgatggtttctcgctgcggaagcagtgctttacctcgcctttctctgctgcgacctgcaaagcgttttttcgatcagtacagctttgaaatacgctgcactgttgctgtgccttttctacagtgcaggtcataccggcagcgaggatggccgtctggtgtgcgccgccttgaccctgactgcagcagcagacttttttctgctggtgctgaaccgttggtatttcctcggcgtggcgctgttctgtcccgtacaatttttatatgcgctgcgcctgcgccgcatgcagatctctcctggcccgctctggccccgcgccgccgccagcggcggggcattgctcatgctcggcctatccggcctgctgcgcccgttgactatgctgatctgcgtctacttcccgcagcttttgtgcaacgccgtcgaaagccttcgcccctcttccgcgcatggggctccgctgttccgctgcggcctctggctgtttgtgggctgcgacatttgcgtggggctgcacaacctcgtcccgtatcttcccctgtctgccggctcagcagcggcagtacagttctgcatgtgggcgttgtatctcccttcgcaggtattaatcgcactatccgtacgcaggaggccaacagcatgaaagaaagcaaattttatttttttattctgagcgctgcgctgatgctgctggtactctctgccgctatcgctttcccaatcctgttccgccctttttattatgctcacatagcagccctggatcttcccgggcgcaccggctggagcgcagcagagatccggaacgcttacgatgaaatgctggactattgtatcctgggggctcccttcggcaccggcgtgctgcactggtcatacagcggcatggctcattttgccgattgtgcgaggctgtttcgtctggactttgccatattgggcgcatccgccctgacgctgggcggatgcgctgtggcacaccgctgcggtgtgcgcgctgcccgtcctttgggccgcggcagcgcgttctgggccggaagtcttctggctgcggccgtcatcttgcttgccgccctggcagtgctgaacttcgatgccgctttcgtactctttcaccatctctttttcccgggcaaggacaactggctttttgacccaactacagatcagatcattctgatcctgccaaaactctttttccgcaactgcgccatcgctatcgcagtatttctgcttattgggtgcgccgcactgatcttatgggatctgcgccgaaaacgataaaattttctttgtctcagctctttacattgctcccatcttctggtatactgttatccgctgcaaacagcacgcgcccgtagctcagctggatagagcgtcagactccgactctgaaggccgctggttcgaatccagtcgggcgtaccaaaaaagaaccgaaaactccttgttttttcaaggtttttcggttcttttctttatttgaacacagcatgtaatacaaactatttttgttttttgcactatatactggtggaaataaaacaccatatctatctcatcgcctgcgccagctttaccatcaacccttctccgtacttgtaaacaccgaggaactgaatcgtatacgcatccagtcccgcccatagatcccctttgccactggggcgctctcctccacaggcccaatctccggcagcaccataaacggaatgtcaaagttcctcccgcctccttgacaatcccgctgcagtcctgtatagtatcaattaactttgacagaaagggttcggttatttcatggacgacagcgacagtactgccgacaaccagagcacagaatcatttcagaaaaaacaagcatacctgtatttttgcggtcaaaaatacgggtgtgcttttttgcatattttaccccgtcacactctgtttcatagaagagattaaatcggaaagcaggacacataaattcgcatggataatttaggaggtatttttccgtggacacactcatattccctttgctgctgcaggtcatcctgattgcgctgaacgccattttcgcctgcgccgagattgcagtgatctcgctgaatgaaaccaaagtgcagattctggccgaggaaggcaaccgcaaagcaaaaaaactgaaagtatttaccgagcagcccgcccggtttcttgccacgattcaagttgccatcaccctgtccggcttcctgggcagcgcctatgctgcagacaactttgccggcattctgaccgaaggcctgacggcactgggcgtccccctgccggcgcatacactgaataccatctcgatttttctgattaccgtgatcctgtcgtactttacgctgattttcggtgaactggtacccaagcggctggcgatgaaa

SEQ ID NO: 1305 - DNA, 5978 bp, Unknown
  16S sequences of unknown bacteria
gagatgaaaaggctcgcaaagggactcggtgtattcgcccggggcaagaggaagggcaaaataataggtgtcgtccgagcccttgagccagttgtcgttaagggtgagggagggcatttcggaggatattcccatgatttcaccgtcggcgttcacccaatttgaaaccactctgagacgaacaaaggccgatgtatttgaggtgttttccaccgttatgtcgtttttccgtccgccgatattggtgccgtcggtgtgctcggtgccgtcaagcttttcgtgtactgtgcaggaaatgcttgcgggaacaagcaggttttcggattttgcctttttaaacatgaaggcaaaggtcacacccacagcggccgcaagggtgagagccgcggcaataataagtattctgttgactctctttttcaccgggctcacccctttctgttttggatttttttgctgtttccgttaagccagtttctgttctgcgccgctttttcaaatgtgacgctgttttctccgcttttaatgtcaaccgtaacgctgctgtcggaatatctccacgaccagccgcctacctgctcgacggtatattctccgcaggggagatttttaactgtttcgcttccgtttccggttatagacacatacatgatatggtcgggatttgacaccgacgaaattttataaacaaaggttgtgtcgccgtttgcctcgtccgccgcgtttttgcggacaattgtcaaattgccgtaggttggaacgaattttgcataaaacacgttggttttgggcgtagggtcaagctttgcggtcgtggggacgagcctttctcccgaaagggtcgccttgtcgctgtcggaggcgggagaggaaactgcgggaacggtgcaggcctcgtcaagataccagccgtcgaatacatatccgctttgagctgcgggagccgagccggtaaaggtgtcggttccgtttacaacctcgattgttctgtcgagacttcctccgccgtattgccaaaccttatattccaccgtaaactgaaggggagagtagtaaaaaataatatggttctgtttgtcgtttgcgcggagaacaatggatttggtgaattccgaaatgcagctcatgcccaggatttcgtcaaccgttttgcagcttgcggttatggttcttccgtttttatcggagccgctttccacgggagcaagcacaccgttgctcttgtcggtatattcgagagagtcaaggttgcttatgtcggttccgtaacggaggtgatatattttataattttggatattgcgagtgtagaaaatatagagctcggtttcgtcggcctcaacggtgacggtgaagtagggacggcttgacgtttcgtcgttcaggtcgataaaatcggtctgtccctttataagtcccttaccgtaaaccgtaaagccgatgaagttttgcggctcgatgtttatttccttgccgatttctcctataacctcggtgtgagccttgttttcggtatagtttgtatagccgccgtttccgtccgaaacgggttcatcggaatccgcatcggcgttttgcagcatatggtgcacggcataaaaggcgttgagctcgtttttggagtagtagaataccacaacattgtcgggcgaggagatgacgtttccgtccttgtccttttccacggcgaggataagacgcttatagaaggcgtcgggtatatagtcggttacaacggcaaaacgttcggtcactaccgcgagcttggtgttcttttccacctgtccgttgcctggagccgaggtaatgagctctccggtgtcaagataacggtattccgccgtatagtcaatactttccttgtaaacataggtgaaggtgaaaatattgtgcttgggctcggccttgttttcctcatactgtatggaaatcgaatgaccggcaagggtgggatagtatccgctgttatagtcatcgtagagctgattatatgggtcgccggctttggggtggaaggtccttgtgttgccctgataggcaaagccccttgtctgatcggctatggacaggtgatattttccgtcgctttcaagataaatatattttgcctgttcaccgttaaccgaaacggtgtattcggtgttgtcggaaggctctccctcggcagcgtcatcaagcaaagcgataatttccgcattggtttcggggttgtcaagggcatagtggatgacatagggctgcgccgactgcgaaccccagtcggcaaagacgttaatgtcgtttgtgaccggcatatcaagaggagtgaaggcagtcttttcaccctttttgatttggaaccaaccgctgaaggtatatttgtattccgaatcgtcgacggcattgtccacacttccgaccacgtttccgtgaggcaccgtccttgtttctataagcccgctttcatcgccgttttgttcaaatttgagcaaggactcatagtttttaaagaaccttaccgtgtgcgggattgcatcccattttgcatagagcgaaagatttgcggcgggcataagggttccttttgtatattccgagccgtcatagcagccggggctttcgtaccagcctctgaaaacataggcgttttcctcaagggttttcggatagtcgggaacgacctgatcaccgtccccgtcgtaaacataatcgtcaacctcgctgtcaaaatcaacattggttttgcttaagtaaatttcgttgtagttgtgcattacaaggctgaaattatcacgtttgtagaaaaatcttacggtgtatgattcacggttatcggcaagcagaccgttatagaccctttccgaacggcgggtattgttgccgagacttcccgactcaaaggaaaatccctcaagagcggtttgcgtctggttggaagcgtcacggccgtcatcagacgtcttgacggtgtcaaaaaggcgatagacggtgctgttatagtaataataggtgtttccgtcaatgtcaacggtgctgccgtagtgataaaccttactgtcgtttgcggaggcggggagggtataggtattgtcctcggcggacgcagccttcacaagttcaatttggtccgaagtcaactcgccgctgaaaatcggcacataaatctgataattccattctctcggaacgttccacgaaactcccatgccgttgttgaagaagtttacaaaatagttgacgcgggaggttacctccttgccgccgacagttgtctgtgtggttatgattctgtcgattttggaatcgttttcgtaagaaaagtcggtgccgcccagcgagccgaaaatcacagtttcattaagtttttgatagcgtccttttattgtggagttgctgttggcaagggaatatccgaccttgtattcgccgttccatcccgcaagataggcataatttccccaaccgtcgttttcaaggttcttataggctccgttagctgtgtgcctttcgggatgagcaacctgaaccttgtcaaaaaccgccgtcggccaaagctcggtcaaatcggcgccgtaacgggcggtcagctcgaaataaaagaatctgtcgcctctttggttatagttgccgttgcccttgtcgccttccttgtatccggttccgggttcggggtatatacctgttttgtattcggcgcctgcgacattcggctgaatgatttggggcagacggctgtaatcctcggtttggtcgttcgtttcgtaaattgtgccccattgctcgctgtttccctcgcatttgttcatgttatagatgatgtcatcgagggaatagtcgtttcccgtgccgtttggccacgggcggcgggaggtgttctgatttccgaaaccgtgggtacttcctcccacgataaggtaacgaattcctttaaagctgctcgaaccgtaataatcgtaaaaaccgttatattcctttgcatagataaagcgcagggtataatatttccttgtgtaatatacattgacaaccgtcgagccgtcgccgttgacggtcacgtccttatctgccttttcaaattcggcgtgttcaagctcgtcgggatagcattcgtcagtatgcgtgtggtcggcgtcggtattgccgcaaatgggagtttggtcggtgaggtcgtcggatcccgaaacaagcgttcccgaatcggcatagcttaccgtgctgcctttatagctgtatccgtcgtcgtcggcattttgtaaccaataaaccgtggtgtatttggttctgacggtggtccaaagggctttatagctttgattttcggcgggaaccgaagaaggcagcacatcggcaatgccgtcgcccactccgtcgatcagaaggtcccaaccggcaaaaatatagccgtgccgtgtgggttcgttgacgacaaaaggcgtgccgtatcttgcgtatattggttcggtgccgtagcctccgtccatgtcaaatttcagaatatagtagttgcggtcatagtagcactcaaaaattgtcgagccgtcggccgccacggcctcgggatagtggtaaagctttgtaaagcccttgactctgtcggggtcgcttgcctcaagctgttcattggaaattattgtgccagttttggcataatccagcttgtaaaggccgtaatcctccgaatagaaatcgtcgtttatgttttggaagaagtatcttgcggcaaagggcacgtcaattggcttataatagacgttaacgacatatgaatcgccgtcaaaatcttcgggaatgtcgagatatataaccgaggcgtcgtcgggcgcgtcgatttcgaccccgtcggttttcttaattgaggggtttgacttgttataaaagggagcgtatccgagataggtgggggagataaccgagcttgtgtaggaggttaccttttgaatctgcgcggaatagccgctgtaaatggcgagtcccgccgaggaatcaagatagtttatcgaaatatccacatattcggggtcgtttgaaacttcgttttcatcattttgcagggttgtctgcggcgcgggggtgagcagcgagctttcatcctcgggaacgttatagtaaacggtaaccgcggtaggctcggaataaccgcaaaggtcgttgtttgcggcacaggcgcggagatacacgcttcccgattcgtcgagaagattttccaccgtgagataggaaagggtgaagctttttgatgtgccgtcaaaaatatttatccattcaccgtcggttacgctgcttaaaagctgccagcgaaaagtcgtatttttgttttcgggtgcggcctcggcggtcagcgttatcttgtcggtttggggaagggaaagctcggaaacggccttgccgtcccttgcgatataaacctcgggaacggtgtcggcagatgccgaaagaatttgcgcctgaaaaacgcccgtaagcatacaaaggcacatgagcgccgaaacaagcttaaatatatatgaactttttgccgatttacgtctcattttgcccgtctgcctttcaatattatttgttcttcacggcgttccaagccgcaattgcccgttcgctctcggtgttgccttcattaaaaccgccatactgaacggcagcggcctcgaaggtcagcccgagggaggagggaaaaccgtcgagatctgattttgtgatgctgtcgctgacctttatttgaccgtcgtttgcgacaatgtcggccgaaaacggtgtgttcggcttaactgcggtatagaaaatctcatccgagccgtcgtcgcagagataattccacccgcccgatacattccacgaaagaaattcgtctccgctttcattgtcggagtaagtatatctgtgatttgcatcgtgagtccacttgggggcgtcaatctttaaaaacacataacaggccatttcgctgccctcgaaattcacgacggccttttttgttatgtcggcgccgggggcgataaccc

SEQ ID NO: 1306 - DNA, 13829 bp, Unknown
  16S sequences of unknown bacteria
aattttcaagatacactactttcgtcttaagttgacgatagattgacgacgttgatgtctgtcctctatttcttctgggcgtcaatttgcttctgggcgtctttgcccgcctgcacttccgcttttgtccacggcaccatcttgcacatcacgatgtaccgggcctcctcatagtcgtaggcgcaggtgctcagggtcaccagccggtcgttcttcgttacgtccaccgaattcttggtgatgggcagctccgaccgctcccaagcccggtcgatataggcctgcttctccgcctcgtcgtacgtcatcttatacgtgtcctcgtccgttgccttcgtgataaaagcagagaacaccaccagatgatagtttccgtgaggcgtcgccagctccagggttttgtgcttgtcgtaataaccgtcttcctttgtatatccccgaatgcttcggaacatgctgccatccttcatgtgatggccatatataatggaattaaagcccttaaaatccttttccatcctgcagtccacgaacagggtgccgccgccgctccactgcttgtcaaaacgcgtatggaggtaggtgtcgttgtccgttccctgaaccaccggatagttgatcacggtgcccttctggtacagccagccctgcacatccggattcaccttcttcagcgccttccaatccaccaccccggtgaactgcttcggatccacctttgcggtcttctcgctgatattcgtatacgcggactttgccacctgatattcccacatggtctttccgatcttatatccactcaccaaaataattccaatcaggcaaacggtaatcacgttgagcgccccgtttcgaatccgcaccgacaggggcgcattccgaagcgcttctttccgccgcatcttcgcttccctcttcgccgcccgcttctcctgacgagtcggacgtgttcggttcgccgtatttttatttttacccgagctcatacaccctccttcttaaccgattccctgttattataccatgacccccgggctttacaactttactttggttcacaaatcggttagtatagcattgtgataaaaatacaggcgtttcgcggggtcgtccgacgttgcggggccggattagaattagaggtatcgatatgaaaaatattatggatttgcagaacggcagcgatattcggggcatcgcccttcccggcgtggaaggagaagaggtgaacctggaccgctacgacgcgattgccattggagaggcgttcgtctactggctggcgctgaagctgggcaagagcgagtacgacctgaacatctgcatcggcacggattcccggctttccggggaggatctgaagaaggacgtaatgcggggcatctgcatgctggggtcgcgctgcacggatgcgggtctggcgtccacgccggccatgttcatgtccacggtgatgccggtgtacgagtttgacggggcgatcatgattaccgccagccacctgccgtggaaccggaacggattcaagtttttcaccgcggaaggcggactggagaaggcggacattcaggcaattctaaagcgggcgtccaccatttacccgattgcggagcattacgagtgcgaggaaaacgaactgatggatatgtatgcggcgcacctgcgctccatcatcacccgcaaagtgggcggaaaactggatggcatgaagatcaccgtggatgcgggaaacggtgccggcggattttttgcggagaaggttctggctccgctgggagcggatgtttcttccagccagttcctggagccggacggccacttcccgaatcacgtgccgaatccggaaaacccggaggctatggcgtccatctgcgcacgggtgcaggaaaccggtgcggatctgggaattatttttgacacggacgtggaccgcagtgcggcggtaaccggaagcggtcagccaatcagccgaaatgccatcgtggcgctggccgcagctctggaagcgccaaaccatccgggaggcaccgtggttaccgacagcatcacttccaacgagcttcacaccttcctggaacaggaactgggtctcaaacacctgcgctttaagcggggctaccggaacgtaatcaacaaggccattcagctaaaagaagaaggcgaggatgccttcctggccatcgagacttccggccatgccgcatattccgacaactactacctggatgacggcgcctacctggcctgcctgattgtggccgccgccgctaagctgaaaaaagaaggcaaggatatcgaaaccctgatcgatgcgctgggttctccggcggaggcaaaggaaatccggttcaacctggatcgggagaactttgtggaaatcggcaccggtattctgaaaggcatgccggattgggttgcaaaaacaaccggtctttccctggaagagccgaatcacgaaggtgtccgggtcaattacgatcggaacggccacaccggttggttcctcctgcggaaatccctgcacgatccggtgcttccgctgaacgtggaagccacccacgaagggggcatcgcagaagtgcttccgctgctgaaagcgtacctggaaggattcgatggaatcgacctgagtccgctggaatagcaaggatgataggattaataggataggagtaaacaccgggctgccgcccggtgtttttttgttggggcccggcccgctaggaagcaaagtgggcccgggggacggccggggcgggtccgccgaccgccttttgcagggcgcggtttgctcccccctcctcgctagcccttgcagctccgttccggggagcaaattcttcacacaaattccgcgccggcacccgagaccggccggcttttccaaggcgcggtttgctcccccctctccgcgagcccttgcagctccgtcccggggagcaaattcttcacatagattccgcgccgacgcccagtgccgcccggcttttccaaggcgcggtttgctcccccctcctcgcgaacccttgcggcttcgttccggggagcaaattcttcacacaaattccgcgccgacgcccagtgccggccggcttttccaaggcgcggtttgctcccccctctccgcgagcccttgcagctccgtttcggggagcaaattcttcacacaaattccgcgccgacgcccggggacggccggcttttccaaggcgtggtttgctcccccctccccgctaacccttgcagttccgttccggggagcaaattcttcacacaatttccgcgccgacgcccgagtccgcccggcttttccaaggcgcgatttgctcccccctccccgtgaacccttgcagcttcgttccggggagcaaattcttcacacaatttccgcgcctccgcccgagtccggccggctttttcggtgcgcggtttgctcccccctccccgctaacccttacagctccgtcccggggagcaaattcttcacacaaattccgcgccgatgcccggggccgcccggcttttccaaggcgcggtttgctccccgctaaccgctaacccttgcagttccgttccggggagcaaattcttcacacaaattccgcgccgatgcccggggccgcccggcttttccaaggcgcggtttgctccccgctaaccgctaacccttgcagttccgttccggggagcaaattcttcacacaaattctgcgctgccgcacaaaaagcaccttgccggtttatcggcaaggtgcttccctctctccaacagttccctcgcgggcctgcacagtctcctgcagattccctgcggggcagtatagcccccgcgggtcccagtcccgcagggcacttttaattaattaaataagtacacgctggaggacaacagcatgaagacaatcatgatgatacccaacagcagtgccatgacacggctgacctttgaaattctccgccggtccgtcgcgaaaccggtcggaccggttttggccgcttcgtttttcttcttcttattgttcttggaagccacggtccactcctttccatttcccctgccggtttttcttcgcccaccggcgcccggctcaaagagtttccattcagtgcaaatgatataagagaattatagaccatttggggaaatttttccacccccaggccgaaggcaatgctcgaccccgagccggaggcctatcacaccggccggaggccctactcataccgaaggcctatcgaaacagccctttcttctgatactcttcgctctccatatccagcaggtggtagcccatttcccccagcttcttctccagctccggccgcggaatatcttcctccgctatgatggtgcaccccccggtgcggtgggaggacttcactttttttaccctaaaattcttccggaccagatcgttcacgtggctctcgcacatgccgcactgcattccgtcaatatgtgccgtgatcttacgcatctcttcatctcctttttttaccgtaaaaacaaattcgtctagcaaaattccccgacaaggctgccggggaatcgcgttttatctgttatttctttgggtggcatcctccgctgcagccgtgtcctccgtgagaacacatcgagcaggtggaacaatcgaagccgcaggatttatgccctgccttcttctccttaatcagataccggattaccacaaccaccagggccaaaataaccagacagattacaatatcaattccgttcaaagcatttcctcctttcctgtcttatcggaaaaacccgattacaattcgaatggctatcaccatcagaatgccgattccggccagtacaatcacgtcaacgccgttcaatgccatttctcctttaacaattataacttagttcttctccagcgcaagctttgctttcttgttcggatccggacggaacagcaagtacagcacgaatgccagcacgataaatgcgactaccgttgcgatgccgaaggacacttcgcccagaatcagtccgccaatctggtacacaatcagagccacaaagtatgcgctgacgttctggaaaagtacggagtaccagaagaatttccggttgttcatttccttcgcggtggtggacagagccgccaggcacggggaatcaaacaggttgaataccatgaaggagaacgctgccagcatggatgggaagaatgcggcgaactgtgcctggtacgctgcactgtatccctcgatctcgcccaatccggacagaacgcccatggtagatacgataccttcttttgccacaaaaccggacagggaggacgcaacagcctgccatgttccgaatcccagcggtttgaagataaaagcaattgcgccgccgataaccgccagcagcgagtcttctgcgtccaccaggccgaagcttccgcccgcaaaaccaaagttgcccaggaaccacattaccgcacagcagaggaacaggatggttcccgctttcttcaggaacgcccatactctttcccatacgctgaggagcacgccctttggagacggtgcgtggtatgccggaagttccataacgaacggagccgggtctccttcaaacatctttgtcttcttcaaaataatacagtatacgataaccagtccgatgcccaggaagtacattgccggagccacccaccatgcaccgccggcgatgtagcccgcgatggtagcgattaccggaagttttgcaccacatggaatggtggtggtggtcatcatggtcatgcggcggtccttctcattctcgatggtacgggttgccatgatgcccggcacgccgcatccggaagaaatgaggaacgggataaagctctttccggacagtccgaaacgacggaagattctatccatgataaaagcaactctcgccatgtatccgcagtcttccagcaatgccaggaagaagaacacgatggccatctgcggtgcgaatccaatcggcgcacccaaaccgccaatgatgccgtcggataccagggaaattacccaatccgatgcacccatatgtgtcagtccgttggaagcccagttctgaattcccgcaacgaacacatcgttcgtccagtcggtgacaataccaccgatggtggtcacggaaatgtaatataccaggaacattaccagggcgaaaatcggcagtgccagaactcggttggttacaatccggtcgattttgtcggacaaagtcagcttttcgtgaccttgttttctttcaattgcttttgggaccacgcggttgatgtactcgtagcgctggttgatgatgatgctctccgcgtcgtcgtccatttctttttcgcagtcttcgatgtgaccttcaatctcgctgagaacggaagcgcccagcttgatttcttcccgaaccttctcatcccgttcgaagaatttgacggcgtaccatctcaggttgtttgcggacaccttgtcttcgatggattcctcaatgtgtgcgatggcgtgctcgacgctgccgaagtacacgtgcggggtgtctcccatggttctcttctttgccactttgaccgcctggtcgatcagctcctcgctgccgtctcccttgagagcactgattggaacgattggacagcccagctctttgctcagctgcgggacgtcgatgcggtctccgttcttgttcacgatgtccatcatgttcaatgcaatgatggtcggaatgtgcagctccaacagctgtgttgtgagatacaggttccgctccagattggtagcgtcgatgatgttgatgatggcatccggtctttcgctcaccaaatactgccgggttaccacttcctccatggtgtatggggaaagggaatagattcccggaaggtcctgaatcgtaatggttttgtcggtttttaatttaccgtccttcttttctacagtaacgcccggccagtttcccacatactggttgcttccggtcagcgcgttgaacagcgttgtctttccgcagttcgggtttcctgcaagtgcgatcttaattgccactgaataactcctttcttaataccctaaattcgtttatcttcaaaattttactttgctttctgaatgttctcgatttcaatcagctccgcatcgcctttccgcactgacagctcgtaccctcttacggtcagctccatcgggtctcccagcggtgctactttgcgaacataaacctgcgttcctttggtcaggcccatatccatgattcttcttcgggtctgtcccacgcttccgattttcttgatggttgcgctttcgcccaccgccagattgttcaatgtctccatttttttcctccttaatgttctcttaaatagtgacctgaattacttcattctctatccttaacttctaaaactctacaagcagccggctggccatgctctgatccaaagcaagccgcgttccgtgtacctgcagaattaaattccctttcaccgccttcacgactttaacttccgcgcccaccgcgaaacccagttccgccaaatgggtccgaatggaatcatcccctgtgattcggatgatacgaacgatatcaccggtttttgcaattgtgattggcatgttcccacctcctgtatcattcatcctgacaaggccttctccgtctcgtcgtatatgtgtgcacgtgcatgtgctccgcagtccttgcggtgcttcgcgggctccgttgatgctccgcagaacctgcagatgcttcgcagccgttgccggcattcgcacccggtgcgttagttgtatattacttccgttagtctggtgttacatttgttagttcgccttaactaacttctatactattatagcgatttcttcacgcttgtcaataaagtttcagaaaaaagttataggaatctaacctaaaaagccgccggaggcaagcggcgcggaatctgtgtgaagattttgctccccgggacggtgccgcaaggctttgcggggggcggggagcaaatcgcgccgctgaaaaagtcgccggtggcaggcggcggcgcggaattgatgtgaagattttgctccccggaacgaagccgcaagcctttgcggagggcggggagcggggagcaaatcgcgccgcggaaaaggccgccggtggcaggcggcggcgcccagaccggccggagacaagtccactcccctttatttttttcggccgccccgggcacggaagtccgcgtcgattctttttttccattgaggcgttagctcctcgtccgcacgcacatcggatattgcgtcgctcagcacctcaaagttcaaggcggttccaattccgtcacagcgataattcaccgctcggtccgcgtcgatgccaatccatccggcggtctccaccgcatcgatattggcccccaggaacatgaactcccatccgtacttctttttccggcgttcaatcatgctttttacccggtcgatatcatagtggcggctggcattttccaggccgtcggtggtaatcacgaatagggtgtgctccggcacgtcctccggccgagcatatttgtgaacgttgccgatgtggcgaatcgcaccgccgatggcatccagtagcgccgtgcagccgcaagccacgtaatccgccttcgtcaaccgagacacatcctgcaccgggatccggtcatgcaggacctcactccgactgctgaacagcaccgttgaaaccagcgcttccccttttccttttttctgcttctcaatcatggaattaaacccgccgatggtatcgccctccagcccgttcatggattcgctgcaatccagtatgaatacgatctctgtcagattctttttcatttgcttttcctcccaataaaaaaatgactgctcggtaatcaaaccttacagtcatattttaccggggatggcaggggagttggtcgcatggatggcgacatctccgatcggagcccccaagttctcctacaccccaatcagccgctggtcgaaggcgaacagcgcctcgttaatttcaaacacgttgtaatttccctgctgtacgaaaaactccacgattatatcgaacttgctggagtgggacagagtaaaaccggctttgcggagcatatcctgcatttccgaaaggggcagctccaatgccagggcaaaggcaattgccgtggtctttgacggtttatagaatttgtcggaacgaatcttggaaaacagtttccggtcgatattggcttttttgtagcactggacctccgtcatgccggactcggtgatttttcgaagcagcatttccgagaaactctcatccagttgagacagcgcatcctccagcgaaaacgccggaatatccgcctctgcggaagcgatttccacatccgcccgattatctgtatagaacctccgcaccgtgtgttccgcctcatatcggtcatcgatgtattccgcgatttccgaaaaaagcttctttccaatccgataggactgccggtcaaaaatcacgatatacaccgttatctcattttccgacaaaaaatccccaatcgcatccaccgccacacgcagcgcccgatccttcgggtacccgtaaatccccgaagaaatcagcggaaaggctaccgtctcacatccgtattcccgcgccagctccaatgacgcacggtagcaggattccaaaagcgctttttccccatgctctcctccgcgccactgcggtcctacagtatggattacgtacctgcacggcagccggtaccccttagtaatcttcgccccgccggtttcgcacccctgcaaggtgcggcattcctccaaaagctccggtccggcggcacgatgaatacagccgtccacaccaccgccgcccagcaggcttggtttcgcagcatttacaatggcatccactttcaatttcgtgatatcgtcacggataatcttcaaaggcatagcaaaaaactccttccccgtctcattctgaatttcagtgtatcacaaaaaaagaagtttcaccaccgccccaacgtccgagaagaaaaacgtaaaagaaaaaaccccaggaaacaatgtttccgggggcttttttgcaatacttctctgaaattaacgcttggagaactggctcgctcttctcgccttcttgagtccgtatttctttctttccttcattctcgggtctctggtcaggaaaccagctgccttcagtgcaggtctgtttgcttcctcatcagctacgcagagagctctggaaattccgtgtctcagtgcaccggcctgacctgttgtaccgccaccttcaacgattgcgataacgtcatacttgccggctgtgcctgttacgtcgaaaggtctttttacttcgttcttcagaatatccattccgaagtactcttccagatccttcttattgattgtaatctttccggttcctgggagtaatctgactcttgcaaccgaagattttcttctgcctgttgcctgatactgtgtattagccatcttctattcctcccttcctagaatgtccactcttccggattctgcgcagtgtgcggatgctccggtccagcgtatacctttaacttcttgaacatctgtctgcccagcttgccctttggcatcatgcccttaacagcgtgacggatgatttcttccggcttcttcgcacggagttctctgagagtagtctccttcaggccgcccggataaccgctgtggctcttgtagattttctgctcttccttcttaccggttacacgaaccttctctgcgttgattacgataacatagtcaccggtgtcaacgtgcggggtgtaaatcggcttcttctttcctctcaggatggatgcaacctcagatgcgatctttcccagagtcttgtcttctgcatcgataacgtaccacttacgttctacctctgcaggctttgcaatgtaagacttcatttttcttcctttctacctactcagattgcttacaactcaatcggtttcggcattgcctactggaatctctcgatttggttcggcatactaaaaataaattattagcgtcggagttaccggcacgaggcctgctccttttttgcacacaaatacagtttcgcatttgcaagcctttaaattataatcctccggaggttctgagtcaagggttttggggagtttttccggaaatttgagacggcttaccccggaagggcgccgttcggaccgctctcttttcaaaacttataagaataaatgcaattcgggggtagttttttctcataaaatctgatatactacactgagtgatttataaatcacgcctagcgcccgtagctcaggggatagagtagcacactccgaatgtgaaggtcgcgagttcgaatctcgccgggcgcaccaatatggtatacatggtcggacgcggtattgtactcgtctgatttttatttttagggaaatcgcagaaatgaggtaatatatgtttgaaattctgaaggccgtgctcttcggcgttgtggaaggtattacggaatggctgccggtgagcagcacggggcacatgattcttcttgacgaattcgtcaagatgaacgtctccccggaattctgggacaccttcctggtggtcatccagctgggtgccatcctagcggtggtgctcctgtactggggcgaaatctggccgctgaaaagagttgtcgtggagggaaagcacgccaccaatccccagaaagcaatccgcctggacaaaggtgtcctgaacctttggggcaaaaccatcgtggcttgtcttccggcggcggtaatcggcgtggcttttgatgactggctgaacgctcacttctacaactggctggtggtttccatcatgctgattgtggtgggtgtggcgtttatcatcatcgagaaccgcaactcccataagaccccgcgcaccgaaaccatggcggacatcagttataaggaagcgtttgccatcggtctgttccaggtcattgcggcggtatttccgggtacttcccgttccggcgccaccatcctgggaggattgatgattggcgtatcccgtccggctgcggccaacttcaccttcattctggcgattccggtaatggccggcgccagcctgctgaagcttctgaagaacgggctgctgtacacctccacggaatacgtcatcctggcggtgggcatgattgtggccttcgtggtctccctgttcatcatcaagtttctgctttcctacattcggaagcacaacttcaaacctttcggttggtaccgaatcgtgctgggcgcactggtcatcctgtacttcggcgtgctgcactaattattaagaatcgcttcggcgctgcaaatgcagcgtcgtttttattttggggaacgtaaaaagccgccgatgggggctcggcgactttttactactacgaaattattaattaagaaagaacaattaaagaaaatgcattatggtttctcgctttcggtactctgcatcatttcccttccgcaccattatagtaccacccgtttgtgtagtttttgttaactgaatatatgccttctgtgtgaaccgtctatcggattcttcgcaaacgggccgcctctgccctgcccggaaaagtacccaaatgtgtaatttccattcttttttcccatatgctataataaaccaaccgtataattctcgtcgtacagacaggaggatcaaatgaattataaaattatcggcgactccgatgcgccaatcgtagatattactctcagctccggcgaaaccatcaaagtggaacggggcgctatggcatttatgcagaacgtcagccttcaggcggaaaccaacagcaagaagtccggttttggcggattggtaggcgcgattgcccgcagtgcggtgagcggcgagagcatgttcatcacaaaagcagtcggtcaggcggaaggtgcccggctgggcatcgcaccggcagtaccgggaaaagtggcatgcctcaacgtaggcggcggaaagcagtaccgactgaacaccggtgcgttcctggcttgcgatgattccgtattctacaacatcaagcgccaggatatcggtaaagccttctttggcggcaccggcggtctcttcgtgatggaaacggaaggaaacggtcaggttctgattaatgccttcggtgacctggttgtcctggacatcaccccgaatgcaccgatggccatcgacaatgagcacgtagttgcttgggaagcatccctggattacaacatccgcgtggcttccggcaccttcggtttcatgtccggcgaaggtctggtgaacgaattccacggaaccggcaaggtcatcatccagacccggaacgtgcactccctggcagacgccgtagcgaagtatattccgacttccaacaactaaagctcagtttctttattgaaacctttcagactgcagatacttatcccatgcttttcaaaatggataagtatctgcagtctttttctttttcatcatagcctgggcgccctgttggcgtggcccgacggtggattaaggctttgccggaggggcggcgccaacatgatcggccgccgggcgggatttggggcgccctgttggcgtggcccgacggtgatatatggctttgccggaggggcggcgccaacatggtcggccgctgggcgggatttggggcatcctgttggcgtggcccgacggtgatatatggctttgccggaggggcggcgccaacatggtcggccgccgggcgggattttgggcgccctgttggcgtggcccagcggtagattaaggctttgccggaggggcggcgccaacatggtcggccgctgggcgggatttggggc

SEQ ID NO: 1307 - DNA, 15696 bp, Unknown
  16S sequences of unknown bacteria
aagagcgcggggtccgagccggcaagggcgaggtcggcgtgctcgacgaacatggaccagtcgtaggcggcaagtgcctgcgctgcctcgtcggcaaggccggcctcggatgccaggtacgcggcgagcagctcgcaagtcttctggaattcggcggcgtctaacgtcaccggtgccttcgagaagacgggagcgttgtcgcgatagagctcgaacgcctcggatgccgcgggcacctcgtagccgtcagatgcggctacgaggtcggcccgctgctgctggatgtcaaacaagccctcgaagaaccgcaggcgcgcgttgtcagagcgcgaggcgcccttcgcgtacgcgtccacggcagtatgcacgagcttgagatccatctgctacttttcctcctcgacgttgccttcttcgatttccttgcgggcccagaagccccagtggtacagggcgtcggactcgggaatcttgccgtctttccacatgacgcgcgccatgccgcggtacggctggaacacgcccgcgcccaggtagatgtgcgccaggccgaacacgatcagcaagatgaacccaaggtcgtgcagaagacgcatgaccatgatggccccggcacccgcatgccagacgctcgtgcccagccagagcacgacgccggagacggccatgagcaggccgcacaagatcatgaacccgtcggccacggcctgaccggacttgacctcgtcctggtcgggcatgtggaccttcttggggccgagcatgtagggcacgaacttcttcatgaactcgaagtcctcgggcgtccacttcttgaagtacttcttgcaaaacgccttgaagccctggggggcagtgatcgcgctgatgaccggcaccaggatgaagatggcgccgacgatgcggtggctgacgcgcatggcctgggaaacgcccgggaaggcgttggccagcgccggcacgaacacgaacaggccggaaatcgcaagccagatgcaggcgatcgccacgacgccatgcgtgaagcgggtctgcttggaatgacgcgggatgacgcggtcgggatacttcttgtctgccattatcgctcacctgcttccttgtcgatgtgcctgacaacttcgccggtgtcgacgtcgacctcgtcgtgcgtcttctcgtcgtagtacatctggtcgcgcttgtagcccctgccggtcaggtacgagatgccgaggcctgccgcaacgccgacggcggcgactcccgccagcggcttcgcgacgttctcgaccgccgtgaggacgttgccctcggggtgctcgacgtagctcgggtacatggagatgtcgtacttgagcgctgcgatgcagtgcaggccgcccatctcgtccttgccgtacacgcgcgccttgtcgaagcccttctgcttgagccactcgacgcgcttctcggcgcgctcgagcatctcgtcgcgggggccaaactgcaaagcgcccggctggcaggtgtgcacgcatgcgggttccatgtcgtgcgcgatgcggtcggggcagcccgtgcacttgttgatcttgatgtccgcacccgagatgccgatgccggtgtggcgcgggacatcgtaggggcaggcgctgcggcagtactggcagccgatgcacttgtcgcggtcgaaggtgacgaagcccgtctcgtcgtgctgcaggcagcccgacgggcacaccttgacgcactcggcgtcggtgcagtgctggcaggcgcgctgtccgaacgcccagtcgatgaagtagcgcgagccgtcgcgcttctcctccctgaacgtcacgatgcggcgcgtgttctcgttgatgtcgggcgggttttggtacgtgcccttgaactccacttcatcggagtagatgggggagggcagctcgttccacgtcttgcacgcgacttggcagccgcggcagcccgtgcacttggacgaatcgaaatagattgcgtattcagtcatgcgtatccctcctccttatgctttctcgatgttcacgaggaacgccttggattcctgaatgaagctgttggggtcgccgacgttcgggatgagctcgttggtgaggtcacccttggcaaacgggtgcgcgaagccccagctgtggaccatgccgacggtgtacatcgtgcggccgttgactgtgagcggggagaggcggtcggtgaccatcgcctgcatgacgatggagctgcgcgcgttggtgatgcgcaccttgtcgccgttgccgattcccttctcgttggcgagctcggtcgggatctcgatgtactgatgcgggagcatctcgttgatggcggggcagccgtgggtctcctggcccgtcgaccagtgctcggtcggggagtaggtagtcgccacgtaagggtactcgtcgctcgacgacgtgttgtccttgattgacggatcgtcggtgaacagcatcgtcgggttggagcccgcgccgttgaacgggtttttggccgccgtctcgtacggctcgtaatgctcggggatgggcatgtcgttcatcgcgttgctgaacaggcaggcgttttgctcccagcgcatcatgaacgccttgttgtttggcgggacgggcgtggaggttccgtcggggttcgccttggcagcgacgaagtcgggcacgtcgttcgtgacccacttctcgccgttccactcgacgagcaccttgtcggggttccacggcttgccgttcatgtcgcacgaggcgcggttgtacaggatgcggcggttggccggccagctgaagccgaacttcgggaacaggtagttgttgcccgggtcgtctaagccgcggcgcccgcagccctgctgcgcggggtcgagcggtgcggcggcgttgccgtagtagccggtgtagatccacacggcgcttgcggtcgagccgtctgccttgagcttggagaacgcgtcgagcagcttgggcgtgttgttcttgaagtcgtccgtcgccccgtcggtcgagtagccgttgagctcccatgcgaccttgcgcatgtcgggcttgccgtcgtcgccctcgtagtcccacttggcgttcaagatgggctcggggaagacgccgccttccttctcgtagagctcgcggaccttcttctgcatgaggtagatgatctcgaggtcggacttggtgtcaccggcgggcttggaggcctgctggcgccactgcatgacgcggccggactgcacgacggtgccgctcttctccagcagcgatgcgcaggggaggaagtagcattcggtcttgatgtccttggcgcggtccttcatgtccggggcgtcccagaacgaggcggtctcggtcatgaacatgtcgttgaacacgagccagtcgaggttttccatcacgccgcgcgcgtacttggcgttggcgtgcgactggatggggttttggccccagaagaagtagcccttgatgacgcctttctcgatgaggtggaagacgttggtgagggagcgcgacttggggtcgtcgaccttgggcagccagttgtagccgtagtcgttttcggccgtcgcgttctcgccgaagaaagacttgaggtaggagaccaggaacttaggcttgtttgcccagtagccgtctgccggcgtgttggccgcgcagtagtcgccgatggtcttgtcgcgcgccgcctgcggccactgcaggtagccgggcatgtcgcccggtgcgaggcacaggtcggttgcaccctggacgttgggctcgccgcggagtgcggcaacctgcccgccggggatgccgacgttgccgagcagcagctggatgatggccatcatgcggatgttgccggtgccggagctgtgctgggtctggccgagtgcgtacaggatcgtgcccgccttgccgacctcgccggttgcggtgtaggtcttgtagacgagctcgagcgtctctttgtccatgccacacgtgtcggctacggtatccatgtcgtagcgcgagtagtgcttcttcatgatttggtagacgcagttcgggtcctggagcgtcgggtctttcttcgggttcttgagcgtgggggtcttgaagctcggcacgccgggctccttggtccagctgtaggcgccgttcttcgaggtgtcccactggctttcggactccacctggtagccccacgtcttcttctcgtagctgcgcttctcggcgttccagccggtaaacgtgcccgtctcgacgtcaaagttgaattcggggtcgatcaggtacgaggcgttggtgtagttcaccacgtactcgcgctgaatcaggtcgttttcgaggatgtagttgaccatgccgccgtagaacgcgatgtcggtgccggggcggatggggcagtagatgtctgcctgtgccgccgtgcgcgtgaaacgcgggtcgacgacgatccacttcgcgcccttgtcgacggcgcgatgtacccatttcatggaaatggggtggcattctgcatgattggagccgcatgtcagcaagacgtcagcgttggcgaggtcgccccactgaccggtcattgcaccgcggccgaatgttggtcccagaccggaaaccgttgacgagtgtcaaacacgcgcctgacagtcaagggtgatcgatccgagctccctgatgaacttctggatgaagtagtcctcttcaatggtgcaggcagagccgcccagctgcgcgatggcctgggtgcggttcacctcgacgccgtttgcgtcatagcgctcgaaggtcgcgtcgcgcgtgtccttcacgtggcgggcgatttcctccatggcgtcgtcccacgagatgtcttcccactgggaagagcctgggcggcggaccttggggctgtagatgcggctcgcgttgggaacgagctcgcccgtcttcgggtccacgtactcctcgagctgcatctctgcggcgcccttcgggcacaggccgccttcgctcacgaagtggtcggggtcgccttcgacgttaacaatcttgccatctcgaaccgatgcgaggaacccgcagccacctgcgcagtagccgcagatgctggtgaactcctgggtgttctcgagcttccactccttcaggttgtcgagcgcgaacgccttggactcgccggacagctcgaatgccatcgaacctgcgaatgcaaggccgcatgccttgaggaagcttcgtcttgatagctccatgtaacgcctcctttcctctcagcattgatcaggttgccacacggtttgcggcagtttctcaacctaaaggtgagtttgacgtgttcggtgcgtacgcgtatatcctcgatttccccatcgcagggtgaacggtcgatattctcgatggatgccgattgcgcataagtgcagtttgacgggggctaatgtgtggattcggcagcttcggcgcggcatgccactgggggctggcactgccagggattcctggcgcgggcggctttttcgccactgggcattggcactgccagagatatctggcgtctgccacccagctctggcactgccaggtttttctggtgtcgaacgggctctcgccacccagtattggcactgccagggattcctggcgcacctggcgcggacggcgcgctcggcacgcattcgctgcagacgtccgagcagaatctgccgattccccgtctcaggggcgcggtatgctgtacgcccttgaaaacgagcggtctattggagtgttgagttggacatcatcgaaactatcgcccacgagctgggcgtttcatcgggcaatgtcaaggcagcggtcgagctcatcgacggcggaagcaccgtgcccttcatcgcgcgttaccgcaaggaggcgacgggcaacatgggcgacgtcgcgctgcgcaagcttgaagagcgcctggcgtatctacgcgggcttgccgcgcgcaaacaagaggtgctgagcgcaatcggggaacagggcaagctcacgcccgagctgcagaacagcatccaggctgcggacacgatgcagcgcgtggaagacctgtacaagccgttcaggaaaaagcgggccacccgcgcctccaaggcgcgcgatgcggggctcgagtcgctggcaaatctgattctcgcccaggcaaatgcgcaggcgagcccgctcgagcaggcgtccagatacgtgaacgccgacgccggctttcccacgccggaggctgcgttgcagggtgcgaaggacatcgtcgccgagaccatcgcggaaaacccggacgccgttgcagacctgcgggcatttaccgaaaaaaccgggtcgctttgcgtcgaggcgactgatccggcagagcagggggtctacgaccgctattacgggttttccgaggcgctgcggcgcatccccaaccatcgcgtgctcgccatcaaccgcggggagaaagaaggcaagctcaaggtgcgcgtatccgtggacgcggacgctgccatcgcgcgtctgggcaagcacgcgttccgtcgccgcggtgcgtttgccgatgcgctcgacgacgcagtcgcagatggctacaagcgcctcatggcgccttcgctcgaacgcggcgcgcgtgccgagctgaccgagcgcgcccagcgcgacgcgattcgcgtcttcgcccagaacacgcgcagcctgctgttgcaacggcccgtgcgtggggcgcgcatcatcgcgctcgatccggggtatcggacgggctgcaaggtggcggttctcgacgagaacggcaagttgctcgatcacacgacggtgtacccaacgccgccgcgctcggacgtcgccggcacgaagcgcgtcctcgacgagctcgcgaagcgccatcacgccaataccgtcgtcatcggcaacggcacgggcagcagagaaacagaggaggtcgtgtcggacttcatcgccgagctcgcccccgacatgcgctacaccatcgtcaacgaggcgggcgcgtccgtgtactcggcttccgagctagccagcaaggaataccccgacttggacgtaacgacgcgcggtgcgatgagtctggggcggcggctgcaagacccgctgtccgagctcgtcaagattccgccggcatccatcggggtcggtcaataccagcacgatcttagccaggcggagcttgggcgcgcccttgtcattgtcgtcgaggacgcggtcaacagcgtgggcgtgaacctcaacacggcaagtgcgagccttctggggtacgtgtcgggcatcacgccgacaatcgcccgcaacatcgtggcattccgagaggagaacgggccgttcaagagcagatcgcagctcaagaaggttcccaaactaggcccgaaggcatttcagaactgcgcagggttcctgcgcgtcccgggtggcagcaatcccctcgacgcgaccgccgttcacccggagagctacggcgtcgcaaaagagctgctcgcgcgggtgggggtacccgcctctgccctcgcgaaaggcggcgttcccgggatagcgggacgtgtgggagacgtcggcacgctggcacaggagctcggctgcggcgagcccacgctgcgcgacatcgtcgccgagctcgagaagtccggacgtgatccgcgcgacgacgctcccgaggtcgtgttcagcagaagcgccaagagcatcgacgatttgagcatcgggatggagctgacgggaacggtacgcaacgtggtcgacttcggcgcgttcgtcgacatcggggtcaagcaagacggccttgttcacatctccaagatggccgagcgcttcgtccggcacccgagtgaggtcgtgtcggttggcgataacgtcaccgtgtgggtgacgggcgtggataaggcgcgcgggaagatctcgctttccatggtcaagggcaagtagcgcctcgggtgctgggcgcttggcacgcaatcgcgtgagaccgctgcaagcgcaggtctctgcgcgtttgcggttcccgtttgaggcgatgggtataatcgaggacatgaagacgcaatcaaagacactgcctctgtggatgtaccgcgcgctgctcgtgctcgccgccgccatctggggtctcgggttctccattggaaagggggccatcaccctcgtcggggcgacgtggttcacggcgtttcgcttcctcggcgcggcggtcgtgctcgctctcatattgtggccgcatatgcggggacatctcgaccgcaagctcgtgaaggcgggctgcatcatggggcttgtgtcgtttctcggcttctggtcgcagttcatcgggctcgagtggacgacgccttccaagaacgcgttcctgagcgcgtgctattgcattaccgtgccgttcatctggtgggtcgtgtcgcgaaagcgccccaatggccgcgttatcggcgcggcgctcgtctgcgcagtgggcatcgggctcgtgtcgctcaacgagagcctgtccatcggtctcggcgatggcgtgagcattctgtcggcgtttctgtatggcggcgagatcgtggtgatcgggctcacgatgaaggacaacgacgtcctcaccgtgacggtggtccagcagctcgtcgcgggaatactcgccctcgtggtcgcgatggtggcgcagccctggccgagtgtcgaggtgctcgcctcgcctgaattcctcggagccatcgcctatgtggtcttggggtctgccgcgttcggagccatcgcgcaaaacgttgcccaaaagcacatcatgcccgcggaggcgggactgctctgctcgctcgagagcgtgttctgcgccgcgttcggggcgctgttcttcggcgaggtcatgactcccaagatgcttgtcggcttcgcgctcatcttcggagcgatcgtggtcgtgcagctccatcccaacgatcccgcctcctcgcgcagagaatagctttcaagcgtttctaccgattggcgaggagacccgtcatctccgcgttttccctccggagcgaagcgcagacacaagaaagcccgcatgcgagtcgttagctcgcatgcgggctgcgtgctattggcggatgccggatctatctagatgccgccccttacgcgtgggtgcgggtgcgtcccttgctaaagctgcgcttgcgcccgttgggacggctgctcgggcgcccgttgggccggccgttggagcggctttcaccgtagccgtttcctttgctgcggttctgggagcgtccgcccttgccaaacccgttgcccttgctcttgccgccctgcgcatagcgacgggcgccgtttttgccatggggcttgaacgagcggctcttgcgcttgccctcgtgcttgctctcggcgttgggcgcggcctgttccttcttctttttcttgggctcgaggatcgtcgggtcgacttcgaacgactcgaggggcatgatcggcagcttcttgtcgatgagcttctggatcgcgttgagctcgttgcgcgactcgcgcgtggagaacgagactgcaaatccgtcgtggccagcgcggccggtacggccgatgcggtgaacgtagtcctccgcggcgtcggggaggtcgtagttcacgacgtagtcgacgtccgggacgtcgatgcctcgtgcgagcacgtcggtagcgaccaggatgttcgtgtctcccttcgagaagcgcttgaggatgcggcggcgcaggttctggttcttgtcggagtgaatggattcggcgacgaagtcggcgtcgtgcagcagcttggcgcactcgtccgcgcggcgcttcgtgcgcgtgaagacgatgacgcgctcggcgcccatctcgttgagcgtcgcctgcagcagctcgggcttcttcttgttgtcgatgggcagcacgtactggttgacggtcgcggcggtctcgccgtggtgcgcgatctcgatcatgaccgggtcgttgaggaccttgttgaccttgcccatgacgctgtggtcgaaggtcgcggagaacagcgcggtctggcgcttttcgggcacttcctcgaggatgctctcgatgtcgggccaaaatcccatgtcgagcatgcggtcggcctcgtcgagcacgagcacctcgatgctggacaggtcgacgacgccgcgctcgcgcaggtcgttcaggcggcccggcgtggcgatgaggatgtcgatgccgcggcgcagctgcttgatctggggaccgtacttggtgccgccggtcacggtgagcatgaagtgcttggtctggcgggagatgggcaggcaggcgcggccgatctgctctgcgagctcgcgcgtcgggctcacgacgagcatacgagggcccttgcccttctcgtagtggccgagcttgctcagcgtgggcaggaggaacgcggcggtcttgccggtgcccgtcgccgcggcggcgcagacgtcatgacctgcgagaagctccgggatagcttgctcctggacgggcgtcggggacgtgaaccccatcttctcgacggccttgagcacaggcgtggacagaccgagttcggcgaaagaaatcgtcatgtgtaaaaacctcttcaattgtatgtgcgtgttcgcacgttgttgagtttccccgcgcaaaagacgcgcggtcgcacctgcatccggcagcgtgcattttgctcgacccgagccgcttccttgaatcgagcttgcggctcgcagcgcatgagcgccgtcaacgtgtggtgttcgccgaccctgcatatgagcttgcggcgaatccagtaaggtgatgaacctaagaaagaatttcgcgaagaacgcacgccagtatgaagcaaacggcggcaaaaggaaagccccgaattcgattcacggattctccaccgtacggaaacctgccatgggtggggcgctttgcccacggcaggcgacaaggcgaagctgctgggcagcgccagttgttcgctgtgggaaacaatatcgcgacagagcgttgcacacgcagcaactacagtatgatgaagaccacgcgcacggctaaatgtgggccgcgcgcatccgttcaggcaatagagaaggcacgcgaggcaagttggctaggttcgcaaacgatatgagtcaaaacagtgcacccgttctgctgagctccctcgagctcggcgattcggcaaagatcaggttcgttgggggagaaggcgcgcttcggcagcacttcctcgacatgggcatcatccccggcgcggtcatcacgttcgagaaatacgcgcccatgggcgaccccatgcagttcacggtccacggctacgagctcacgctgcgcgtcgacgacgcgaagcgcatcgaggtcgagccgctcagctccgccgaggcgagccgccatgtctccgcgttcgaccccgacgacacgagcctcgagatcgaccaccccggcttgggagagggcggcaggttccatcgggaagacgaggcaaagccgctccccgaagacgccgtgctgcactttgcgctggcgggcaaccagaactgcggcaagacgacgctgttcaaccagctcacgggctccaaccagcacgtgggcaacttcccgggcgtgacggtcgacggcaagagcggcacgatcaaagggcatcccaacaccgacgtcgtggaccttcccggcatctactcgatgtcgccgtactccagcgaagagattgtctcgcggcgctacatcctcgaggaaaagccgcagggcatcatcaacatcgtcgacgcgaccaacatcgagcgcaatctctacctcacgatgcagctcatggagctcggcatccccatggtgctcgcgctcaacatgatggacgagatgcagggcaacggcggttccatcagggtcaacgagctcgagaagatcctgggcattccggtcgtccccatctccgcgatacgcaacgagggcgtcgacgaactcgtcgagcacgcgattcacgtcgcgcactatcaggaggggcccggccgccaggacttctgcgacgtccacgaccacggcggggccgtgcaccgctgcctccacagcatcatgcacctggtgcaagaccatgccgaggcggccgggattccgctgcgctttgccgccaacaagctcgtcgagggcgacgagcagatccgcgaggcgctcaacctccagcccaacgaggtggaggcgatcgagcacatcgtcacgcagatggagcgcgagcgcggactcgaccgcgccgccgcgattgccgacatgcgctactcgttcatcgggcgcgtcgtgtcgcagacggtcgtcaagccccgcgagagcaaggagcacgagcgcagccgcaagatcgaccggatcctgacgggcaagtggacggcgattccctcgttcgtcctcatcatggcggcggtcttcttcatcaccttcaactggatcggcgcgtttttccaagacctcatcacgcagggcatgacctcgctttcggaggcagccgacgcggcgatggagtccgcccagatcagcgacgcgctccgctcgctcgtggtcgacggcatcttcgccggcctggggacggtcgtgtcgtttttgccgctcatcgtcatcctgttcttcttcctgtcgctgctcgaagacaccggctacatggcgatgagaaagatcggcctgtccggccgcagtatcgtgcccatgctcatgggttttgggtgcacggtcccggccgtgatggcgacgcgcacgctgccgtccgagcgcgatcgcaagctcaccatcttgctcaccccgttcatgagctgctcgacgaagatcaccatctacggctttctgaccgcggcgttcttcccggggcagggcgcgctcatcatggtgtgcctgtatttcctgggcattgccgtgggcattttgacggcgttcgtgtcgcacaagaccgtgttcaagggcgatgccgtcccgtttgtgatggagctgcccaactaccgcatgccgagcgcgaagagcgtcgggcatctggtgtgggacaagaccaaggacttcctcgtccgcgcgttcacggtcatcttcatcgcgacgatcgtcgtgtggttcttgcagtccttcgggacgagcctcacgatggtcgacgatcccgagaacagcctgctcgcgattgtggcagggtggatcgcgccgctgttcgcgccgctcgggctgggggactggcgcatcgtcacagcgctcatcgcgggcttcatggccaaggagaccgtggtctcgacgctgtcggtgctctttggggcagcgacgctcgcgagctcgctcacgccgctggcggcgctgtcgctgctggtgttctgtctgctgtacacgccttgcgttgccgcgatctcgtccatcaagcaagagcttgggggcaagtgggcgctcgggatcgtggtgttccagtgcgctgtcgcgtgggtggtcgccgggatcgtcagggtcatcggcctgctgctgggtttctcgtaagatcgtgaccttcacgcccctcgcgccccgcgttctctgcgcgaaaagagtggcactgccacacatctcacgttatctgcacgaaaacggtggcactgccacacatcccgcgtttgctgcacgggaaacgtggcactgccacacatcccgtgcggggtgtgtgcagctgactaggcgacgagcttgccgagcagctggtcgacggcggtgtagtcgatacgtccgctcgtgttgctcacgatggaaccatcgcggtcgacgacgatcgtcgtcggaaggtactcgatggaaaacgccatccccatcgactgctcggcgtcgtagtagaccgggaaaccgtagtcgtggtcggcgatgtaggcatccgccttctcccgtgtctcgcgcctgccgtcggtggcatccaccatcacgaatctgacctggttcccgtacttctcgaagagcttctggtagtcgtccatctcctcgacgcagttgggacaccaggtcgcccagtagttgacgattgcgggcgcaccctcgcaaagctcggcgagggcacgcgcgatgccgtccgcgtcgtagaccctcacgtccccgtagtcggcaagggccttattcgtcgacgtctgtgccgattcgaccgtggcctgctgcttttcggccgccttcggggaaagctgcccataggcggcaaacgccgcaatcagcagcaggaccagtgcaaatgcaatgactactccccgtttcacgacgacctcctacaagctcagcatgcccagccacgtggaaaaccaacccgtggccatgagcactccgacaatgacgagcaacgcgccgcacacgatgttcacggcacggtagtgcgatttcacgaaggacagggcgccgcccaggtactcgatgagcagggcgcagagcacgaaggggatgcccagcccgagcgagtaggcaagcagcagcccgacgccgtggagcatcgagccctgcacggacgcgagcatcagcgccgagcccagaaacgtcccgacgcagggcgtccagccgatggagaagaagatgccaaagacgagcgcggagaaaaacccgctcggggtctttgacgatgcaggcttgagggtgcggtcgagcggcgagatgcgcacaagtcccgtgaagtgcaggccgagcacgatgacgatggcgccgcacacgacgttgagaaccgtctgatgctgcgagagcatcgcgccgaaggtcccggcgaaggctccgagacagacgaagaccgcggtgaacccgcagacgaacccgagcgcgttgacgacggtcgcacgcgtcgccttgacaccggcgccgacggcggcaatcgtctcgttgctgctccccgcgaagtacgcgaggtagatgggcagcatcggcagcaggcacggcgagacgaaggtgatgatgccttcgagaaatgtcacgaggtaatccatgggagaaatcttaccggctgggcatgggaaaagctgcgtgggggactgtggaaagtcgcgggcggcgcgggcgggaggtgcatgcatctcagctggggcgatccttgccgcgcattcgcctgccaaaagaacgataatggagctgcacggcgaaacacgaagaagagtccacatgccagcccgaaacgaaaaaggccccatcttgattatgcgggcctcctattttgaacccaccacctgggcgttctggcgtgctctcataacctgcttctgcatctgctgcctgttgggacacgcgctcgagctcccgtactgcagcagcatggacgccctgttcgacattgtcgaagacgactacgccgtcttcatcgacccctggtacgtgccgtattgggtgtacgggttcggcgcgctcgggatgacctttgtcctcgagccgctcaaagagcgcatcatcgcgcgcagaaagacgctcgtcggtgcacttgccgagatgttcgtcatcgccgtcttcctctcgatggcgatggagcttgccttcgggttgctcgtcaaccagcccgacgcgacggggacgtatccctattgggataactccaagctgccgctcaacatcctccagcaggcgtggctcgtcaacgacgtcttcatcggacttgcggccatggtgtacctgtgggtgatcttcccgttcgtgagcgctgggtactccgcgctgggtccacgtcgcgcgcgcattgccttcgcgctcgtcatcatgttcttcctgggctgctgcatcgcgaccgcgtgctacctgctgaggtaggggggcatcccgcacgcaatcgcgtccttgcatgccgcgcaattagacgagcggggcgagcaggacctctcccgtgaccgagttcgcgccggccgagagcagtcccggc

SEQ ID NO: 1308 - DNA, 6053 bp, Unknown
  16S sequences of unknown bacteria
catactctttctaccttctttccttacaggcacttattttttcggactgcggtgctttgcgaggaagttgttgatacggtcagacggattgagcaggtcactgatcgagccatcgtgatttaaggtatcgatcagaagtgcgatgtatttgctcatatcgcatccggtgtagtacggcttctccagaagctcaggcgcctggtagacaaggtttgtcgtgagcatcgcgtggaacagaccatcttcataggcacggtcaaatttttcaaaaccgctggtgaacagtccgaaggtcgcacagataaagatccggcctgcgttgcgcttcttcagctcgcgtgcgacgtcaatcatgctgtctcctgaggagatcatatcgtcgatgatgacaacgtctttgccacttaaatcagatccgaggaactcatgggccacgatcggattgcgaccgtctatcacgtgtgcgtagtcgcggcgtttgtagaacatacccatatcgacaccaagaatgttcgccatatagatcgcacggctggcagcgccctcatccgggctgataatcatcagatgatcggaatcggtctgaatgtccggatgaactggtagaccggctggatcgtctcaaagccgtgcagagggatcgcattctgcacccgcgggtcgtgtgcgtcaaaggtgataatattttccacacccatttttacgagctcttgcagggcgagtgcacagtccagcgactcacggccattgcgcttgtgctggcggctctcgtagaggaacggcatgatgacgttgatccggcgcgcttttccgccaacggctgcgatgatgcgcttcagatcctgaaaatgatcgtccggagacatgtggttcgtatattttccaacggagtaggtcaggctgtagttgcagacatctacgagcagatagagatccgcgccgcggacagaatctttgatgacaccttttgcctctccggatccaaaacgaggaacactggcattgatcagataggagtcccgtgcgtaggtgcgcagctgagggctgtccagatgctcatgctcccgttcctttctccattcgacgatgtgggcgttgatcttattgccgagcgcctcacagctcttcagggaaatgattccgagttcaccgaccggaatcgtttcaaggttgcgttcataaccagattggaattccattttaatcctccgtgtttgctgacattttacgaggttattttacccgcaaaacatggtttggtcaaggcatcgttttgcggggggacagttttttctgaatccggatgtcgtcaccgaagagccgcagcatctgataattgctggagatgcgggagaagatgcgctctgaatatgtgtcggcaaacgtaccaagcgtcaaattcgtggagatcagcgtacttctgcggcgcaggatccgttcattcaggatcagaaaaagctgtgaggagacgaaagagtttacaagctctgtccccaggtcatcgatgatcagaaggtcgcattcaaaaatgtgctgctgcagttcttttgcacggtcttctgaggaacggccgaaggtcgtttcagcaaagcgttcgaagagccggaaagcagaaaaatagatgacggaatgggcgctttcgatcagttcctttgcaatacagtgtgacagaaaggtctttccgagtccggtgttgccgtagagaaacacattttcaaagctgcggtcgaagtcctgcacgaaacggcggcattcggtaagggcatatctggcacagtcccttgcgctgagtccggtgacaggatcagtctgctctgcagaataatagtcaagagagaaggcagagaaggtttcttcttttaaaagctccttcagattcgactgggcatagagcagatctaaagtggcctgccggaagcagtgacatttttttgtgccgatatatccggtatcctgacagtccgggcaacggtaagtcatctgcagataatcagacggatatccggcggaagtaagaatctcgctgcggcgttttgagagtgcggtgatcgactgctgcagtgtggctacggcgtccttacctgcaggagtatccgagagcagttgtcttgcacaggcagtgcttgccgaggcgatcttccggtcgatttccgaaaattccggaaattttccgtagatctcttcctgcctagctgagagttcctgctgatcctttgcctgctggcgctggtagtcccgcataattgtatcatattgtgtgtttgtcaatcccataatttacctctcaggtgtgctgcccgagcagctgcttttccagtgcggtgtaatcatagccgcgctgcgcaaaattgttgaagcggttgccctgcggtgtatcctgctttttcatcgcctgcttttgctgctgttcttcttcacgctcctgatcaagcctgcggacatccgacagcgatgtgaccttgttctttttccagcgctgcagaattttatctgcatactggaagcttggctggtgaatctggctgatcgtacggttacaggcctccaggatcacctcaagcgagaatgcatagtcattgagccagcgtgccatcagttccgtctcaggtgcagccggactgcgccccttgattccgaaggcattcagaatcgtgtaatagttcttattataagagctggattcctggcgggcctgtgcgactgtagagatcccggattccgcccatgaaagtgcgatcttgcgcatgtagtggcggctgaaggtccctttggagacgcagtattcgatcaggtattcaatcaggtccggagaaaattttaacgtatcataataatagatgaattcagactgctcggaggagttcagagggcgctgcagatactgttcggcaatgaagaagagctggcgcacttctttttgctcactaagcgccgcgagctgctcccggctcattacggcggcaggctccggctcttttgcagcggctgcttccttctggcgtacttctgtcgctgcggcgtatccgatcatgcgctctgtcacgcgcccaagctccggggaagcagctgtagcagccgatgtgcgcaacgggtcggcttcgggtggtgcctcctcctgcgttgtgggcaggtcggagaaggtgatggagatcaggtctccgtgagtattcattttgagatgtacaagatcctgcttttcccagtagagcagtgcacgacggatatcattttccgtatgctccagcacatctgcgatcgaagagagcgagagctcacggccggtattggcacagcgcagaaggtacagatagaccttgacaaattctccgttcgcctgtggcatgtactgatctataaacgtattttttacgactgttacgccttccggagtatccgtgtaaattttcataattgcattcactccctgattatgtcaagcggtagggtattcccgcgagcactttacgttttgagacgccctgtaaagcatgcagggcgctgcctttaagtatagcatatccgtgaacaaaagagaacagcaaattcagtgaggaatgcggattcaccgttgtggaaagagaaaaagtgcataaagtggacaatgtggacaacctgcgaaaacggttgacgataataggataaaaaacaggagaaaaggcaaaaaagaaggaaaaatgtcaaatacttatgtaaattatattttccacaaaaaaatccacatgccggtgcacggaaaatgtgcataagcatgtggatagtgtggataactacattccaagcagattttctccaatttttacaacgtctccggcgcccatagttatcaacagatccccggggacacagttttccagaagaaaattctcaatttcgtcaaaggtgcggaaataccaggcatcttttcccattgcagcaagacgcttgcggatatcatctgagctgatgccgagcgtatcggtctcacgtgccgcataaatgtcagcgagtacaattttatctgccagtgaaagcgcctcggcgaaatcatcaagcagcgccttggtccgcgtgtaggtgtgtggctggaagacacaccatacatgcttgcatggaaaattctttgccgcgcgcagggtcgctttgatctcggtcgggtgatgtgcgtagtcatcaataatcgtcacgccaccaatgacgccttttttctggaaacgtcggtctgtgccgtggaagctcaagagcccatcggccatgacggaagccgggatgccgagcagatcgccggatgcaagtgcggcgacggcatttgagacattgtgctcacccggaacagaaagggcgaaatgtccgagcatggtgccttcctttacaagatcaaagcttccgcatccgagctcatcgtaggagacattctgagcctgatacgctccggaatcgatgccaaaggtcacgatacggcaggaaagaccgtccgtgatctcggaaaggttcgggatagcggcattgatgataagagtaccgtctgccgggagctttttggcaaagagacggaaggagtggcggatatcatcgagatctttaaagaagtcaaggtgatctgcatcaatgttcaggataatagcctgtttcggatacagagaaaggaagctgttcgtatattcacaggcttccgtgataaaattgtcggaatggccgatccggacgtttcccccgatcgacggaagaatgccgccgactgagatcgtcggatccatatctgcgcccatcaggatatgggagagcatggaagtcgttgtcgttttcccgtgtgttccggatacggcgatcggcatcttgtagttctgcatcagctctccgagcagctctgcgcgggttagcatcgggatattggctgctttggccgcggcaaattccgggttgtccggatgaatagccgctgtgtagacgacaacatcgatgtccggtgtgatattggctgcgctttgcggataatgaatcgtagcgcccatgccggtcagccagtctgtgagcggagattctttcgagtccgatccggataccgggaagccacgcttcagaaggactgctgcaagaccgctcatgctgatgccgccgataccgataaaatgaatatgtacaggtatttcataatttatttgatacatagttttagtcgctccttttaggttggttgctgctgtttaaatccagttatacaatatccattatacacatattttttcaaaagggaaagctcgttttccggatgggaggaaaacatattggatgattggcaaaataacgaaaaaaaggtgctgttttggtgagaaacgaaagttattttcgtaaataaaaaggatggtgatagcaaaaatgcacaaaaaatagagaaaaaacaagaaaactgtcgcacatatatgatagcgttgtgaaacctaaaaaacaggaaattaagctatttatgataaaaaaataaaaaaaattaacaaaaacttgtaaaaaatgttcgctatttacgaaacatgtgttataataaacaagagcaactattcagaaccgtacagttcacacatttgtacgcattcaggaatcgtttcgaaaaatatacttcaaggggtgataccgtggttaaaaaagagatgatcgctatgcttctggccggtggccagggcagccgacttggggtactgacttccaaagttgccaaaccggcagttgcatttggaggcaagtaccgtatcattgattttccactgagcaattgtattaattccggtatagatacagtcggcgtgctgacacagtaccagccgcttcgattgaatacgcatataggaatcggaattccgtgggatcttgataaaaatgtaggtggagtgactgtactgccgccgtatgaaaaagtaggaaagacagagtggtataccggtaccgcaaatgcgatttaccagaatctcgcatatatggagtccttcaatccggattatgtactgattctttccggtgaccatatttacaaaatggattatgaagtgatgctggattttcacaaagcacacaatgcggatgtcagt

SEQ ID NO: 1309 - DNA, 2849 bp, Unknown
  16S sequences of unknown bacteria
gtagaggaggatacgctatgcagataaaacacgtggatgtggcgatcatcggtggcggcccggccgggctggcggcagcggtttccgccaaggaacagggtgcggacaaggtattggtgctggaacgcgataccgtgttgggcggcattttgaatcaatgcatccatgcaggatttggcctgcatacctttggcaaggaattgacggggccggaatacgcgctgcaatacatagaaatgctgcaaaagacagatgtagaggtttggctggataccatggtgctgtccattggacaggatcgttccattacgatggtttccagcgaacagggattttgcaaggtacaggccaaggccatcgtattggcgatgggatgcagggaaaggccgcgtggcgcgctggccatcccgggcacgcgcccggccggcgtatatgcggcgggcacggcgcagagaatggtaaacttggagggcttgctgcctggcaaggatgtcgtgattttagggtctggcgatattgggctgatcatggcgcgcagaatgacctttgaaggggctaaggtgcacgcagtttgcgaactgatgagctattccggcgggcttcagcggaatattgtacaatgcctggaagatctggatattcccctgctcttgagccatacggccgtgaaaatacacggcgaccagcgcgtagaagcagtgaccatcgccgaggtggatgataagaccaaaaagcccatccagggaacagaacggaccatcccctgcgatacgctgcttttgagcgtaggcctgctgccggaaaatgaattgagccaggcgctgggcgtagcgctttcgcccgtcactggcggcccggaggtggacgattcgtttatgacgtgcgtagagggcgtgtttgcgtgcggcaatgtgttgcacgtgcatgatcttgtggactttgtaagccaagaagcacagcaggcaggcgccaacgctgcacaatttgcgatgacaggccgaaaagaaaacgccgatgttcagatgcaggcgggtgccaacgtgcgttatactgtgcctcaacgcgtaacagcagggcataaggtgaagattcgattccgggtaggcgcgccgcagaaaaaggtggccattgtggcaaggcaaaacggaagcgtattgaaaacgcagcgccgccctgtggtagcacctggcgagatggaaacgctggcgctagatctgagcggcgtagcggcggaaaacgggccgattacggtgtcgattgaggaggcatagccatggaaagaaaactcatttgcgtacaatgccccatcggctgccatttaacggttacctatgatggggtgcatgagcctgtggtaacgggcaatacctgcaaaaatggagagatctacggaaagagtgaggtgacggacccgcgccgcacgctgacgacttctgtgcgggtaaaagggggaacggtccctgtttcggtgcgcagcgcgcagcccattcccaaagcggtactgccgcagtgcttggagatactgcacaagacaatgctggaaaagggaagcaaagcaggaacggtggtcgtgcccaatatcctggatactgggatcgacattgtgacaacgcgggatgattggaattaaaacaaaaagaaaaaagcaggcatagcgcctgcttttttgttttcttatttggccagatcaaaaatcttttccatatcggccggcgttaattttacaaagaagccatcgttgaaattggccagctctttgatatcctcatccttgacgccgagctcggacagggaggtgggcatgccgagcgaagcaaagtaggctttgatgcggcgaatgccttcgagcgccacttcttcggggtggaacacgtcgttgtccacgcccatgaccttggtggcaaagcgtacaaagcgcggcacatcgtgcttgtaaacgtactgtgcccaggcggggaagatggtggccaggcctgcgccgtgggcgctgtcgtatttggcgccgatgcggtgctggatatggtggctggcccaatcctgctcacggtctacgccgcagatgttgttgtgtgcgagcataccggcccacatgatctgcgcgcgggcattgtagttatctggctctttgacgcagacgatgccgtatttgaggatggtacgcatcagcgcttccgccaattcatcggtgatgtctacatcccttgtattggtaaaatagcgctctgtgatatgcacgaacatatccgtgaccccgcaggccgtttgataggcgggcagcgacatggtaagctcgggattcaaaatgctgagcacagggcggatggcctctgaacgcatcatttcctttaacccctgcgcttcatgggtgatgacggcatcccagctgccttcagagcctgccgctgcgatggtaaggatgcatgccacaggcagggcggcctgggcagtctttttatcgatgaaaaaatctttccagggatcgccatcatacagggcgccggcggcaatgcattttgcggtatctatgacactgccgccgccaatggccaaaacaaaatccacctgctcgcgtttgcagagggctatgccctcctgcgccagctcataccgtggattgggctgtacgccgctgaggctgacatagggcaggcccgcttgcttgagcgaagcataaacccggccgagaagcccagatctctctgcgctccggccgccatagacgaccaatactttttggggcgtataagggtgcagatacgatccgacattgttttcttcgcctttgccaaagacgaactttgtgggagaatgaaagacaaaattcagcatagaaaaacctcctaaatgaa

SEQ ID NO: 1310 - DNA, 7975 bp, Unknown
  16S sequences of unknown bacteria
aatatcgatatttgcctccgtcagacggtcatgtacccgttccagtgtccgccattttacatcccagtaatcagcagctttcacccatggacggatcaggatcgtaattccactgtctcccagattatcaacagcaacggtccatgccgggtctttcagaatcttatcatcctctgataaaatgctctcgatcagtgcttttgccgctttcaggtccgagccataggccacgtctacgctcatatccacacggcgggtctcattggcagaaaaattcacaatattgctattggacaatgtaccgtttggaatgaccacattgcggttgtccaccgtatgtaaagtcgtacagaacaaggagatctctgcgaccgttccttcacagccacaggcattgatataatgtcctacctgaaaaggcttcataaccagaatcagaatgccgcctgcgaagtttgagagacttccctgcagagaaagaccgatagcgactcctgccgatccaagaatcgtaataaaagaggtagtctgaatgccaaaatgtccaagcagtgacaatatcagaaccgtccatgcagagatcttcaccagtgcatccagaaactgtaccacaccggtatccacatttccacggagaagcgtcttcttcagaaactttcttaaaatactgatcagttttaatccgacgatcagaataagcacagcccagacaatattcatgcctgcgtccagaaatttgggccacagtctttcaattacttttgacatcgtcgaaacatccatatttgatacgtcaatattttccagattatccatttgattatgctccttctatgctttatgaaaatcgatccagaaaatcctgctcagagatgatctccactcccagatcttttgcttttttattttttgatgaaccagacagcagatcattgttaatgagataactggtcttggaggtaacgcttcctgttacctttcctcctttggactcaatcagttccttcaactcgttccggttggaaaaatgttccagacttccggtgatgacaaatatctttccatccagcgtctgttctccttcaggctcctgattctgctccagttccagttctttcatcagatcgttaagccaccgattatgctcttcatctttgaagtattcttccacactggcgccgatcacaccgccgatacctgcaatcgcacttaattcttccgccgttgccctgcggatcttctccagatcatttttatattccttacagatcatttttgcattggaaagcccgatattcgggattcccagactatagatcactcttggcagcgtggtatgtcttgcctgctccacactgttcatcaaattattgtaagatttatctccaaatccttccagagtcacaatttcatcccggtaacggtccagatgaaagatatctgcatactcccggataaatccgcagccaataaatttctccagcgtcatctcagagaggccatcaatattcatggcatccctgctcacaaacaaagtaaatgccttgatctttttcgcctgacagtctggattcatgcaatacagtgactccacatcattactcttgatgatctttgcctcaccgccgcacaccggacagacatccggaatgatcagattgccgctctgtgtcaggttctctgcgatctgtggaatgatcatattcgctttatagaccgtaatgtgatctccgatgccaagcttcagggcccttacaatactgatattatgaaccgatgctctgctgactgtggtgccttccagttctaccggctcaaagactgccaccggattgatgagtcctgttcgggacggactccattcaatcttctcaagcactgtctcacgaagttcatccttccatttgaacgcataggaatcccttggaaacttggctgttcttcccagggactgaccataggcaatatcctcatatgtgcttaccagaccgtccgatggaaaatcattgtgtacgattgcctcggaaaattcctgtacagccttcggaatacccgctccggtcacttttttatattccaccacatcaaagccctgttctttcatccataagaactgctgctctctggaattgtggaaatccacaccgtcagctttcaccagtgcgaatgcgtagaaatagacatttctctttgccgtgatctcattattcagctgacgcactgaaccgctgcagagattacggggattcttgtatttcgctgcttcatcggcaatctctgcattgatcttttcaaaatcggaatatcggatcaccgcctcacctcgaagaatcgtctcgcctttatgggcaatgttcagtggaatattccgaaataccctggcattgttggtgataacctctccgatctctccatttcctctggtgacagccttggagagttccccattttcataagtaagcacaactgtcagtccatccagcttccaggacagcaatacttcatgctcccccgcaaatgctgccagttcatttacatcctttgtcttatccagagacagcataggtgactcatggcgttccttgggaagctcatccaccgcctcataaccgacagtcactgtgggtgaacctgccagcacggttcccgtctccttctccagtgcctccagctcgtcatacagcttatcatattccagattgctcatgatttcctgatcctgctgatagtacgctcgggaggcatttctcaaaagttcccccagctctctcatacgggcaatcttgtccatcttattctgctccttccgtctctgctgtctctgctgcttctgccccggactcttccagcagatacagaagctcctgcagttcttcctcggtcacatttctccaggtgccggtcttcaagtgtccaagacggatattcatgatccgggtccgcttcagctcctgcacatgataccccagttcgccgcacattctgcggatctggcggttcagtccctgggtcagaacaatagaaaatttacgttttccaagccgctgtacctgacatggtctggtggtcacatccagctcttttaagtagacacccgctgccagatcgttgagaaaacgatctgtaaatggacggtctaccaccacctcatattctttttcatgataatgggctgcccgcatcatctcattgatcaggtcaccacggttggtcataagcagcagaccctcagaatccttgtcaagtcttcccatataagtgatccgcttaggatactgcaaaaactcgataatattggtgtcatttccctgatgcgcttctgagcagacgattcctcttggcttatttaccgcaatcagaatggttttctgctttttctcacccactgcttttccatctacggttatctgggcatgttcatccacctgcatacctaccgttgccggtgtgccatccaccttcactcttccctgctcgatcagacggtctgcttctcttcgggaacagacgcccgcttcacttaaatatttattcaaacgtaacatatatgtaatcctttctttgatggcggcagatctcttttcactgccgccatacgctcttgattataccaaaatatgtcactgattaccagtctatcttacttcagatatgctttcagtttttcgatatttttctcctcaaagtctgcgatttcttttgcgatctcgcaatattcccgtgcggcagtccggttttccttgaccgtcttcatcagctctgtcatgcctttggtatttccctggatcatcatatctgccagtttttccgtactgtcatccatcagcgtattcatctgaataccgccccacagcatggtcttgtccaccacatgatcccgcggcggcgtctcatgctctctggcatacatctgctgcagtttctcctcaaactgtagaaaacggcaggcctgacgattcagatccagtgccagatcctcatcctctaccttgccgatcaccatatggattgcctcaccggccatccttgtattctggaaactctcatccagcaccgctctgtctgcttctgataacataaaaaagctcctttccctcgtaatcaatactagggtatggagctttttatcattctattctttttttactattccaggaactctgtcttcacatatccagtctgacctttgtactcaaccttactccagccattgtcataagactcgatctcggtgattgcatcaccctgataagccagcgcaattcgatcagaatcagttgttgcatcggaacgaacattaacgctttctttcacacgggtctcacggttctgtgcctgagcctctccagtctcaacactttcctcctgagtctcctccggctgttcttccgtggtctcttctgcagcagcttcctctgtctgctcttcacctgcttctgcctcatcactttcagaaccagtagtcactttttccataaaggttctcagtgcctcatcgttctccagtgcttcctgatagcggctttgcatatccgcatacagtgcctttacttccggatcttcctcaagctgcttgacataggcctgaagttcttcgtcttcctccacattgctgtaacggatataacgactgccatcctcatccttcggtgtcacatacagacactgaatatccggaaccaatgtctccaccttcaggaaatccttcagtttgatatcaaaacacaggaacacaatgtaggaatcctcttccggaccatcctttgtgtagcagaccatattctcataagagtcatatgcagtcgcacgggaaacaatcttggccttgtcctcatcggtcagctcatctgtgatcgttgccagtgtatctgtatctccgttgataatacagtccagatattttgtaacaagacgctctatcgaagcatgagtgttctcaatcagctcattcgcgtcttcctccgttgtctcattcgttgcacctgttgttccctctgcagcatctccggtcttcgttgttccacatccagttgtcagtactgctgctgttgcaaaaacagtcataccggtgatcgtgtactttttgtacatctgcaataattctttcaggttcttcaactccataagcatctccttttattatttttgaatataaaaaatgcacctgacaagattcgaacttgcgacaccgggcgtcggaggcccgtgctctatccagctgagctacaggtgcttggcttattacctcaactatcatacaccatgttgaggaaataagcaaatgttttttgtaatatttttgtaataattttataaacagcacagagacaggcagagacataacaagcagaccattcaagtttacttgaaatgggctggttttatggatctatggggcgagagccccataatgagcaaaacagtaagcccgcagggcggttttgcgaattgtctctgggctgttttcgttcccacacatcagcaaaacagtaagcccgcagggcggttttgcgaattgtctctgggctgttttcgttcccacacatcagcaaaacagtaagcccgcagggcggttttgcgaattgtctctgggctgttttcgttcccacacatcagcaaaacagtaagcccgcagggcggttttgcgaattgtctctgggctgttttcgttcccacacatcagcaaaacagtaagcccgcagggcggttttgcgaattgtctctgggctgtttttctccccgggttattccgtttatttagaattctatccgatctttctgcgcattataataataggcatgatcgctgagaaaatcttccgcttctacacactggctgttgacctgccttaccagttcgtccagctctttgcgctcataatccaccttgtccggcagaaggatcagttcatgaatactgctgggcagaatataatagcttccaccgatctgccgggcacagatgcggcgcacctgagaatccacaaacacagccgcaccaaattccggctttttcgtattcagaatatacatttctgcatccgggcattccacctgatctcccaggaattccgtcatggcgaccatgcggaatcctcgtctctgcagattcttctttgcccgttcaaagagctggtcttctgttattttccaacgttccatatgagctgtccggatcagggcagtggcatttttgatcaattttcccggaatctccatataaaacacgattgccagatccatccagggaatccatggaactgtcttcagaaggtcttcattcttatttcgggagatcaggcgacaatagattctttttttcatcttctcataatccagaagcatctcgaaatcaccagtctgatacagcatgctatccctctggatcttcagaaccatcgctgccagcgtacacagatcctcctttgtcacatcttccctgaaataatgattcacgtacaccgtcggctgctcccggtgtccttccatcacacaggaaaatccatccagctgtactccattatttttcagcacctgtacccgtttgatcgtctcctcttctcttctctgcacaaaaatagccttctcaagcccacttaaaaattcttcatatgtcatatatttcctttcttttctcaatatcgtctcttctgggaactttgtgtcgaactgacacctgaacgtattatatctgttattcagtgtacttgattttttctggtctgccaagcatttttctgcataaaatacttaaatttttataaaatatttcccatctgccatagatcgatcacctgcctgagtctccattccagatcgatcttcttcacttctgacgctgtatacacagggaacagatccacaatctgcccattaatatagtaggccacacttcccaccagttctcctgcctgtacaggcgctttcaggatatccgggaccagcacctccatggtaaattcatcatcctctttcagcaggaaatcttccaaagccgcatcggtcaggatctccaccttttctttctggccatccatcacggatacgggctccaatgccatcctgtcacttcccaccgtctccttatgataatcctccagaccatagttcatgagtgcctttgtatccatccatttccaggtcttatggtttggccagccgcaggccagcaccacagtgatcagccgtttttctcccctctccagcgctcccacatagcagtatccggcttcatttgtaaaaccggtctttccggtcaaagctccctccatcatctgtaaaaatgcatttttattctgtaccgtaaagcttctgtttccgtccatatctgtaaatgtccaggaaggctctctggtgatggaaagaaatgtctcattttttatacaacagcgcatgatccgcgccagatctcttgcagttgtggaatgtttcccatgttcgtcctctgcatcaagcccatttggtgtaataaaatacgtgtgatagcaccccagatgctttgccttctgattcatcatggccgcaaaccctcccacagttccgcccacatgctctgcaatggccaccgcagaatcgttatgagattccagcatcagtgaataacacagatcctgcaggcgatacctctctccttcccgaatatgtaactgcacatccggcatggatgccgcccttgcggacacttccacgatctcatcaagatctgcatgctccagtgtcaccagaagggtcatgatcttggtcgtacttgccatgggcataacttcgttgtcattttttccaaaaagaatacgcccggtatccgcatccatcaggactgccgaccgggcgtatagattttccggtgtaccttccgcctgtactcttatgcttatttccatcataagaagcactgtcagaacacacaccagatatggtttccatttttttcttttcttcatattcaagccgcctgcacattgccttgtttcaatct

SEQ ID NO: 1311 - DNA, 3351 bp, Unknown
  16S sequences of unknown bacteria
tcgagccggcgtacttggcgagccagtcgcgcgtggccttataggtgtcgtagtcgttgagcgcagcgcgcgaatccgggtcgagcttaccgagaaactcgagctgcgtgttgagcgtcgaggttatcgtgtcggcacgctgctgggcctgcttttcgagcctggcgatcttgtcgacctcgtcctgctgctcgtctagctgcttctcgagttctgcgcgcgtgcgcttgacctgcgcgatcgccccctgacggtcggtggcaatgttttcgagcaaatacaggcgcgaggcgaagtcgctgaagtttgcagagcccagaaggacacttgcgtagtcgacgttgccgttcttgtagatctccacgagcgtcgtgtcgaggttcgcgctcgccttgtcgtaggcctcctgcgcctgctggacgcgctccttggtctgcgcgaggtcggactccgcctgctcgcgctgggcgctgatctgctgcaggtcctcgtaggcagtctcgagctttgccgtgagagacgcgatgtacgcgaccgtgctctgcgccggcttcgatggggttgtctgctctgcgggagctgcggagtcgtctgttgcggcgggggttgcccacgcgccttgtaccgatatgcacgcgcatgccacggcgcaggcgagcacggccgcggcaagacgccgcgcggcgttacgaacctggaacatgagagatgccagacgactactcgtcgaggaacttgaacaccatgtcgaaggtaccgatctgcacgcgcgacccaggcgtgagctccgcctggtcgacgacctccccgtttacccacgtgccgttcaacgagcccgcatcggtgatgcttgccttgggaccgtcgatggcgatggtggcatggtggcgcgagacggtcatgttgctcaggaacacgtcgcatttcgggtcacggccgagcgagtaggaaccctggcccaagacgaagtgctcgccggcataggggccggagacgacctcgagcgcgggctcgcccaggggcttttccgcaggcacgtctgcgacgtcgagcgagacgggattgaatttttccgtgcggccgatcagcctgaagccgcagcgcgggcattcggtctgccccttctggagcggctcgttgcagaccgggcaggcaaatttagattcttccaaagcgtaaacctttccgttttcgttttgcgcaagtgtagcacccgcatatgacaatacggatactcggtcgaggggtttgtaataatttcaggaaactcgtcgcgcggggtgccttctcccccgcgaaccggctctaccttgcgagcgcagcagcgcccacgaagccgccttccggccgcaggtacgcccccagcccgcactcgagcgggtttgcataggcagcgtcgtgaagcgccgcgcagtgctgtcccgcctcgtcgagacggcgctcgagctcctcggggtactcgacgttgagctcgggatcctgcagcaggaactcccccatctgcgcggcgaaggcgcgcgggacgaacagcaggtaggcgggagccgccggaaccccatagcaggcagcgtcgaattcatgcacgagcgcggggagcgcgccgcccgcagcttctgtcagctgctcgaaattgcgcgagatggtcgagccgtacatgagcagcaccgccatcttctcgctgtcgtcttcgagggagacatcgccgaagaccggcccatcatcgtcggtgagctccgaatgggcagagagccattcgaacgcctcttgcccgttatcggggcttgtcatcatgagatactcgtcatcgccggtacgcatcacgtcgacgaggtcgatggtctcggcctgccccgtgagcagcagcccctgagaaaagcctccaagggacgcgagcggctcgagggcaccggaaaacatcgtcgagacgaagcgcgccgcacccgatcctgagattctgaacacgccgcacccgctcaggtcgcagacgtacgagccctcaatggcagtatccacgaaagatcatctcccgaaatctatgcaaccgacgcgttgtaggcggcgacgtatgccctgatctgcttctcgagggcgctgtcgatcgactgcccgtacgagcccgtcgccttctcgaccgcggtcgtctgggcgtacaggacgctttccgcgatgcacttgtcgcctgtcgccaagccgatgaggcgcacggtggccgtccacacggaggtccacggcatgggggcgcccacgttctccttggcgacgagcggcgccgacgcgatgaccttctcgccctggcgccaggtgatcgtgcccaccttctggccggccgagacgccgtcgctgatgtcgacgaggcgcacgtcgaccgagatgtccccgtcgaaatcgaggaccatcgcgttgacgtcgtcggcaacgcccgccttgaccgtgcggttgaggtacccgctcatcggggcatccacgagaacctggtcagaggtcgccaaagtgtagttgcggtagtgcgcatacccccagtcgagcaacttgtaggcgtcgatgaagcgctgcgactcgtcgctcgagcccaagacgacggcgtagagctccaccccgtctttgctggcggcggccgcgaggcactcgcctgcatggttggtgaaccccgtcttgatgccgatgcagtcgtcccagacgccgagcagggcgttcgtggacatgaacgtcttctgctcgccgccgaggtcgagcgtgacctcggactgcgagacgatggagcggaacgtgtcgttgtgcatgccgtagcgcacgatgacgctgatgtcggcggcagacgagtagtggttggcggaatcgagcccttccgggtcctcgaagtgcgtgttctttaggcccatgtcggctgccttctggttcatcatgccgacgaacgtgtcggtatcgccaccgacaccttcggcgatggtgatcgcgcagtcgttgccggaatgcacgagcatgccgttgagcagcgtctcgagcggaacctgcatgccctctttgagccccgtcgtcgactcgccgatgctcgcggccttcttggagacggtgaagacgtcgtcgaggttggcgttctcgagcgcgacgatggcggtcatcgtcttggtgagcgacgccatcgcagaatgcgtgtcggcagagcgcgaccacaagacgttgccctcggcgtcgcagagaatcccgtacttggcgtcgatggcgggcgcttcggtgatgttgaggccgcggtcgttgaccgccgtgaggccgacgtagtcgtcgccgttgatcgaggcgagcgcgcttgacggagcaacccccgcaagcgctgcggccagcgcgcatgcgagg

SEQ ID NO: 1312 - DNA, 9290 bp, Unknown
  16S sequences of unknown bacteria
aggccgcgaagcggctggaggcgcgaggggcgcacgaagcgcgcgccctgtgggcgaagcagcggagtaagcccaatgaggtagggagagccgcaagcgagcttgcgagcgatgcggaacgaccataccgaattgtggaacacgcccaaagggcgtccgcagcgccgaaacaccgcccgccgaaggcgagggcggtgcgaagacacggaacaccgggccgctaaaggcggcacggtgcgaaggtgcggattgactatgccgcactgtggaacgctggcggcgttagccgactaaggggttattttgcgcacaacccgcgcgttttcttgccacaaataaagaaaaagccggaatttgggctgattttaatacgccaaactcccgctctcgcagtttatgatagtactatagcagaaaaatcagaacttgtcaagcatttgcgaggaaaaagcagaaaattcgcgcggaagggggaattcccgcaaacgaaagcagccgccctcgtttgcgcaaaaagggcgcgtatggtacaatatccggtgcgcagtggaagcaaagccgcgcctctacaggcgcgcgagaaaggggtggcaaaatggcgcagattgtgttgcagcatgtgcgcaagacctatcgggtttcaaagcggaagccgggcatgctcggcgcgctgaagggcgcgttcacgcgggagaccacacagatccgcgcggcggacgacatttccttttcgattgagccaggggaactggtgggctatatcgggcccaatggcgcggggaaatccaccacggtgaagatgatgagcggcatcctggtgccggacgcgggcgaagtgcgcatcctaggccggattccgcacaagcagcgcaaagagcacgtgagccacatcggcgtggtattcgggcagcgcagccagctttggtgggacacgccggtgatggattcctttcacttattgcgcgatatttatcgcgtgcgcgaaagcgattttaagcggcggctggaagagttgaccggcatgctggacgcgcaggcgctattgcatgttcccgtgcggcaactctcgctgggccagcgcatgaagtgcgaattgatcgccgcactattgcacgacccggaaattctgtttctggacgagccgaccattggcctggacgcagtaaccaagctgaacctgcgcgcctttttgcgcgcgcacaaccagaagggcgtgaccatggtgttgacgacccatgacatggacgatatatccgcgctgtgctcgcgcgtgatggtcatcggcaaggggcggctgctattcgacggagatatgggagaaatgcggcggcggtacgcgcccgcgcgggtgatcaaggcgcgctttgaggcggatgtcgcgccgtttgcgctggaaggcgcgcagagcgtggagatggacgggcgcgcggtgaaggtgacctttttgcccgagcaggcgcacgcggacgcgctgatcgcaagcctggcgagccgcggcagcctggccgacctcaccgtggaggacaccgacgtggaggaactggtggcggatatgtacaaggagatggacggatgaaagcatacctttccattttgcgccagcagatgattgggcaaatgcaataccgcgcgggattttgggcgggcatatctacgcacatcttttggggcgtggcgcgcgcggcaatcctggtagcattttatctgtatggccagggtgaggcggacatcaccatgcggcaggcggtttccatggtctggctgcaacagcttgcgggcgtgctggtgcccggctggaatacaaacgccgatgcggctttgtataaccagctccgtacaggggacgtggcgtatgaactgctccggcccttggacgcctatacgcactggtacgtaagatcgattgccggccggatagggacatttctgctcgaattggtaccaatactgggaattggcttgctcgtgcccgaaccgtggggcctgggcgcgcccgcttcgcccctgcacgcgctggcctgcctgttgacgctgctttcgggcgtgttcacttcctgcgcgatgattcttttgagctatgccatgctgttggacgtgcgcgtgggagacgcgccctcgcgcatggcggtgacagtggcgcaaattctctccggcctgtatttgccattgcagctttggccggaggcaatgcagacctttttgtattatcagccgttcgcgggcatgctggatctgccggtgcggctgtatgtgggcgcgcagccgctcgcgcgcgcgggcgaaatcgtgctgttgcaggcattttggacggctgtatttgtgctggcaggacgcgcgtggatcggcaggagctttcgaaagctcgtgatacaggggggttagcgatgaatggcgtgcggttgtatttccgctatatccggctgcattttctttcgcaattgcagtatacgctctggccgatggcgctgctcaccaccgcgctgttcgtggccaccgacccgctggacgcgctgctcatgttcgaccgcttcggcgcaatcggcgaatggacggctagccgcatccttctcatgtatggcatggcgctgttcgcctttggcctggcggaactgttcgcgcgcgggctggacttttttccgcaattggtgcgcggcggcgagttcgaccggatgctgctgcggccccgctcgctgctcttgcaatccatggcgacgcgcttccacctcaaccgcctcgcgcgcgtggtgggcggcctggcgctgctcatcgtttccctgcgcacgcagggcgtcgtgctgggcgcgatggaccttgcaatgcttgcgctggccatcctgggcggagttctgttttacatgggcgcgtttctgctggcggcgggcgtggcgtttttcaccattgccagcgtggaatgggtgaatgtgcttaccaacggcagctatcaggcgctgaaagtgcccccgcaatacctgccgccctggctgcgcggcgcgatcacttttgtgtttcccatcctggcgtatgcgtattatcccgcctcggccatctgcggctggggcgaaccctacgcgctggggtttgccgcgctgcccgcgggcgccgcgtttttcgccctgtgctatgccttctggcgctttggcgtgcggcactacaagagtacgggcagttagcgcagaatccaccacagcgcgcacagcgctgccaggaaggcgagattggccaatgtgaaataggccagatagcggccgcgcgcttcgggcagggcaagggaaatgcgcttaaaggaaatcaggctggccatggaggcgatcagcgtgcccaggccgccgaggttcgtgccaatcacgagggataccgcgtcctccgtgaagccggagagcagcagcgcggcgggcacgttcgaaagcacctggctggcggcgatgctcacgggcacttcccgcccggcgagcacgccgcgcaggaaatcgctgaacgcctccatgcgccccaaattgccgatgaacacgaaaaagcccgcgaacgtaaagagcagcgcgtagtccacgcgcagcagcgcgcgccgatcggcgaggagcatgcccacgagcacggcggcgacggcgatccacacgttgagcacgcgcgcgaccgcgcacaggcacagcgcaaagagcgcggcctgcacgccaaagcgcgctttgccgtaagaaagcccgccggaaaaggacggggcctggatgggccgcggcttttgcaaaatcacaaagagcgcgagcagcagcgccgacagcgccacatagggcagcgtaaccgtgaaaaacgtgcccgcgcccagatgatagcgcgaatacagatagaggttttgcgggttgccgatgggcgtggccatgctgcccaggttggccgcgatggtctgcatggtgaccacgggaattgcgcgccgcgtgagtcccgccatgcccagcgcctccagcgcgaagggcacgaaggtgatcagcgccacgtcgttcgtcaccagcatgctggcaaagaagcacagaaagatcagcgcggcttccagctggcggctggtgcccgtgcgcctgagcagccattccccggcccggtggaacaggcccgcgccctgcagggcggccatcacggccatcaggcaaaagagcagggcgagcgtgcgcgtgtccagataatccgcgtaggccgcgtccggcggcacgaaaatggcggagatcagcgccagcgcccacgccgccgcgagtaccggttcccttttcagccatgccagcagtttcattcgcatccatcttcttccatccgttgataatcaaagtctgttacatgccgcgcgcggtgcgttcgatgaccatattctgccactcctcgttgagcgtcacaaagcgggcgttccagcccgatacgcgcacggagagcgacttataggcctgcggattttcacgggcggcgcgcagcgcgtccgcgtccatgatgtcgatctgcataaagaagccgcccagcgccacaaaggcgtccatcagcgccaccagcgcgtttgcgccattttcgccccgcgcgagcgcggggagcagcttcacgtccagcgccgcgccgcaggtcagccggcccaggccgagcttgcaataggagcggatcagcgcggtggcccccgcttcgtccgtgcccggcgtgggcgaggcgttgggcgcgagcacatcgcccttgcgcgcgccgaacggcgtggccgcgcggcccggcgcccattcgatctgccggccaaaggtgctcacgcccggcgggaacaggatgggcgattcgccattgtgccccagcaccatggcggcaaaatcgtccagcagccgggcagtgtaggcgtccgccgcgtcgtcgtcattgccatagtaggtataacggttgagcacatactgccgcagcggctcatggccctcccagttggcgcgcaggatggcgcgcaattcgtcgagcgtgacgcgcttttcgcgatagaccagccggtcgatggccagcaggctgttgcccacgtccggcgcgccgccgatgtgcggcgaaatcaccgtgtagcgcggcccgccctccagataggagcgggcgttttctacgcagccctcctcaaaaagggaaaccacgccgcagggcagcgcctctttccagcggaaattcccccgcccgtccgtttccaggcgggcggcaatggcgcccgcgcagatggcatccaccttcgcgccaaggtcgcgcaggtaagcgcggtagagcgcttcaaaatcgccgtacgggagcggggtctcctcgtccacgcgcagggtgtcgtgcagaaaaatggccagcgcgtcgaagggcacataggaaaagcaggttttgcccggaatttgcacttcccaacacccgtcgttggcaaagcgcagcgcttcctcgcgcgaatagccaaagcgcatgaggctatccaaaatgagcggctcgccatacagggcgatcgcgccgccgccgtgccggatggcctccgccaggcggcgcttgaacggcgcgggcgtggcggggttcagccgcacggtgatgggaaaatcgccgatggccaactcttccacgatgtccaccacgagataggaaacggcgttggtcacttcccgcccggtttcatccagcccgccgaggacgatgttctggtagtgctgggcgtcgcccgaaccggtgggcgtttcgctttcgatccattcgcagcccttgatgaagagcgaggccaggatttcgcgcgcctcctcccgcgtgagcgcgccgcttgccaaatcgcgccgcaaaaattcgcccagcatttcatcgatgcggccaatgcccggccaattgccgcacagccgcgtgaaagcgaacaaaaaccacagcgcctgcaccgcctggtggaaattttcgggcggttcgaagggcacgcgcagcaggaggttatacagatcgggccgcgtttcgcgcgtggcggccagataccgcccgtgccagacgcgcagggcgtcgacggcgttttgcaaactggcgaggaaggcgcgctgccgcgcgtcgagcgccgggtcggccgcccgctcgcggatttcccgctccacggcgttcacgcccagcttcagcgcccggtcgaaacccagcgtcaaatggctgatgctggggaacgccaatttccctccgcgcatggcgggcacgttgtgcgtgatggccgcgcccagcgtggccgcgccgcacacgcgctcctggggcgtaacgcgcaggggcgcgcgccgcgcgatttcgcggatggccgcgtcgtattgttgcacaggcgaaagcgcctcaaacccttccacgccgtccaacgatacggcccagtggcgcatggcctcgtcgccatattttccgttcagggattccagcgcgaattgccgcgtggcctcgcacaggcgcacgggccttccctgcgcgcaaacgctgtaaaacatgccgccatcctcctttgccgcagaatgccgccggcgattgtttcccaatgattgtatcatagaatggttgccttttcaatgggaacggcaaaataatgggcgcggaacggcgcaggccctataacgccaaaaggtcaggcggcgaaaccgcatgtttcgcgatttcgccgcccagaagatcgcgggttattccgcggattgcaccaaaattcccgccccgttgcaagcctgccaacgtaaatttccgcgtgcagaaagctgcccagtgctcctatgcttgtgcagaccccataaagatttgcgacaggggattttttcctgccattttgtggtatataatattggaaacagggaatatggaggaatgaatatggcaaaccgcattgtgctcaaccagatcagctaccacggcaagggcgcgattgaggaaatcgcaaacgaggcgaaggcccgcaggctcacgaaggcctttgtgtgtacggatccggatttggtgaaattcggcgtcacgcagaaggtgctcaccgtgctggaaaagaacggcctggcctatgagctgtattccaacgtgaagcccaaccccaccatcgaaaacgtgcagaccggcgtgaaggcattccaggcctccggcgcggactacatcgtttccgtgggcggcggctcggccatggacacgggcaaggccatcggcatcatcgtgaacaacccggaattcgcggatgtgcgctcgctggaaggcacggcagccaccaagaacccggccgtgttcaccatcgccgtgccgaccacggcgggcaccgccgccgaagtgaccatcaactacgtgatcaccgatgtggaaaagaaccgcaagttcgtgtgcgtggacacgcatgacattcccgtggtcgccgtgatcgacccggatatgatgtcctccatgcccaagggcctcaccgccgccaccggcatggacgcgctcacccacgccatcgagggctatatcaccaagggcgcctgggaaatgacggatatgatgcacttaaaggccatcgaaatcatctcccgcgagctgcgcgccgccgtggcgaacacgcccgaaggccgcgcgggcatggcgctgggccagtacatcgcgggcatgggcttctccaacgtgggcctgggcattgtgcactccatggcgcacccgctgggcgcgctgtacgacacaccgcacggcgtggcgaacgcgatcatcctgcccaccgtgatggaatacaacgcgccctgcaccggggacaagtataagtacatcgccgctgccatgggcgtcaagggcacggaaaccatgagccaggaagaataccgcaaggccgcgatcgacgcggtgcgccagctttccaaggacgtgggcatccccgaggacctcaaggacatcgtgaaggaagcggacatccccttcctcgccgaatccgcctacgcggatgcttgccgcccgggcaacccgcgcgataccagcgtggaagaaatcgcgcagttgtaccgcaagctgatctgattccggccgcaagagaggccattcaaaagcgaatggcctctcttcgctttgcgcgctgaaaattttttccgtttgggatgggcggccggcagccgctgggaggcatggatatgtggctcgttttcgcgtttggctccgcgctgttcgcgggtgtaacgtcgattttggcaaagtgcggcatccgccagacggattccaccgtggccaccgcgatccgcacggttgtggtgctggccttttcctggctgatggtgtttgtggttggctcgcaggatcagcttcgcgcactcgatgcgcggacgctggtctttctcatcctctccggcctggccacgggcgcaagctggctgtgctattttaaggcgctgcagctgggcgatgtgaacaaagtggttccggtggacaaatccagcacagtgctcacgattttgcttgcggccgtgctattgggcgagggcatatcgctggcaaagggcgccggcacggtgctgatcggcgcgggcacgattctgatgatcgaaaagaagccgggaacggcgcaaaacggccccggcgggcgctggctgctcttcgcgctgggctcggcggtgtttgccagcttgaccgcgattttgggcaaaatcggcatcgaaggcgtggaatccaatctcggcacggccatccgcacctgcgtggtgctcgtgatgtcgtgggtgatggtgtttgtcagcggaaaacagcgggaagtgcggcatatcagccgcagggaaatggggttcatttgcctctccggcctggccacgggcgcgagctggctatgctattaccgcgccttgtgggatgggctggccagcgtggtggtgccggtggataaattgagcatcctcgtcacggtgctgttttcctatctcgtctttcgcgaaaagctttcgcgccgcgcctggctggggttggcgggcgtagtagcgggtacgctgctgctattggtatagcgcagatgcgccctgccaaaattgcgcaaaaaagccgaggaaccaaattttcccgttcctcggctttttgctggtctgggtgagaagattcgaacttccggcctcttgaaccccattcaagcacgctaccaaactgcgccacacccagttatcgtcagcagggtatagtatacacccgcccgagccatttgtcaataggtctaaaaaaatttttccccaatttggggacacaaagaaaaacccagccccattcgcgcggacagagtattgacaaagccttggaaaaaagaggttctaatcagaaatgacggcgtgtacgtcatttctggtatttttcgggagcaaatgcttgca

SEQ ID NO: 1313 - DNA, 5096 bp, Unknown
  16S sequences of unknown bacteria
gcttcatctccgcgtcctcgcgctggagctggcagaagcccgaccctgtcgagaggaatgattttctgccccatgacaacgccgtttttgtcgttgattataaagctgtttctcacctgcgccgaatggaatttccgtatgttttcggccgcctcctcaagcacggcgataaactccggctcgacggtctcaaaggctttgtcgatttcctcctcggtgacgacgagagaagaaaaggtcacgccgtcaaatttttcgcagtattcaaaaagtgccttatcaccattcgttttgacgttttctataatttcggccaccgtttcttccacgtttgccgagagattttcccttgaaaaaagctcggaattttccacctcgccgtatttcataatgctaatcacgattttccacctgccctttaagactgtcgcaaagcctttctatttcttcggttttaaagcggaaagccgccttgtttgctataaatctcgcgcttatgggaacaaccgtcgcttcaacctcaaggttgttttccctaagggtggtgccggtttccacaatgtcgacgataacgtcggaaagtccgagtatcggcgcaatttcgattgaaccgttgagctttattatgtcgatgtcgcggcccatttcgccgtaatatttttgggcgatgttggggaatttggtggcaacgcggagagttcgcccgcttttgtcgcgaaagcctttgggcgccgcaaccgccattctgcactttcccatatcaagatccagcagctcaaaaacctccggctcatattccagaagaatgtcctttcccgcaacgcccacatcggccgcccctctttcgacataaatcgacacgtcggagggcttgacccaaaaatatcttactcccttttcggggttttcaaaaatcagctttcggctgttttccaaaagctcggggcagggatagcccgctttttcaaacattcggtataccttttcaccgagtctgccctttggcagcgcaacgttaagcatagtcccgctcctttcaaagttcgattttttctttgtatttaagccgttcgggcacatttttctgtgccgagaccgtcttgccgccgttcaccgccgacttgattgtttttataagctcgcttttgtcggttttttcaccgtaaacaatgagcaaatcaacgtcatattccggctcgggctgttcaaaaacttccagcaggtcggcataaaccgcaaagcccacggctcccgactttttacccatttttttcataaggcggtcatactgcccgcccgaaagaacgctttcgggaatgttttcaagatagcccttgaaaacaaagccgttataataattcatgtcggaaacaatggaaaagtcaaattcgattttatccgaaaaatccgaattttcaagaagattcgacagctccttaagctccaaaagggctttttcggcatttttcccaaggccgagctttgaaagccgttcaagcacctttttcctgtttccgtgaatttcggtgaaggccgcaagggtttttgccgccgttttgtcaaggccctgctcctcacaaagcttcagaatatcgtgggaatttttttccgaaacaagtttcattatcttaaaggcaaattcatcgtcggcaccgaaatcggaaagcaccgccgaaagcacgccgaggtgggaaagcccgaaaacaaagctttcgtccacaagcgaaagagcatgagccgcaatatccaccgtttcgtatatatcataaaggtcgatgtcgccgatacactcaagaccgatttgcgttatttccttaaatcggtgggtgctccccgacggacggtagaccttttcgtcatagcaaagcttggttttgattccgggcgcgtcctcggtgttttttattatcgaaagggtgacgtcgggcttgagcgcaagcagcttgccgtttgtatcgttaaaggtgataaccctgtcgctgacaagaaaatccttgttttttgcataaagttcgtattcctcaaacttgctcattttaaagggcaggtatccgaattcggtaaaaaggcggcggaatttttgagaaaaagattcggcgcccgacgggaagttatttatcattttctttgctttcctctctttcgattttcgaaagcacggctttgtatccgccgttgccgtattcaaggcatttgctgacgcggcttatggtggtggtggatgcgccggtcgccttgctgacctcgctgtaatgggctccgtcataaagcatttttgccatttcaagacgttgggaaatatccaaaagttcctttatggtacagacatcttcaaagaaaagtcggcactcctccatgctttcaagggaaagcaccgccttaaaaagctgttcaacctcgggggtctgccatgcactcattttgtttacctcactttactactttatcacggtagagcattattttattgaattatagcaccgccgccccctcttgtcaataccaaagagaaaaaatatcccgcaaaagaaaaagaccgaagccttttcagacttcggtctttttaaagtttcgtttgcactccgtcatttgacgggcgtatcacttaagagccaaaattatttggatttcttggtgataacgaaggctgctgccatagctgcgcagagaacgccggcaactgcaactgcagaagcatcggagctcttggggttggcagtattggtgccggtggtggtgccgccggttacggtgcctgcaacggaagtagcagcggtggtctcaccggtggtggtagtagtggtggtggaagtggtgggatcaacaatagaagtggtgggatcaacaatagaagtggtgggctcagtggtagaagtggtgggctcagtctcggaagcaacagcaataccgccggcaacaacgttaacgtttacgggacgaagagcgttggagaggaggtctgcagtatcataagcggagaaatcggagaagttaacggtaacagcagcattggtagccttaagaaccttaaacttcagagcatagaaaacgccgcccttgctctggccgttaaggatccagccgagctctttgccgttttcagcagtagtagccttcatgttaggcttggggatgttgttggtctcgtcggtccagccgatgaactcaagagcctcggtgtcatagtcaccaacggtggccttgaatgcggcatagccgaactcaacattgtcgctaaggcttacgtcgaggataacttcagatccgacatctgcctcagtaacattgacggtagcgacagtagcggtgacattctcttcaccggctgcgaatgctaccgaagcgaagcaagcgatcattgcaacgctcaaaacgattgcgagaagctttttcattttgattcattccttttcaaaaaatttagattgggcatctctaacgagattataatacacggaaattcaattgtcaagtgaaaagtttcaaaaattattgaaaacatagaacatttgacaaaaaatctccgagattatcgggaaaacttaatctttttacagattagtcttcggagatggcttctacgggacaggctgcctcgcaggcaccgcaagaaacacatttgtcggcatcgattacatatgtatcttcgccttccgaaatggcctcgttggggcaggtatcagcacagctgccgcatttgatgcactcatcgctgattttgtatgccattggaaccgcacctccttgtactgtttgaaaggggagtcttcgaaaagaacactacccactctctttattgcattgtatcacattttttcgcaattgcaagcttttttttaagggaaagagtctttattttaccaatttactcggttaacataattttttgagggaaattttacaccgaaaaaccttacattataatatataactctattccgaatcgtcggggagttccttttcttccttttcggcagacttatgccccgggcggccgtggagcggacggatttcccgacggttgaaggtctctaccgtcgtctccccgtccttttccagcgacaccttgacgtcgcccttcaaaaggtcgaccgactcgacggttccgacgcccgaaggggtttttaccgacgcgccgactcggggacttattttgtgaagatattcataggcgttctgctcatatttcaggcagcacataagccgcccgcaggttccggaaattttcacgggattaagcgaaagattctgttcctttgccatttttatggacacgggctggaaggcattcaaaaacttcgaacaacagaattcccttccgcaaattcctattccgccgagcagcttggcctcatccctgacaccgacctgacgaagctcgacccgagtgtggaaaaccgaggcgagatcgcgcacgagctcgcggaaatccacacgtccgtcggccgtgaagaaaaagattatcttgctgttatcgaaggtgtattccaccgaaatcagcttcatttcaagcccgtgggcggcaatttttttgctgcatattccgaaggcttccttttcctttttgtgattttcctcaagatgagcaagatccttttcgtcggcaattctcacgacctttttgagaggaatttcgaatccctcggagatttcggcattttccgaggcgcacacgccgcattcaagcccctgtgccgtctctacaatgaccttttgccccttttgaacggaaattccgtcggggtcaaaataatacgactttccgccgtctttaaatttcacgccaattacaacaggcattttttcaactccgttatcttataagttcggcgcaaagcaccgtcaaaagcaaattcattttgggattttccttaagtcttgccgccgttttttcacaagaacgatagcattcggcaagccttttcgaggtcatggccccgcaaagagcgtcgacctcggcggcatatccgaaaatttcctccgccgctccctcttttttcatatatgcgtcgcgaaaaactccgcccgccgtcacaatcacatcggcaaacgacgcaacatccttttcgaagggcataaccgcctttaaaaagccg

SEQ ID NO: 1314 - DNA, 3717 bp, Unknown
  16S sequences of unknown bacteria
tggagggggtggcagtggcgggggagtttactcccccgtccaccagcttgtcaaaaaagtcttttttgacaagctgagcgtcgcctaggaaagcgcggcgatgatccgctccatggtttcgtagctgggcatggagacggcttgcgcaatggtggcggcgatgtgctccacgccaaagcgctcgagctgctctaccgtgccggacacgtccgtgcggaagccgtgtttttcccaggcgaggcgctgcactgcgggatccatcaacgcgtcgatgcccgccgcgcccgcctcgtccatggcgatgtagatgtgcaacgaccacacggtgggcgcgggatagaccatcacaatgcggtctttgaggatggcccaatcctcggggttttccaccgcgaattccaaaagctggttttcgtaggcggcgatgagcggcttcgcgcccatgcccgtctttaagaactggtcgaacaggtcggcggaggaggattccatatagcccagcttttcaaaaatggctttcaggcgcggcagcaccgctcccacgctgtcctcgtccgccacgccgcccaccagcacgttggccaaaagccccgcgaacatgttgccggaattggagcgcacggggtcggtggtattcaccgccaccgtgccatacagttccgcaaggcccaaatccgcccactttgtgccctgctcgatggcggccaccagcgcggccatatccatgtagtagcagccgttctgttcggcgaccatgccgcaatccaaaaacgcctccaacacgggctggtaggtatacagcaccagcggcgtgttgaagatgatctcgctcttggcgggcgagccgcacacctgctgatagtattccagcgcgttctggctggaagggaagaggaaatcccggcccgcgtgatccgccgtgaccatgtccagcgaaccggccttggcgtagtccaggacgaggtgatggtcgcgctcgaggatgtcctgcacttcctcgtcttccagcaggccgatcttctccccgcccacatagccgcgcaaccgcacggtttccgggccgctggtgagcagcagatacacgcccaccgccgcgatgaccagcagcaaaaggatcaggccgattcgtcggcttttgtttcccatgtcaatccctccgtatgcaaaagctggctcaccaccgccatgtccgcttccacgtcgaaccgctctgaggccatgagttgcgtccactgctcgtcaaagccttttttcagcttgggcagcagcgcgcgcaccttgcgctggaaggaaacgatttcatcggtggtcaggccggtgttctggaattgcacgtattgcgcgagaatgcgccccaccgtgtccagataatagctcaaaaactggtgcgccgcgggaatcttctccggcttttcgcacagatagcggtacattttttcgcccgtggccgtcaggtcgagcgccttctggcgcgtgggcgcgtcggcgatctgcccggccgcgcggcgcagcgcgcgcagatcgttttccgcctcgcgcatcagcgcggtcatctgctcgccatccgggcggctggtaaagaacgcggccacgcggtccggcttgggggtgagcagcagaaacagccccacatacacgcccacgcccaccagggcgctgaaccaaaagttccagcgcacgcccagcgccagcagcataaagacgccgccgcccgccaatagagaaaccatcagttgccgagccgtctttcgcttcatcagttgtacccctttacgctgcggaacgcgcccaccaggtcttcgcggccgtcgaacacgcgcgcgttggtcgcctgggccagcgcctcgagctgggtggggtccgcgtcgccaaacatgatggaaaacacgggcacgtccaggcccaggctttcgtattcccgcaagaaatcctcggcgtccccgctggacacgccgtccgtgagcaggatgatggctggcgtgtattcctccagatcgtactccgccaattgcttaaggccttccagcgccgccgcgtaaatatcggtgccgccgccggcctgttcttcttccacgcgggtatacagcgcttccaactccgcgccgttgccctgcgcccagtataccgagcgcggataccccgcaaaggggattaagatgttgatctcctgttccgaagcctgcaggaagttggcgcgggcgttttcctgcagcaagatctgcgacatggcctccaccacctgcgcgcgcccctcgcccagcatgctgcccgaataatccaggcagtacaccgtgagcgaaggcttgcggaactgggtctggtagaggttcaggcattcgaacagcacgtccgtggccggcatgttgatgggcgagagcacgcgctcgggctgcacgccccactcgccgcggaacacatccaggttttcctgcgaaacgccctcgtagccggtgcggcggcccgtgcgctggatctggttttgcacttcgtccgagagcaagtattcctgcaactggaggaaggcttcttccttgcggctgtccccgttgtccacatagcccagcggcgaatccgccagcgataggccgtcgtagggatacaccacgtacagcgtctcctccccgcgcgccgccagttcctggttggcgctgatgatgaggcactcgtaattgaccatcgcgtcgtactccccggcgaggaacatgtccttcagccaatcggaactgccggacgagcggtccacgccggaaagcagagatgtgatccgcttcttcagcgcatcggaggccagcatttccgaggtgatggcctccgggttgccgagcagggcgtacaaaaagccgatgtacgcgctgcacccggaattggactgcgtggccgaagtcatgcagaactttagctggcccgcttcgatcgccgccagcaggtcgctcaccgaaacttcccgccccacaaagcccagctcctccgccaggctctgccggatgccgaacaccacgggcgtgatggagatggactgcgcgtgcttcacgcgataagcgctgtcgcccgcggaaagccacaggctgctggccggccaaaccgcgtcgtaaggcacgctgtcggcctgcagggcgcgcatgatgtccagcgaaccctgatacgtcatctcgatgttgatcttttcctggcgggcaaacgcgtccagtatgctttcgagctcctggttttccgagccggacaggatgcgcagcgttacgctgccgccataatgaaaggaatggtcgccgctctgcgcgccttcctgcgccgtttcgcaggccgataggcacagggccagcgccaacaaaaggcccaccagggccaaagatttgcgcttcatcaattctaacgccttctttccgctgcgctatggagatttccccttcttatggtagcacacaaagcgggtcaattttgtcagaaggcggtaagaagctcgtaaacctgggcggcatcctctgcgcgcttgggcgcaaaacgcggctggccgcctctgagcgagacggccagcagggcgttgaggaaacaacccctcagtcggctaacgccgacagctccccttggcaaaaggggagccttttggatagtggcacaaccgtaggaagttgccctgcccaaaagcctcctttttcccgaagggaaaaggggcgcacgaaggccgccgcctgtggcggaaacaggccgtagtaagcccag

SEQ ID NO: 1315 - DNA, 28259 bp, Unknown
  16S sequences of unknown bacteria
gaaataggaaagtaaaaaagcgtgggtgaccgcgcttttaatatgtattgatttcagctataatttcacttaaattacgtctgctgtaaagtattcgcagaattagtattctgctgtttgactcatcgggcatataagaatgtttagagtacatatctgctccttatattatcaataacagatttgctgtctgaaacacgcccctttttgacatcctcaatgccttctattatcatcttggcttcgtatattttccgtatggttctttcatagtattcaatatccataaccacgaggcgtccgtaatcgttttttgttacaaatacggggccgttttcctcagagcagcggcgttctatatctactgtatcttttaatgcgcgcataggaataatctgcataataaaacctcctttgtgtggttatattgtgcctttaatttagtcacaagtcaatatggttgaaacttttgctgtgttctttgtgcaatcgtatgatacaatattaatgcagagataaaaacacagctccggttggtagtccggacgcaccttacggtgtcagtaacctgcctccttggttgtccgttctctgtaatcacataattaaggaggattttctgatggaaaagacgacaagcaagcttacagttatttttgaggaccctttctggatagggctttacgaacggcagacaggaagtcggtatgaggtttgcagaattgtattcggagccgagcctaagaattatgatgttgcagagtttatgaggaaaaactggcggaggctgaaattcagcccggctgtatccggtgaggctctaaatgagcgcagagtaaatcccaagcgaatgcagcgcgagataagcagggctatgaagcaaagaagcatcagcaccaaggcgcagcaggcgataagccttgcaagagagcaaaacaagctggagaagaaaaagcgttccaaagaacagaaagaggccgaaaaacaaaagaagcttctgatacatcaggaaaagaaaagacaaaagcacaggggccattaacctctgtgcttgatttgtttatatgttctgcactattaggcctcctatctgctctgtagtggcaggaagtttgccctcagacattatatcaggagttctgtagcctgcggcaagtgttttctttacggcgttttcgatggcgtcagcctcgtctgacagaccgaatgtgtatttgagcatcatagctgccgaaaggattgtagccatagggtttgccttgccggtgcctgcaatatcaggcgcagagccgtgaacaggctcgtacataccgaaattgccctctgcaagagaagccgacggaagcattccgagagatcctgtaatcatacttgcctcatctgaaagaatatctccgaatatattgcttgtaacgattacgtcaaactgcttcgggttatatacaagctgcattgcggtattgtccacatagaaattctcaagctcaacctcaggataattctttgcgacctctgcaactgtttttctccacagtctgctgctttcaaggacattggccttgtcaacgcttgtaacctttttgtttctcttcattgccatatcaaaggcaacctctgcaattctctttacttcgccctctgaatactgctctatgtcataggctgccttgcccatattggtatccttgtagcctctttcaccgaagtatataccgcctgtaagctctcttactaccagaagatcaagaccgccctctaccttttcaggtctgatagggcaggcgtccttgagctcgtcaaacattattgcagggcgcaggtttgcaaacagtcccagctcttttcttattccaagcagcgctctttcaggtcttttgtcacctggcagggagtcccatttaggaccgcctactgcgccgagaagcacagcatcgcttttttttgcaatatctattgtttcctgcggcagacattcgcccgcagcatctattgcagcgccgcctgcaagaacctgtgtgtaattaaattcgtgaccgtatttgccgcctacggcgtcgagaaccttaatcgcctcgtttataacctcagggcctatgccgtcgccgggtattacagctatattgtatttcataacaacctcctatttgatagaattaagcagtccacctgacttaataatgttatttataaattcagggaacggcattgccttgtattcagtacccttagttatatcctttatggttcctgtttcaaaatccacagaaacctcatcgcccgcttcgatagcctctgccgcttcaggacattctaaaatagcaagtccgatgttaattgagtttctgtaaaaaattcttgcaaaggatttggctataacgcaggaaattcccgattccttgatagcgataggggcgtgctctcttgaggagccgcagccgaagttccagcctgcgaccataatgtcgccgtccttaaccttgtttacaaattccctgtctatatcctccatacagtgggatgcaagctccttgtggtctgctgtgtttaaatgtcttgcagggattattacgtctgtatccacattatctccgtatttatgaacaaaaccttgtgctttcattgctacattacctccttgggatctgagatttttcctgttactgctgatgcagcggctactgcagggcttgcaaggtatacctctgatttggtatgtcccattctgcctacaaagtttctgttggtggttgcaacgcagcgctcaccctctgccagtatacccatatgtccgccaagacatggtccgcaggtaggagttgatacaacgcagcctgcatcaatgaatatgtcaaggtagccctttgctatacattccttgtatatcttctgggttgcaggaattatgatacatcttacatctcttgcaactgttttacctttaagaatttcggctgccgtagccatatcttcaattctgccgttggtgcaggagccgattacaacctgatctattttaacatcgcctacattgtctattgtctttgtgttttcaggcaggtgagggaatgaaactgttgatttaagcgaggataaatcaattgttacagtctgcgcatactctgcgtcatcatcgggagcataaaccttgtactctccgtttactctgccattcatatagttttctgttacctcatcaaccatgaatatgccgtttttggcgccggcctctatagccatatttgcaatgcacagtctgtcgtccattgaaagtgaggacagaccctcgcccataaattcaagggatttgtacaatgcgccgtcaacgccgatagttccgataagatgcaggattacgtccttgcccgaaacatatttatttagcttgcctttgagctccaccttgattgcggacggaaccttaaaccacgcggtgcctctggccatacctgcggccatatcagtagagcctacacctgttgagaacgctccgagagctccgtatgtacaggtatgggagtcggctccgataatgcagtcgcctgccttgacaagaccaagctcaggaagcagggcatgctcaatacccatattgcccacatcatagaaattaactatttcgtgttttcttgcgaaaattcttgtctgcatacactgctgcgcagccttgatgtccttgttaggtgtgaaatggtccattacaagagctatctttgatttatcgaaaacctcggtaaatcctgctttttcaaattcgttaatagcaacaggggcagtaatatcatttgccagaaccatatcaagctttgcatcaataagctgtccggctttaacctgatcaagccctgcgtgcgccgcaagaattttttgtgtcattgtcattcccataataatttcctccttgttagaatgctctgttgatagcgctgataagagcatttatagatgcatagataatatcgttgtgtatgcctacgccccagaatgtttctccatctttggagattgcaacatatgatgcggctcttgagtttgactctgattcaagcgcgtgctcgtgatatgttacgaagtcgtattccagactgtagtggctgcttctgagagctgtggtaacagcgtcgagtctgccgtttccctcgcccttgagtgagagatgctctccgtagatggtagcctctatgcttaccttcattatatcattttctcctctggagaaggtagcatcctctatgctgattttatcttttctgttgacatactgctgctggaatatcctgtggatttcagcaggggacagctccttgtgagcttcgtctgatatatgcttcatcagatagccgatttcctctctcatcttcttaggaatatcgtatccgtagtttgtttcaagtacataggccacgccgcccttgccggactggctgtttattctgattacatcggcctcgtattctctgcctacatcatgcggatctatcagcaggtaagggcacgaccacttgtcagggtgatttgtttcaatatggtgcattcccttggcaatagcgtcctgatgtgagcctgagaatgcggcgaataccagactgccgccgtaaggctgacgagggctgaccttgaggtctgtaaatttttcatacatttcaacgaccttaggcatatccgagaagtcaagctgcggatctacgccgtgtgaaaacaggttcatggcaactgtaagtatatcggcattgcctgtacgctcgccgtttccaaacagtgtgccctcaactctgtcgccgcctgccagcatgccaagctcgcagtctgcaactgcggttcctctgtcattgtgaggatgcagcgatacgattacgttttctctgcagtggaggtttttgctcatgtattcaacctgtgaggcatatacgtgaggcattgacatctcaactgttgcaggaagattgattattgtttttctttcgggacacggctgccatatgtcgataactgcattgcacacctcaagcgcgtaatcaacctctgtgcctgtaaagctttcaggggaatactcgaatgtgaagtgtgtgtctcccgggaagctgtccgcatattttttgacaagctctgctccgtctgtcgctatttttttgatttcgtcctttgattttctgaaaacctgctctctttgcgccacagaagtggagttgtacaggtggactattgcgtttttgacgccctcaagggacttgaaagtcttgtcgattatgtgctcccttgactgtgtcagtacctgtattgtcacatcatcgggtatgagatttttttctattaatgtacgaagaaattcatattcagtttctgaggcagcaggaaatcccacttctatctccttgaaacccagctgacacagatattcaaagaattccagtttttcttcaaggctcattggaactataagggcctgattgccgtcgcgcaggtctacgctgcaccagataggcggcctgtccatatggtcttttttaacccagtcgtatgacgggacgggaggcataaaatatccgacctcgtatttagtatgatttttcattcctttgatgttatcgcttgccataataaaaagtcctttcgtataaaacaaaagccctgttcccaacattaaatcagaaacaaggctgaatgtataataaaatataaagagaatcttaaaaaagtgttgagaatgtctaatgctatataattatgaatcacaagtgaggcataagagtagtaataacattaaatttctcctttcttcttaactgatacgattattctataccgttttgtccggtaagtcaatatatttttgtgaaaaaacacaatattttttgtgctgatatattatacagcaacaaaattacatattgtcaatgtccgccggagtcagaattcgtattttttcagattcaagcaggttttccacttccgaagcgtcatcaactctgacaacaagataagccttgttttctgtgcgggtgagaaaagcgtacatgtattccatatttatatctctttcggcaaacagcctgactatctcggcaagaccgccgggcctgtcgtttatctcaacgcctacaacatcgttgatggttgcgacaaatccgtttttttcaagcagcgcctttgctttatggggatctctgacgatcagacgcagtattccgaattcacttgtgtcagcaatagacagcgcccttatatctatacccgcttttgcaagtatatctgttatttctcttaattttccttctttgttttcgacgaaaaccgataactgtttaatagccattgctttacctcctaatcgtgaagttttcttttatcaattactctgacagccttgccctcgcttcttgcgattgttttaggcgtaacaagatgcacatcggggctgatacccaggatgcctttgattgcagatgcaagttttttctcgcgggctgttatttctctgaccgtatccgagaactgtccggcactgagctctacattgatatcaaaggtgtcggtgtttttaactctgtcaagcacgatctgatagttaggcgtgtaaccttcgttcagcagaacagtttcgatctgtgaagggaagacgtttaccccccttataatcatcatatcgtcgctcctgccaagcggtttggacattttgatgaaagttctgccgcaggagcattttttcctgctcaatacgcacaggtctcttgtacggtatctgagcagagggaaagcctccttgtcaagtgatgtgaagacaagctcgccgacactgccttcgggaagcacttcgcctgtatcgggatctataatttcggcaaggaagtggtcctcgtttatatgcatgccgttttgctcgcagcactcaaatgcaacgccgggaccgcttgtttctgtaagtccgtatatatcataagctttgattccgaggcttttttctatggaatgtctcatttcctcagtccatggctcagctccgaaaatacctgccttgagagtgttgtttttaatacccttttcctccatgctttcagctatatatgcggcatatgaaggggtgcagcacagaattgttgcctgcatatcattcatgaactgtatctgcctgtctgtattgcctgatgacatggggagtgtcagacagcctactttatgtgagcctccgtcaagtccggcgccgcctgtaaacagaccgtagccgtagcatatatggcatacgtcatctccggagccgcctgctgccacaatagcccttgcgcagcagtcctcccataaatctatatcatgctgtgtatagaatgcgaccacacgtctgcctgttgtgcctgaggttgagtgaattctgacgcagtctgattttggtactgccagcattccgtcagggtagctgtccctgagatcggctttggaaatgaaaggcagcttgtgaagatcctcaatccctcttatatcttcaggtctgacgcctttttcgtccatcagatttctgtagtagggaacattgtcgtaaacatgctgtacctgttttacgagtttttgtgactggagtttttgaagctcctccaccggcatggtttcaatatgtttctggtagtagttattggtcatatttagtctccttttttgaatttgagggcgaaaacataaaaaccctctgctgttgattgcagagggtgaaatatttcacggtaccacctcagttcatcattgcctcacgacaatgacctttgcgggcactatcatgccctgacaggtaacggctgtctgccggcggcgcctacaagcgtttgccttcagcgtgcatctgttcggaaggaattcggttaatgtctgcctgctgcctctcaccatgccgcagctctctgtaaggtttgtcttaacttactggtttccggtcatcgattttgaactatagttagattatacatagctgatatattaaagtcaagaaaaaattattgatttataacaaaaaatctgatataacataggtatacaacacaaaaagaaagaagagatgtttatgtacagatatttatcccaccttataatctattcggacagaagcgaaagctccatactttatgaaatgggagagcttttcagaaattacgacaacggagtcaaagaaaaatcagagcttgtaaaagatgcatataatatagtaagaaaaattctcgatatatcaaccgcatatgcttttgatgagaatctgtggacaagctatctgacatactacctcataaactcggaaaactcattcagcgcctcgtgcgagaggagaggagctatagagggaagtgtcaattcctttgcaaagcacgattttgagatttttatgaagcttttcagatttgatttcagtgaaatcgaaagagaactgggaacagactgtttctcaattctgtgtgattacaaggcggtggagaaaccatcgcttatgtacaatccgtatgtgatgaaaagtgtccgggaacttcgggtgcagcttgaaaatgcagaggatccggatgaattctttactgttgtatcagatttttacagagaatacggcgcaggcatattcggagttaacagagcgtttcgtatttcagacagagaggatatactcgaatttgagcccgtaaaaagcatggatgatgttgtactggaggatcttgtaggatatgaggtccagaaacagagactgcttgggaacacaaaggcatttgtggacggaaagcccgcaaacaacgtgctgctttatggcgacaggggtacaggcaagtccaccagcatcaaggctgttgccaacaggttctggccggacggcctcagagttattcaggtttacagacatcagatgaagatgctttcaaggataatctccgcaatcagaacaagaaactacagatttataatatatatggacgatctgtcttttgaggattttgaaacggaatacaaatacctcaaggctgtaatagagggaggacttgagtcaaaggccgaaaacatccttatatatgcaacctcaaacaggagacaccttatcaaggaaacgtgggatgacagaaacgatatggagcatacgggagagcttcacagaggcgacagcatggaagaaaagctgagccttgcagacaggtttggcgttcagatttactacggcaagccgtctaaggacgagttctacagaatcatagacgagctgtccgaaagcgagggggttgccatggataaggagcagcttcataaagaagccaatgcatggcagatacgccatggtgatgtatccggcagatgcgcaaggcagtttgtggactatatcaaaggtaaggcataatatcagatttgttaaaacggtgcggcatattgcatttttcgctgtaaaaaatgtaataagtcgcactttttcgttgtaaaaagtgtagcgggtgggtataataaaggcagaaagattaaatgaggtgggcatatgtacagagctgcaattgaaaatcttaaaaaatggaaaaacaaaaaatcaagaaaacctctggtaatagagggcgcaagacaggtgggcaaaacctggcttatgaaggaattcggcagacaggaatatgaaaaaaccgtctatataaattttgacgccgataaaagagcaggggatttgttttccgaaaatcttaatcctgacagaattataaaaatgcttgagatttattccggaagcaaaatagactctgataataccctcattatttttgatgaaattcaggaggctccgagagccttgtctgctcttaaatacttctgtgaggacgctccgcagtatcatatagtatgtgccggatcgcttctgggaatagctttgcacagcggtacttcgtttcctgtaggcaaggtggaatttgtcaggctgtatcctctttctttcagagaatttcttatggcggcaggcagagagcagtatgcgcagctgataaaggataaagactgcaaaatgatgcaagcatttaagcaggaatatattactatgctcaaacaatactattttgtaggcgggatgcctgaggcggtacagagtttcatttcggaaaaagattttgaagaggtgagagacatacaaaaacgcatattgagcgcttatgaacaggacttttcaaagcatgcgcctgcgggaacagttccgagaatacgaatggtgtggaattccataccctcacagctggcaaaagaaaacagaaaatttgtttacggacttgtaagagagggagcaagagccaaggaatatgaaacagctataatgtggctgtctgattgcggacttgtgcataaggtaagcagagtaaaggttccgcatctgcctctcaaggcgtacgaggatttgaaatcatttaagctgtttatcgttgatgtgggcctgctgggatgtatgacagggataagtcctaaaatactgctggaaggaaacagcctttttgttgaatttaaaggtgctctgacagagcagtatgtgctgcagcagctaaaagccgaagaagatataggtatatattattatacaaatgagagaggcagctgtgagattgattttcttgtcgatgacgggcagagagtaattccgatagaggtgaaggctgaaatcaatcttaaagccaaaagtcttaaaacctacagagagaagtattctccggaaaaggctgtgagaatttccatggctgattataaagaaagcgaggggcttatagatataccgctatacaccttgtagacagaagataaaaaaagggctcatcgccctaacggtttgttcccgttaatgcgacagccccctttttattatctgcacttgttaagcagctgctcccatttcctgtccacgtaactctgggcttcttctatcatccattcgctgccttttttaaacatatggctgaatcttccctgcagcttcaggaattcctctacaggcagcttcttctttggctcataggtcagacggtacacaccgtcctcgatttcaaacagaggccatacgcatgtatctacagccatcttacttatatgagctatatcggcggcattgtatctccagcctctcggacacggcgacagcacgttgaggaaatttgctccctctgtatatatggcttttctggatttttcgtggaggtcgcccatattgccgataaatgcggtctgtgcgacataaggggaaccgtgagcggcaatgattgccgtcaggtcttttttgttctgctgcttgcccggcagcttgcttcctgcgggtgaggtggttgcatcggcaaatctcggagtggaggaggaacgctgtatgccggtgttcatatatgcctcgttgtcatagcatacatacacgaagtcgtgatttcgctctatggctcccgaaagggactgcagccctatatcataggtaccgccgtcaccgccaaaggctataaccttgaagttttcctttaccttgcctttctgctgcagcaccttgtaagctgtttcaacacctgcagcagttgcagcggcgttttcaaaggcgctgtgaatgaagctgtcctcataggcggtatacggatacataaaggttgatacctcaagacagcttgtggcgtttacaacaacggccttgtcctcaggatccagagctctcagcacgcctcttacggttatacctgctccgcagccggcgcacagtctgtgaccgcctgcaagtctttcttttttttctgcttcttttttcaagttgtatgtcatagccctatacctcatatttctctttgtctctgccgtatgttctggcagcgcctctgtggtattcctctttcatcatgcgctgatcggcatctatgtatctggagtcccttactcccacatatctgtatacatcgcccggatcatcctcgtctataatgtcgtagaggtcctgatatatatcgtagtaatcctcaacccttatatctctgccgccaagaccgtagatgtagtttactgcgtaaggtctgtcgggcagatcgtaaagggaacttcttgcctcattgaacagcgggccgccgctgtttgaaaagctctcggccttgtccattattgcaacagcctttaccttgcacattgcagcagcaagaggtcttctcggaaacggtctgaacacacgcagcttgataagacctaccttgcgaccctctgcgcggagtctgtcaacagcctccttgcctgtgcctgcgcttgagcccataaccacaagagcaacatccgcatcgtccatcatgtattcctcaaaaaatctgtatttgcgccctgtaagcttttcgtactccttgcctatctcaagtattacaggcatcgagtctttcatagcctgcgcctgcgctctttttacttccatatagtaaggggaggttccgtaaggacctacggccagaggattttcactgtttaacaggaagttgtcaggctcgtactctccgacaaaggctctgaccttttcgtcctcaagcagttctatgtttgatacgccgtggcttgtgataaagccgtcctgacaggccataacaggaagtctgcatttttcggcaatcagaaccgcctgtatgaaattatcataggcctcctggtttgtttcggcatacatctgtatccagcccgaatctcttgcgcccattgagtccgaatggtcgttgttgatgttgataggaccggacagcgctctgtttactacggacataactataggaagcctcatggaagccgatacataaagcagctcccacatatatgcaagtccgcaggaggaggttgcggtcatcgctcttgcccctgcggcggaagcgcctatgcaggttgacattgcgctgtgctctgactcgacggggataaagcctgtatccacaagaccgtcagccacatagcctgaaaaatattcgggaatttccgttgacggtgtaatagggaaagcacccacaacatcgggatttatctgcctcatagctatggctactgcttcatttccggattttctttctcttacagacatttatttgccctccttaaccatagtgattgcatcgaaagggcatactttcgcgcatatgccgcagcccttgcagtgcatgaaatcaaagtccagtcttttgccgttttttacaggaatcgaactgtccggacagtacgggaagcacagcatgcagtgtctgcatttgtcctcattgaataccggacggtctacacgccattctcccgtattgaccattttagaagttgcgccctcatatatctcggcgcctgtggtaagctcctgccatgttgatttttcgtttatctctgcagcttttgtttttatcattttaaactacctccgcaagtgtggctctgagagccttcatgtttccgttcactatttcgggcttgcccgggaacttgtgtctgaaagactcttccatatccttgatgaactgctcctgtctgattactccgctgacctttacagcggctgcaagcatcggagtgtttggaaaatatctgccaagagcctcctctgaaatccttttggcatctactgtatatatagggcctttatattcttcaagcagttcgtttcttatctcatctgcagatctgtccgtatttatgataagcgcgccctctgtgctgagaccctttgtaacgtttacggaattgagcagggtttcgtctaccactaccacatagtcgggaaaatatatatttgaatgtaccttgcagtgagaatcggctattctgttgtaggctgtaatcggcgcgcccattctctcgggaccgtattcgggaaatccctgaacgtccttgcccgagttaaaggctgcctccgcaagaaacaggcaggctgtctttgctccctgtccgcctctgccgtgccatctgaattcaaccatattgtctgccatatcaattacctcctaaataaaaactccctgccccgtaatgggacagagaggtaaatctccgctataccacccaatacaagtgcagcatacaaacatatgccttctctgttacgggagaacccgtcagagcctactttaaaaacaatttcggtctgcaactcaggagtgattttcgtattcaggctttcttgtaccgggctctcactgtccccggctcgctgtgagctctgtctggaatattactctctccgtcaaagtctttggtattgaattattgatttacatataccttaaaccatacagtgcggcttgtcaagaataaattgtgataaaaaaacaaaaaaatcgaaaaaagtttgtgtgcgtatattaataaaaatgaacggattgtgtgagaattttcagataaaattttctattatatataaattgaagaaaaaaggatgaaagtgtggcagaagtgaaaaaaatgcaaaaaactataattaaaacacaaaaaaacggttgactttttgttgcaggtaaataataattatagatgtcaaatgaaattatgaggaggaaaaggcatgaagatgacgggtgcggaaatggcagtagagatattgctggagcataatgtagacactatattcggctatcccggcggagcggcactgttcatatatgatgcgctgtacaaatacaaagacaaaataagacacgtacttacagctcacgaacagggagcctcacacgctgctgacggatatgcaagatcaacggggaaaacaggcgtcgtcctagctacaagcggaccgggagcaacaaatctggtcacaggaatagcgacggcgtatatggacagcattcctatggtcattattactgcaaatgttgcaaacagcctgataggccgagatgcgtttcaggaaacctgcataacaggtatcacattccctgttaccaaacacagttactttgtaaacaagacagacgagctggcagacgcccttagaaatgccttcagaatagcaaatgagggaagaaagggacctgtacttgtagatatcaccaaggatgttacaggggcaacggttgattaccagccggcacctaactgcgaactcaaaaaagtgcagcaggaggagcttgacaaaaagatagcctcgtttgcaaaatatataaacaaagcagagaagccggtgctttacttaggcggcggcgttatcgcatcggaggcttccgaagaggttatgcgccttatggaaaaagccgacattccggcggtaaattccatgatggcagcgggagctgttcccgttacagacgataggtctttcggaatgctgggcatgcacggatcatatgcagccaacaaatgcattgcagaggcggatctggtgcttgcggtaggtacaaggttcagcgacagagttgcgcttaaccctaagaaattcgcatcaaaggcaaaaatacttcagattgatatagataagagtgaggtaagcaaaaacgttatagtaaatgatgccatagtaggcgactgcggggaggtcttagaggagctcattcctgaaatacagtctgcggaccattcagaatggatagcacagattaacagatggaatcaagagcatccgcttaagattacaggctatgacgatgtgcttaatcctcagcagataatccagaccgtatgcgataaggccggagaggatgcaatatatgttacagacgtggggcagcatcagatgtggtcggcgcagtacataaaccaccagaagccaagacacttccttacaagcggaggtcttggaaccatgggcttcggatacggagctgccataggcgctcagttcggaaatcccgacaagagagttattcacttcacaggcgacggttctttccatatgaacttaaacgaggcgtgtacggcggtttcaaacaacctgccgattataacggttataatgaacaacagcgtgctgggcatggtataccagtggcagacagacttctacggcggcagatattctcagacaacacctgagagaaaaacagactttgtaaagctgattgaagctttcggaggtacaggctacagggctgaaacctatgacgagttctgtcaggctctcgacaaggcgtttaaggcagagggtcctgtatggattgactgccgcatcgtgcagaacgaaaaagttcttccgatgatacctaacggaatgacagttgatgattccatatttgaatagaaagagaggagatgtctatgaaaagagaagtagtcagcatatatgttgataacaaggcaaatgtcctttcacgagttgtaagtctttacggcagaagaggatttaatatcgattcgcttacagtatctgcaaccaacaacccggatgtatcacgaataaccattgtgtttacgggagataccattacagttcagcagatagtgtcgcagaccgaaaagctggaggttgtcagaggcatcaagctccttgacaaaaaagaaagcttcttcagagagcttctgatgattaagataaacgccggcaaggagcagcgaagcgagattaaggaaatcgtcgatatctacagagcaaagattataaatctcacaaaggaaacaatagttttagagataacaggaagtcccgacaagctggacggatttctggatatgctctcggattatgaaatagttgatatatgcagaaccggtattaccggtatcgaaaaataaagtataaaaagaaaaggagaacagaacaatgataaacaagtattatgatatggattgcaatttcggaatgttagacggtaagacagtagcagttataggctttggaagccagggacacgctcatgcaatgaaccttgcagaaagcggagcaaacgtagtggtaggtttaagaccgggctcatcacatacagcaaaggctgaggctgcaggacttaaggttatggatatcgaagcagcggcagaagccggcgatgtagtaatgatgctggttcccgatgaacttgctgcaaagatttacaacgagcagattgcaaagcatatgaaagagggcgatgtacttgcatttgcacacggctttaacattcactacaagcagattcagccggcagcttaccttgacgtaattatgattgcgcctaagggaccgggacacacagtaagaagccagtatgttgagggcaagggcgttcctagtcttatcgctgtttatcaggacgcttcaggcaaggctaaggactatgcactggcatatgcttcaggcatcggcgcaggcagagcaggtatccttgaaacaacattcaaagaagaaacagaaacagaccttttcggcgaacaggctgtattatgcggcggtgttacagagcttatgaaagcaggctttgatacactggttgaagcaggctacgctcctgaaatggcatactttgaatgtatccacgaaatgaaattaatcgttgaccttatcaatgagggcggctttgacaagatgagatattcaatctcaaatacagctgaatacggcgactacagaacaggcagacgccttataaccgaagaaacaagaaaagaaatgaaacaggttcttacagaaattcaggacggtactttcgcaagcgaattcattcaggaattcaatgcaggcggtaaggcaagattccttgcaacaagaagaaaagaagcagatcacctgctttgcaaggtaggcgcagaattaagaaaaatgatgagctggcttaaaaaataaaggagaaaacaatgactttaagaagcagacaggtcacagagggcgttgaaaaagcccctatgagaagcttattctatgcaatgggatatacaaaagaggaactggaaaaaccactggttgcagtggtttcggctcacagtgaaatagtgccgggtcatatgcaccttgacaagattacagaagcagtcaaggcaggtgtgcgaatggcgggaggaactccgataatggttcctgcaatcggcgtgtgcgacggtatcgccatgggacatatcggtatgaaatattcactggcaagccgcgagcttatagcggacagcgttgaaacaatgattatggctcacgcctttgacggagccgtgcttgttccaaactgcgacaaaatcgttcccggtatggttatggcagctgtcagaatgaacattcctgcggttgtatgttcaggcggccctatgatgtcgggccttgtagacggcgttgaaaccagcctttccaagatgtttgaggctgtaggcgcaagaaaggcgggcattatagatgatgagggacttctggaatacgagcagaatgtatgtccgggctgcggttcctgttcgggaatgtataccgcaaacagtatgaactgtctgtgcgaggccatcggaattgcgcttccgggaaacggcagtataccggcggttacaagcaagagaattatgcttgcaaagcatgcgggtatggcggttatgaaccttatcgaaaaagacatcaaggcaagagatataatcactgagaaatcagtaagaaacgctattgcctgtgatatggctctgggctgttcgtcaaacagcgtgctgcatcttctggctattgccaatgaggcgggacttgatatcgaccttaacgtattcaacgagataagcagcgttactcctaacctgtgtcatctggcgccggcaggcggaactcatatgcacgaccttaacaacggcggcggagttcctgcagtaatggctcagcttgcctcaaagggactgatagatacagagcttcctacggtaacaggcaggactgtgggagaaaatatcgcagatgccaagatattaaacaacgatgcaatcagacctgtagacaatccgtacagtgaaaccggcggaatagcaattctgtggggcaacatcgcaaaggacggctgcgttgtcaagagaagcgcggtggcgcctgaaatgctggtgcattcaggacctgccagagtatttgacagcgaagaggacgccatagctgcaatatatgcaggcgacatcaaagacggacaggttgttgtaataagatacgagggtccgaaaggcggtccgggtatgagagaaatgcttaaccctacaagcgcgcttgcaggcatgggtcttgacaagaccgtagctctcataaccgacggcagattcagcggagccagcagaggcgcatcaataggacatgtaagccctgaggcggctgacggcggtcttataggacttgttcaggagggagatatcatagatatagatatcccttcatattcaataaatgtcagagtttcagacgaagaatttgaaaacagaaagaaaaattatgtaaaacctgagcctaaggtaaagggcgggtggcttgagagatattcaagacttgtatcatctgccaatacaggcgcggttcttaaataaacggaaaagaggacaaagagatgagtaatagatttagtgtagaattaaccaaaaatccaaagcagaagccggatcccgacagccttagatttggtacagtttttacagatcatatgtttgttatggattatgatcccgaaaacggatggcatgacggcaaaatagttccttacggtcctttggcacttgaccctgcaacagtggttttccattacggacaggaaatgttcgaggggcttaaggcctacaagaccaaagagggcaaggttcagcttttcagacctgatatgaatgcaaagagaaccaacaacaccaacaagagaatgtgcataccgcagattgacgagcagatgtacattgatgcaatcaaggagcttgttgcggtagataaggactggatacctcagaagccggatacagcactgtacatcagaccgtttattatcggtacagacaaattcttaggtgttgcggcttcaaacacatacaaatttattataatactcagtcctgtaggaccgtactatgaaagcggacttgctcctaccaggatttatgttgaaaacgagttcgtaagatcggctccgggcggtacaggctatgccaaaatcggaggcaactatgcggctgcaatgatagctgagcagaaggctcacgatatgggatacgatcaggtattatggcttgatgccaaagagggcaaatacgtagaagaaatcggtacatcaaatgcattcttcaagattgacggagagctgtatacagctccgcttgagggcacaatcctgccgggtatcacaagagactccatgataaccgtaatgaaggactggggctacaaggtaaatgaagtgaggttcactatagaagatgtgttcaaggctgctgaggaaggcagacttgaagaggtatttgcaacaggtacggctgctgtaatttcacctgttggagagctttactggaacgacaggcacattgttataaacaacaatgaaatcggagagctgtcacagaagctttacgatgagctttacggaattcagacaggagagaaagccgatacaagaggctggatcgtccctgtggaataaaagaatatatatactgacagacaggcggaaccgaaaggttctgtctgtttttgggagaaaaacttttaccggttttatatattgttttttgtcaagaggagaactgtaaatgtttaaatatcaacggattaaggaaattacagaaaaaaataaaaaaggaattgactgtaaaaacaggggtgtagtaaaatagtaccatagaaaaaatataaaggcgcacagataagccgtttaggctgaattaagtttcagctcagacggttttttgatgcggtggtaatagagaatgtatggattaataactgtctgaacaaggtacattattcaggagatttagcgggatatatcttagtatgtaccttaaaatattaaaacaactgaatcaaggtattcgacaggtagttcgctttaatgttggactgcctgtccttttggggtggtgagaaaagatgtgaaaaaggcagagaatggaatctgtttctacatgaaatgtaaaaattagacataataagctaaaaaataggaaatatccattgacatactatgtttctgctggtaatatatagctgtgagatatacagttatattattacataaatacatttatcaaggaattagggagaacaggataatgagtatagcaaatgatatgaaagcatatattgcagaacagtttacaacaacaagaagaaaaaatttcagctttactgacgactatgtgtttaaagcggtgttcgggcaggataacgacaggtcaaagaaagcactgatattgcttctcaatacaatacttgacagaaaagatgatcctataacccgcatcagaatacttaaccctataatcatagggcaaagcgacgtgagcaaggaaggcataatggacatcatggcagaaacccagaacggccttatccttgatatcgaagcgcagtcagggcatttcaaagagtactccaacagagcgctacgctatgccaatgcgctgctggaaaaggcattgaagcgcggagatccgtatgatacaatggagaaaagcatagttgtaacaatagcagacggcaagccttacaaggctgccggcagactgcattgtatatttgatatcagggagagagaagccggtgtgccaatgacggacagactggaatttcactgcatacagctgggttttgtagatgaaacaaagccagtatcggagcttagtcctctggagcttgttgcagcatatcttaaatatgctgcagatgaggataaggcagggtataccagtgaactccttgaatacggagagggagttatagatatggcagagaatatattcagagatgttacccttgatgaaagggcttgggttgaaaagcggtcaagagagctggcagagcatacccgtgccagcgagatatatcaggcaagagaggaaggtattgaacaaggcagaaccgaaggcattgcagagggcgaagcttccggcagagttgcagagaagattgagatggccaggatcatgaaggataaagattattccattgctgagatatcagagctgacaggtttatcagtagaggaaatagagaagttatagtaaagtacattgattaaggtatttaacacgccgtgagcaggaaatccccctcctctacaggtagtgggatgaattgcgataaacacggcgcttcttgacccttgtattgcatagtaatataacgatagcaggttcaaaagaaatatcgcaagtcatatcgaactaatatacagtataatatcggtccgatatctgctgtatattgtactccgggattatgtaaaaaaccttttgaactcaaccccatataatctgattacaaaaggtaggcaagatggcaaacaaagcaattaagtacagactgtatccgacaactgaacagaaaaccatgtttgcaaagaccttcggatgctgccgcaaggtctataatcttatgcttaatgataagattgaaagctacaaaaaaaccggcagatttgcatccgtgacacctgccatgtataaaaaggaatatccgttcctgaaggaagcagacagtcttgctcttgccaatgtgcagttaaatctgcagggcgctttcagaagctgtttcgacaaatcccgcaaaaggcagaatggatttcctaaattcaagtctgccaaacacagccgaaaagcctataccaccaataatcagaaaggcactgttgctattattggtaatgctgtaaagctgcctaaaatcggtaaggttaaagctgtaattcatcgccggcctgatgctgactggattatcaggtctgcaactgtatctcaggacggcgatggcaaatattatgtatccgtgctttttgaatttgcaagaaatattacgcctgttccgatatctgataacgctgtcggtcttgattatgcctctgacggtctgtatgttgacagtaatggcaatacaggcaccaaccataaatattatcgtgaaagccataaaaaacttgcaaaagagcagcgcaggctttcacgtatgaaaggctctgaaaaaggtgaaacaaaatccggtaactatattaaacagcttcgtaaagtgaataaaatccatagacatatatcaaatcagaggctggataatctgcataaaatatctgctgagatagccaatcagtatgatgttgtatgtgttgaaagtctggatatgaaagctatgtccaataagggctttggtaacggtaaagccactatggataacggatacggattatttctgaagatgctggagtataaactttctgacagaggtaaatatcttgttaaaatagacaggtggtttccgtcaagtcagatatgtcactcctgcggggcgcttcaccctgaaatgaaaaacctcgcaaaccgtacaatggtatgtgattgcggtctgacaatcagtcgcgaccggaacgctgctataaatataaggcgtgaaggcctgagaatactgaaatccgggttttctgtagcgtaaataatatatggtaggtcaggaaccggccaaacccaacgcctgtggacactgcatcagacctggcgataccataaggtatcagccgggcagtagtggttgaagcaggaagctccgacttctaagcgaagtgaaagtcggagtagttcacttcacagtacaactgaaattaaaggaagctgcataccttatggcagggtattcggcttccttgtttttatttgtttgtaggagaggaactgtgaataataactgtctgagcaaggtacattattcaggttgattatatagcatacagtattatggattaaggtgtttggacaaaagaagcaactcatataaggagctgcttctattcttcttttttgaattcgtaaataatgttagaaactatattcttctgatcgggtgtgagagcaacccatgagtcaaacatagccttctgttcaggagtaagatgtaccatagtctggttatcagcaaaaaactgggctaaggtaatgccaaaagcattgcatatggactcaagagttacaactgaaggaaccgtattcctgctccttatatttgcaatggtagaagatgaaagctttgaattctgagccagcctgtagtcgctccagccgcgttctttcattaaatcatctaatcttttaagaacatccatataggtaaaaatctccttttacatatattttattggcgaatattggcataaaatagtgttattttgtaataaatatattgctcaaatgaatactatgtgataaaatgatgaagaaacatatgaatatacacatgatttcacaattgaaaaaagctgaacaggcagatacagattatcagaatctgaaatatttaaattatgcggaccaatgaatttcctatatgcagacaaccttgttcgggggaatatgaacatggtatctgacaatagggcatctatggtttatctgccggtgacgtgagtttctggagggtactttttttaaatcaagcggggacgctgcaggcagcagcaatgtgtgatacatattacaccggattaaggattaatcataggagcagcaggatagctgctggaattcagggtccgtttttgtgtactcaaaatacgggaataaggaaatgaaaattaatcaaatatatattaagaaaggttgcaggaaatgagtgagatcattagctggcttacggagcattcactgtggtttcttcttgcggcaggtacggtattcagcatatgctggctgatgcactttagagacgagcttgaaatatcaccggttaaggtagtgcttttttctatactgcatacattatacggtgtacttacggttaaagtgtttgccgtaatcgaaacaggatttgatatggacagcgcaggcagcatgagcctgtttggtgcggtggcatttatgcctgcaggatatttccttgtttcggcagttacaaagaagaagccttcgaaggtgttcgatatatttaccatatgcctgctgttcacacttatgtgtgcaaggattaactgtattatcagcggatgctgcacaggcaggttaatagcggggacacagttccactatccgaccagagagatagagattgcattctatattgtaatgctggtcgctttgggaaggaaggtcctgaacagggaaggaaaaggcgcaatttatcctatatatatgatagcatacgggatattcagattcattgaggaatggttcagaacatcctccggcatgtatatgttccataaggcgcatatatgggcgctgctttcactgattatagggctaagcatatattttgaaataaggacaaaacagaataagacacgaagaaaaaataaagagggtacgaaacatgtctgaagtaaaaaacattgtaaagaggtttttatcattaacactcatatttgcaatggtagcagcaatgctgcctgctgttagcatgcctgtaaatgcagcaaccagtggaactgtaacagggctatccgatgagaatatagggctaagtttcaatgggaccgcagatagtgcgtggagtgccagcggcacgcagatcatcggtaaggctcggtctacgtctgggtcaggctgcggcagtggcagtgactatcgttctacgctgaccatcaccaacaacaagaccacaaaggcgacgctgtcctttgactataccgtcgtggtaagcgaaggtacgattctggtgaacaacaccacgaccaccatagccggcagcttcagcaaggagcttgaagccggcggcaccgttgaggtggagatcaattccggcagcaccagcgccgacaccaagatcaccatgaccaacgtgaagctggtggccgatgtgagcgccaccgtgaccttccagcccgccgagaacggctcttataccgtgggcgggcagactatcaccgaggtgtacacccacacccagagctccatgaccgcctatcaggtggaggcgaccccggcggagggctaccgcttcaaggggtggtacgatgtggccagcggaaagtgcatcagcaccgatgccaagaccactctgaactttgacagtaaccgtatcatcacggcgcgattcgtcagcaaggagctggcgctctttgagaccggcggtcaggtgtttgacgacctgaacgacgcgatcgcggaggcgcagaagaacctgcccgctatcatcacactcgccgagagcggtaagatcacggggaactacaccatccctagcaaggtcaccctgctgatccccttcgatgaggccaagacctgctataccagtaccccgaccgccatcacctctaccccgaccgctaagcccttccggacgctgaccatggcgtcgggcagctccctcacccttgcaaacggggcggccatcagcatcggcggtcagtattatgctgcctccggcggtcagcagggccgcatcgttgggccttatggctacatcaaaatggaatccggcagcgccatcaccgtgcagtccggcgcaagcctgtacgcatggggcttcatctccggcagcggcgccgtcaccgtggagtccggcggctctgtctacgaatggtaccagattctggacttccgcggcggctcggcatcttctgacatgggcaacaaggtgttcccctttagccagtacgccgtgcagaatgtggaggtacccctgaccctgcacgccggcgccagcgagacggtgtatactgcggtatacgccataaggaagatcaaccccacctccattccctttatcggggacaaaggcatgttcaaaatcgtctccggcagtctgaccaaggcgtatgacggcgccaccgaccgcatcatctacaccatcaacggtgaggcagagctcaacagcctgagtctgaagctggcaggcatgaaagtcagctccagcggctatgttctgccgctgaccaacaacatgaccatcaatttgacctccgacagcaagctgaccatcaaccagacggcggcgctgctgcccggcgtggaggccaccatcgccaagggcgccgagttagtggtgtccagcggcgagagcatctacatctatgaccgtgatgagtggggcggctactgcggtgccggtgacgcacagtacatgtcggtagtcgttgcccccggacggacaggtaagcgtgcgcctctggcggatgtacaggtggacgtcaacggtacactgaccgccatcggcggcatctacaccaccgccagcggtgcggacatctgctccagcgccggtaccggcgcctacaaccagcagggtacccccggcgcggagaccaagacgtatcagtatacccagaagggcagcgtgacggcacatgagatccccattactcccgccaagctgcacaacgaagacggctcctacacggaaactgcgaccgcaaacactggcgatgttatcaactatgtcaatggcgtttggggcggcgaagagccggtggagctgacggttacctttgaagccaacggaagtgcggaatacccggtcgaaggcacgatgactccacagaccgtaaatgcaaagacggataccgcactgaacgcaaactcttttacccgtaaaggctacaacttcctgaaatggaatacggcggctgacggtactggcgactcctatgcggatggcgcgaccgtcaatctgacggcggataccaccctctacgcccagtgggaggacaaccattctctcaccaaggtgatcaacaagaaggatgccacctgcaccgaggatggctacaccggtgatacagtctgcgccatctgcggcaaggaaatcaccaagggtgaaaccattcagtccaagggccacaccgaagtcattgacgcagcaaaggctccgacctgcaccaaatccggcaagaccgagggcaagcactgctccgtctgcaacgcaatcatcgttgcgcagactgagatccctgcgaccggtcacactgagaagaccgttgcgggcaagcccgcaacctgtaccgaaacgggtctgacggatggcatcagctgctctatctgcggaacggttatcaaagcgcaggaagagattccagccaagggccacaccgaagtcattgacgcaagggtcgagccgacctgcaccaaatccggcaagaccgagggcaagcactgctccgtctgcaacgaagtccttgttgcgcaggaagtgatccccgccaagggacataccgaggtcattgatccggcagttgagccgacttgcaccgaacccggcaagactgagggcaagcactgctcagtctgcaatgaggtgctggtagcacagacagaagttccggcattag

SEQ ID NO: 1316 - DNA, 12645 bp, Unknown
  16S sequences of unknown bacteria
cgggctggcctgcggcccgaacccgcgccttgcaggaattctgccctatcgcagcaataatatgacgctttgtcatatatccattctgcctaggatatgatgctgtgtcataatccatcccggtttatcgcatatgctttagttgcgcagcaagctgctcccgacaggggttctcccccgctgggagcttgcttcatcatgattggtcatgccgtatatttcgcgctgccaaaggccaataagccctgggcatcacaggggatgctggagcatacgatagcggaaaaatgtgtaattatgacaactggtcataatttatgccacgaaaaactcccggcaggttggtgcccgccgggagttcattttgctgttatcgattatgctgtgtatttcgcatcgccgaagttccacaggccctgggcatcacaggtgatgccggaaagggaggcgtggcagtacagcggagtcttgcccgtatcctgcggcagcagcaccgcctcttcggccagcagctgcatggcgcccttcaccagcccgattcgggcggattcttcggtttctgtgtcgatttttgacaacatttcgtcaaattcttcgctattatacttagcgtagttgctttcgcttgcactggcgaaccaatggagcagcactgcctcatccgggtagtccaggcttaccgccaggtacagcagatcgtattccccggcatcgcgggcagccttgtagtcctcataatccagggcgtttacggtcaggttcgtggcattggccagcgcttcgggcaccgccgaggcgttcttcaaggtcagtagggtcatgttctccggcagggtaccggtcccctcctccccggccagcagacgctttacggccaggcgggtctccgcttcggacagtttttcggtattcagcacataatagccggtcacgccgttactgcctgtcaccggggtaatagcatccccggcgtagccaaaggtcgcctgcagggtgccatcggcggccagagtctccagcgcggccagatcgccgtagtggtattttagggcgaggccggcggcgggtttctccccgcggtagccggtattgggcttcagcgtagccacattttcggtgatatcggcaagcgcgtagcggccattataggccatctcgccctccttgatgggccagaacgccggggctgccagcatgtgggcaaagccggaataatcgccctccagcgttaccaccagcttgccgtcctcggtggcttccaggcccagctcgctttcctcgttctcgtaatccctggcgcccaggataacatcaaagagataccggcaggggctatccaccgcgccgctgatcacgcgggtccaggcggtgataaagtcctcggcctttacaggagtgccatcactccagcaggcaccctcccgcagggtaaaggtatacaccgggcgcttggcggcgtcatcggtggcggagatctcccagctttcggccgcggcgcccaccgcctggccgttttcatccacagcggtcagtccctggtacagcatgcccagcacggcgcgggccgccaggctgccatcgtacagggccgggtcggtattggccggctggcccggtacaccgatggccaccacgccggtatcgcttaccgtgccggccaaatattcctttttgccgccgcagcccaccatggtaagcaccagggtgagagccagcagcagcgctattattttcttcatcgctcgtcctccgtattggggtagatttttccccagtataccgcatttcccggcatttgaaaagggggtccggtctcatcttgcccgctgggaacatttttcctgtcctgccataaataattccagccacgggaagtcccaaatccatttacgattctattacaaaacgcctaattcgttgcttttatcctcattcggcgctataattatctgatagatagactgtcggtttgcgctcatccgggggaggcttttttgctcctcctccacagggcccggcagcagccggacggcggggcgcagccccgccgcaggcggcgaaagcaggcgatgcctgctttcgccccggcgcagccggggcgggctgcgccccgaacctgcaccctgcaggggccctatgaggggccgcagcggtcggcccgcccgaaaaccatcaccttgtaggaggcaccccgtggaatgttacctggataacagcgccaccaccgccgtttcccccgaagcggccgccctggcgctgcacataatgaccgaagaatacggcaacccctcctcgctgcaccgccggggctttttggcggagcgtgccatgaccgaggcccgggggcaggtggccgccgtgctgcactgccgccccgaggagatcatctttaccggcggggggacggaaagcaataatatcgccctgctgggggccgcccgtgccatgaagcgccggggcaaccgcatcgtcaccaccgccgtggagcaccattccgttcttgccatctgcaaggcgctggaaaatgagggcttcgaggtcattaccgtggcgcccgatgaaagcgggcatatcaccccggaggcgatggccgccgcctgcaatgaaaaaaccattcttgcttcctgcatgatggtgaacagcgagaccggcgccatccatgacctacccgccattgccgccgcctgccgccgcaaaagccccaacctcatcttccacgctgactgcgtgcagtccttctgccgcctgcctatagatcccgtcaaatgggggatacagcttgtcagcgtcagcggacacaaaatccacgctcccaaaggcaccggcgctctctacatcgccaagggcacccggctgctgccgcccctttatggctccgggcaggaaaaggggctgcgccccggcaccgaaaatgtccccggcatcgccgcgctggggctggccgcccagctgatgaacgaccgctgtgcggaaaattttgcgcattttactgcgctgcagcagcaaatgattacaaaattatcacaatccccggccgtctgcatcaattcccccgccgacgccgcaccttacattgtgaactgctcggttcagggcattcgcagcgaggtgatgatccactatctggagcaattcggcatctatgtttccagcggcagcgcctgtgccaagggagagcgcagccatgtactgaccgccatggggctttcccgtgaccgtatcgattccgccgtgcgggtgagcatgaccgacaccaccaccccggaagaaatcgacgaattctgccgccgcctgctggaaggcgaagccaccctgaccaaacgaagataaggagttttttcctgcatgaaagagatcattctgctgaagagcggtgagatcgccctcaagggcctcaaccgcagcacctttgaagatatcatggccaaaaacgcccgccgccgcttgcagccgctcggcgagttcaaaatctggcatgcccaatccaccacctatgtgcagcccctcaccgagggcgtggacatggatgaggcggttcgccgcctgcagacggtattcggcattgtggccgtgaccaagagctgcgtggtggaaaaggacttttcggtcatctgccccgccgccgcggaatactttgccgaacagcttaccgctgcccgcacctttaaggtggaggccaagcgcagcgataaggccttcccgatgaaaagcccggagatcagccgggagctgggcggatacctgctttcccgcttccatcacctcaaggtcaaggtggagcagcccgagatcaccattaccgtggagatccgggagcagggcgcctatatccacgccaatcagctgcccggcgcgggcggcatccccgtggggaccggcgggcgggctatgctgctgctctccggcggtattgatagcccggtggccggctacatgatggccaagcgcggcctggagatcgccgccgtgcattttgcatcgcccccctacaccagtgaccgtgcccggcagaaggtgctggacctggcccaggagctgaccccctataccggccgcatccggctgtttgtggtgccgttcaccaaattgcaggagctgctgcgggagcgctgcccggaggactacttcaccatcctgatgcggcgctacatgatgcgggtggcggagcgaattgccctgcgggaggactgcggcgcactgatcaccggcgaaagcctaggacaggtggccagccagaccatgcaggccattggctgcaccgacctggcctgcaagctgccggtgctgcgtccctgcatcggcatggataaggaggagatcgtacgcatcagccgcaagatcgagacctttgagacctccatcctgccctacgaggactgctgcaccgtatttaccccccgccatcccaagaccaagcccaccgtagccgccgtggaggccatcgaggctgaaatggccattccggaggagctggtggccgaggccgccgagcaggcggagcttaatatcatccgctattaaatttataaatgactacaaggggcaggcacgaggcgcagcccccggcggcaaagccgccgctgcggccgaaggccgcagaaaccgcccgcagggcggtttgggctgcgccccggccacccggctgcagaaaaaatattttccatccgacaaaattcacagcttattcgtattctatttgcagccgcgaaaaaactttgcggtatgctattcttaactaattgtgtccatacataggaggggaacgccgtcccatgaagatcactattcttgccgtcggcagcgaggcgcagtatcagcccacctttgataccgcctaccagtatcttaaaaaagaaaccgccgccctttcggcggagctttcctacgccatctgtcgcccggatgccgccgagctgtttgcggccctgcgcaacgccatgggccaaagcgaagcggtcgtgctgctgctttcgccggagcccgccgccgtttccacggcgctgcgggtggtctgcggcgggctggagcgcaccgcccaaaccgatgccgccctgcaaaagcagctggaagcccgcgccgcccgcatgggccttaccctggggtatgagcagctggcggatttcgcctcctgtccctctggggccacccagctgcccaatgcgcagggcctggtgcagggctatgctatcgccgcgcgtcggcagctgctaatggcgctgcccgccctgccgggtgagctctccgccctttatccttccgcagtgcgtcccctgctgggcaagctggcagggctcgcggtcagctacgccaccgtgcgggtgctggagctggaccagttctcggtcccgcaggagatcacccgcctaagccagaatccccacctcaggctcacctcccgccaccagtgcggtgattataccatctttgtggaggccaccggcgctacccagcaggaggccgaggaatatctgcagcgggccatcacccatatgcagcagaccttcggcatctacctgtactgcatcggcgatcgtcccctcccccagatcgccgtggacggcatgacccgccatgggctcaccctttccaccgcggaatggggcaccggcgacctgctgcgggagcagctctccgccgtcatcggtgcaaacagctgctaccgtgcctcctacgatgacacccacatcgggcaggagctggaactcccccgccgggtgctgcagaaccccgccgaaaacgccgcgctcattgcggggctgctggcccagcaaagccgcaaagccgggcacaccgccctgggcctgggcctttactgccagccggaaagcggccagctgcatgtggccctggccgataaaaaccgcatctggaaccgccggctctcggtcaccgagctccgccgggaggacacccaacagatcgccgtgtggcaggccctgaatgtcctgcggctgtacaccgcgcagtatcccaagcagctccccggcggcatagagcccgccgagctggataagcgtgccgggatcggctcgctctttgcctgttccgcggccaaagctcccaaatcccccgcaaatacttccggaaaggaaccgaaagcctctatggaaaagaaaatccgtaccaagacccgcaccgccgcggccgaacccgccgctgaagccgtgaagggcaccaacctcatccagcgcatcaagatgaagtccatcaccaagaatgataagatccgcatcattctgttggcggtctgcatcatcgtgttcctggcctccggcatctatatcatcaataacaagctccagtccatcaagaacaagaacctttccgatgagctggccggcctgtacgatcccgatggcaccaccgatatctcagtggatggctatcccaaggattacatccgcggctttgaggcgttgtaccaacgcaatcccgatatcgccggctgggtcaagatccccgataccaagctggactacgccgtggtacaggcagaggataacgataaataccaccgggcggatatcgacggcaagtacaatgactggggcatcccctatgttgatttccgtgtcgaccaatccaagccctcctacaataccgtcatctacggccacaatatgggcgatggcaccatgttcggctatctgcaggcctacaaaaagctcagctactaccagcagcacccgctcatcagctacaacagcgtctaccgcaaggatatgtataagatctttgcggtggtggtgtgcaaggccgatgaccccgatttcgattaccataatttcatcgacagcgacagcgatgccgccaagaatgaatatatcgaaaagatcatgaagcgctccatcatcaagaccaccgtggatgtaaaagccagcgaccgcctgctgaccctttccacctgcgattataccttccgtgatcccgataccaataagctcatcgcccgtctggtcatattcggccgcgcgctgcgggatggcgaaagcgaagcggtcaatgtcaatgccgccaccctgaaccccaacccgctgatgcccaagcagtggtatgagtacatcaagaagcagcaggagaagaaggccgccgaggagttggagaaggaacagaaggcttacatcgagctgtggctcaccgaagaggagatcgccgcggcctccaatatgaccaccgccgagctttatgagaaagcgcaggagcgcgccgcccaggccgagcgctgcatgacggcggaggaactggccgaaggtcttacccccaagcagatcaaggagcgcatcgagtaccgtcagaagctctttgccatgctgctgacccaggatgagaccgacggcaacactgccagcaagaagctcgctctctgccaggagcgtctggatatcctgcagcaggaggtgaccgtgaacggcgaaaagaaaccgctgttcgatgataacaccctctttgccagcaagtggagccagctgcaggcacgctatgagctgctggccaagcagaaggactggaagacctatctttccgtcgccgatgtccagaacctaaatatctccggcgataccctgaagaactccctgaccgccaaccagcagaaggcccagaagtacctcacccccgagcagatcggccagtacaataactggcatgatctttccgccgccatagccaaggccgaggccacccgcaaggcactggaggccgagggcttgaaggccggcctgacccaggcggaaatggataagatgagcctttccgagctgcaaaaggccgtggataaggccaagaacaagaccgagattgaaaagaccatcgccgatatcaaggtgctcaatcccaatgccaccggctccaacggcacggccctttccgatatgactctggatgagctcaaggcgctgctctctgccctccagcaggagcgcgccaccctggaggcggccgccaaggccgccggtatgaccgccgatgagatcaagaagtatcccagcaatgcggagctccagcaggccatcaatgagaagcagaaagcccagcgcgaggatctcatcaaacagatccagaaatatgatcccagctatgacggttccaacaagacgctggagcagctggtggccgacctgaaagccaagcaggaagccgagcagcaaaagcagaacctcatcaatgagatcaagacctacgattccaactatgatggcaccggcaagacgctcgagcaactgcagagcgatcttgccgctgccaaggaaaagaagcagcgtaccgatctcattgccgagattcggaaatatgaccccagctataccggtgatggcaagtccctctctgagctgcaggcagacctggacgctaagaaagcagccaatgaggaacaacagcagaaggatgctctcattgccgagatcaagaagctgaagtccgattataacggcgaaggcaaaactctcgatcagctccgggccgacctggctgcgttacaacagcagtcctccggcggtgagggacaaaaccctgcttccgaatccggcgaaaccccgaccccctgaagcagcattccaccgggcgctcccaccgcataacgggaggtgaaagggccgtacggcacctgttcccatgtacatagcctctcccccgaccgggctttccggccgggggcttttttatgctcccgcgggcctgggcagggcgcggagcggggccgcaggccgcccgccttccccctgtactaaaaaaagagcccccgtaggggccctttcttctatgttatcgtccgcttacggctcgtccagcaggttgccaaacttgatgccctccagcttctcgcgcaccatctcggaaatatccgcgtagatgcggctgaatttgcacaccatgcaggcctgccggttgcggttacaggtgtagtcgtcctcgttcaggcaccgactgatggcatacggcccctccacctgctctatcacctcgtacagagagatctccttcgggtccttggccagctcgtagccgccgccggcccccttgtagcttttcaccagctcgcccgccaccagcttccgcagaatcttcagcgaaaaccgcagcgtcacgccggtctgctctgcgatagccgctgcctccatccgcccgccgttctgcgccaggcagtatacgatccgaaccgcgtagtcggattccagcgtaatatgcaccgttctccctccccttattccaggaaatccttgagctttttgctgcggctggggtggcgcagcttgcgcagggccttggcctctatctgccggatgcgttcccgggtcacattaaattcctttcctacttcctccagcgtgcggctgcggccgtcctccaggccaaagcgcagtcgcagtaccttttcctcacgcggggtcaaggtggaaagcacctcggccagctgctctttcagcatggtatggctggccacatcactgggggcgggggcgtcctcgtcagggatgaaatcgcccagatggctgtcctcctcctcaccgatgggcgtttcgagggaaaccggctcctgtgccacccgcatgatctcccgaaccttctccaccggcatctccagcttttcagcgatctgctcattggtgggctcgtggccgttttcgtgcagcagctggctgttcacctttttcaccttgttgatggtctccaccatatgcaccgggatgcggatggtacgggcctgatcggcaatggcgcgggtaatggcctgccggatccaccaggtggcgtaggtggaaaacttaaagcccttggtgtggtcgaatttttccaccgccttgataaggcccagattgccctcctggatgagatccaggaactgcatgccgcggcccacataccgcttggcaatggaaaccaccaaacgcagatttgcctcggaaagccgctttttggcggccacatcgccctccgacatccggatggccagctcgacctcctcctcggcggaaagcagcggcacccggccgatctccttgaggtacacctttaccgggtcatcgatgctgatgccgtcggcgctcagcacgctctccagctcctcattgctggccggggctatgctctcgccgccgtcgtcctccacgatctcgatattgtacgcctcgaaggtatcatacagcttgtccacctgttccacatcgtagtccagctcctccagcgcgtcgctgatctccttagtggtcaggcggcccttctgcttaccgctttccagcagctccttgagtacctgttttttatcctgtgtcgccatctgttgctcctccttatggggaaagctccccttcgttactgatcttgattggtctgtgcggggcctggtgtgcccgctcgtcgccgcgggctgtcccttccgcaagctatccctctgccagcgccgcaaattcgcgttctgcgggcttttgccttcccggcggcaaaactcccggaaaaggcaccatctccttgttctgcgccatttttggcgtttttattcctttcgccggtttttctcccggttcagattctctatgtactgccgcagcgcctcgccggaaagctgccccagttcatccttactcatccgggctgcgtagtcccgcagacacttcaagcagtcctcggcttcctcatcggtcaccggcggggcgcccggcagctgccatttggccagccggtccaccgcctgtggggagagattctctcccaaggcgctgatatccagctcctgcccggaaagcccccgctgcaatagcacccggtacatcgtccggtcgttctcgcttaggaagtacccctccggcagccggtcccgcagcgcttcggcccggtcggggttgcgcagcagataccgcagcaaccgttcggcggccttcatctcccgggggtgctgccgcagcagcagctcgtcctcccggtccttgccgctgtcctcccggatcggcggcgcgatgagatcccgctcctcctttttgcggtcgcggtagtcccggcgcttctgctcccgggcgatctgcccggccatggcggccttatccacctccagctcccggcataccttgctcaggtatacctcccgctcgatgggattgggcagcccggccatcagcgccgcaaactgcttcaggaacgaaaccttgccctcggcggtggtcacatcgttttcctgccgcagcttattgatggcaaaatcggtggcggagctgctcccctctatcagctgggcaaagcgttccgccccgaatttcttgataaactcatcggggtccttggcatccgggatggaaagcacccgtatcttcacccctgccgcctccagcagaccggtggcccgccgggtggctgcctggccgggggcatcgctatcgtagctcagcaccacttccccggtgtactgtgcgatgagccgactctgctcctccgtcagcgcggtgcccagggtggccaccgcgttggtaaagcccgcctggtgcatcgagaccacatccatgtacccctcgcacaggatcagctccttgcggtcgctgcccttggcgaaattgagggcaaagaggttccggctttttttgaataccggggtatcgctgctgttgaggtacttggggccattttctcccaaatttcgaccaccaaaggcgataacattcccccgcagatcgatgatgggaaagatggcccggttgcggaaaatatcataataaccgccccgctggccctcattggccaggtgggccgccagcagctcctctttggtgtagcccagctttttcatggcatcggtcaggccgttccagccctcgctggcgtagccgatgccaaagtgggtgatggtcgccttggtcagccctcgcccgatgaggtaagcccggccgggccggcccgcctcgctcatcaggttgcggtggaagtagcgggcggcatcccggtttagctccaatattcgttttctcagccgggcggagcggtcatctcccgcctcctccggcacctgcatcccggcccgctgggccaaaaagcggatggactccatgtagtccaggttctctatccgccggataaagctgatgacatccccgcccgccccgcagccgaagcagtagaaagactggttttccgggtagacggtaaaggagggcgatttttcgctgtggaagggacacagcccggaaagggtccgcccccgccgccgcaggttcacatagctgccaatgatctgctcgatatcgctgcggtatttcagctcctgtaaaaattgatccgggatcacagcggtccctcctttctctttggggtggattttgggcaatttttattatggcctgtagtcgcctgcggcggggggccaatttgtagtcgccttcggcgtcgcggggccttttgcaaaggcatagttagcaccgctcgccgcgggggccttccttttgctcctgcaaaaggaagcaaaacagggcaaaggggaaccaagctttcccctttgcaaacccctttgacgcttagctgtgctggatacgaatattgtttttccctaaataatcgggaaaaacaaatccgtactgcgcacagatgcgctccaaaggtagccacggcgtatttgccccctccgccttgcggtacccgaaaagaacttcgcgctgctcgcttgct

SEQ ID NO: 1317 - DNA, 7903 bp, Unknown
  16S sequences of unknown bacteria
cggggtctgccgggtcctcgccgatgctgacgtcaatcttgatgccgtcgcggcggcagatgacaccgtgcagggccaggggggtcgtcgtccactggtattttttgatgccgccgtagtagtgggtcttgaaatagcccagctcgctgtcctcatacatggggttgggtttgaggtccagacggggggagtcgatatgggcggcgcagatgtgcacgccgtcggccagggagcgcttgccgatgacagcgaagaggacgctcttgtggcggttgttccaatagatttttgtgccgggcttcaggcgcataccgggggtgtatgcggtaaagcctgcaccttcggccatgcggatggtctcggtcacggcctcgcgctcggttttcgcggcgtccaggaagtgcatgtaatcctggcagtaggcgcgcatcgcggcgcggtcggtctcggacagacggtcgtagccgttcttgggggcgtacagcagctgctgacgcagggtttcattctcgctcacagtgaaaactcctttcatgtaacaactcggtgaataattgacggcaggcggcttcaaaggcggcctgggtcgaatcgttgtgcagggtgtggcggcatagggccgaaaattcctcatcggtgcgctgggcgtcgatcctggcttgggcgtaggcgggggagatgggctcccgggccagcaggcgggccaggcgggcttcctgcggggcggtgatggccaccgtcgtgtggcacaagagcgtcaggccgctctccagcaggccgatggcgtcgatggcggcggcgggatactccttccgggcggcttcgtccagcaggaagctgaccttggcaaagacatagccgtttgtgatctccgtcaggcgctgcagggcggcttggtttgcaaagacaagcttgcccaattccttgcggtcaaatacaccgccgggtgcgcaggcgggaaaggcttcgacgatctctgcccgcagcgcggggcaggtctcgaggagctcatgatagacggcgtcgcagtcgatgcagtaggcgcccagctcctgcaggatatgcagagccgtcgtcttcccgcagccggtgccgccggtgatgccgatgatcttcatacgcttcctccctccacggcgtttacgatatgaaagcctgccgctttcttgagccggttctgcacggcgtaggccatgccgccgccttcggggcagcgggcgtagattgtcccgcggcaggtgctatcgagctggcgcagggcggcaaacaggccctggcagagcgtcgccgggtcggcctcctggccataggcgacgggctggagcccggcgtagagcggcgcttcctcggcaaagcagaggacggcgtcgcccggggcgaagtgggcgtggatataatccgccgccgcctggcgggggccggtgatgatgatgacctgggcctcgggggcgtagtggcggtatttcattcccggggccttggggcggacgtcggcgctgcactgcccggcgacggccgggtcgatctccagctggcccagggcctggcgcagctgctccggcgtgatgccgccggggcggagcaggcagggaaccgggccggtcaggtcgacgatcgtcgattccagaccgacctggcaggggccgccatcgacaatggcggccaggggaccatctgtcccgtaatcgtggaggacgtgctgggccgtcgtcgttgagggcttgccggagaggttggccgagggggcagcaatggggatgcctgcttggcggataatttcccgggtaatggaggaggccgggcagcggatggcgacagttggcagaccggccgtcgtcgcggcggggacgatctgccgggcgggcaggatcatcgtcagcgggccgggccagaacagccgggccagataccaggcgctgtcggggatatggtggcagcagtggtccatcttgactgggtcactgatgtggaggatcagggggttgtcctgcgggcggcccttggctttgaaaatgcgggcgacggcgtcgctgtcgagaccgttggcaccgaggccgtagacggtctccgtcggcagggcgacgagttcaccgtctcgcaggagctttgcggcgatggctgcggtatccggcgcgctggccgggagaagttgggttttcatcagatgttcgtcctttcgccgccctcgctgcgctgcaggcgatcggcttggtcttgggtcatgagggcgtcgaggatctcgtccaggtcgccgtttaaaatagagtccagcttgtagagggtcaggccaatgcggtggtctgtcacccggccctggggaaagttgtaggtgcggatgcgctcgttgcgcatcccggagccgacctggctgcggcgggcggcgtttgtcgccgattcgacccgctcctgctcgatctgatagagcttggaggccagcatggccatgcacttttcccgattctggacctggctgcgctcctcctgacaggcgacgacaatgcccgtcggcttatggatgagccgcacggcggaggaggtcttattgacatgctgcccaccggcgccggaggcgcggtagacttgcatctcaatgtcctccggccgcagctcgacatcggcggcctccatctccggcaggacggccaccgtcgccgtcgacgtatggacgcggccgccggattccgtctccgggacgcgctggacccggtggacgccggattcgaatttcagccgggagtaggccccggcgccgctgacgaggaagtcggcttccttgataccgcccagctccgtctcggtgtagttgagcagctccagtttccagccccgcgcggcggcgtacatggcgtacatccggaaaaggctgtgggcaaacagggcgctctcctcgccgccgacgccgacgcggatctccatcaggacatttttctcgtcgttcggatcccgcggcaggagcaggagcttgagctgctgctccagttcctcgcggcgcgctttgttttcttgatattcctcctggcacagggctttgagcgcctcgtcctgctccccggccatcatggcaagggcatcgtccatattctgagcgcaggcgcgccaggcgcggtaggcggtgacgatgggctccagctcccgctgttccttgaggaatttagcggcgcgggccgggtcagcgtagaaatccggctgctcggcccgggcggagagctcgaggtatttattttccagctgcttaagtttctccagcatggcttggctcctttgcggcgcggaacaggcggaagaccacctgggccgtgtcctttaaagtttcttgcgcggcggcggcttcggccccggccctggtgatgcgccagtaatggggcgtcatcgccaacagatcctgaatctgctgcggggcggtcagggtgaaggaaaacgagagctcccgctcctccaaaagggtaaagcccgtggggatgggcggatgcttgggccggtgcagcagcgcagggtagatgagccgcttgaggcccagcagatgctcctcccccgccaggacctgcaaaaacaggccgccggggcgcagcacccgagcaaattcctccgccatggtcagggcgaagagactgagaacggcatcaaagcagccccccgggaagggcagatgggccgcgctggcggcgatccaatgcccggagcgatagcggacggcggcgtagcgcaccgcgtccttggagatatcgatgccccagagctcggcgtgcagcgcctgggccagggcggcgctgtaatagccctcgccgcatccggcgtccagcaggctgggccggggcggcagatggggctgcagcagggccagggccgtgtcccggatgggggcgtaaaacccggcgtccaaaaaccgcttgcgggccgcgacctgggccggggtatcccccggatgccgggcgtgcttttgctgcaccggcaagaggtttacataaccctgccgcgcgacgtcgaagcagtgcccgttcgggcagcgccagggtgacgtgccggtcgcaagcgtctgcccgcacagggggcagatggggtttggcatggctttgtcgctcctttccggcgggggtccttgttggggggcctggcctgccgcgggctgcggcgggccggtgggtattgtaccgcagggcaggcggtgtgttaaatggctgggtggcgggcggcgtcagaatttgccgccggagctgccgccaaaaccgtcgcggtcgacaccgccgccgccgtggtcgttatcccgctcgatgcggcggcgggactcggtgcggaagaggaaggtatcgtgctcgtgggtgagctggaagccgccctgggggacatagttatcggcctgggtagcggtgcgggccgtcttcatctgaccgcgccagatcaggcagacgatgagagcgatgacgaaggcgatgaggaaggcaatggccaagtgcgagagggggaagtagaagccgctgtggtatgcactgccgtcattggaatcgtagttcgtgtaatcctcgctcccggcgtccggcgtttcaagatagtttgcgcaggtgtcgagataagtcgaaaacgcaccggtgtagtcgccgtcggagaggctggggacaacggcgtcctccagtgcctggacgcgggcgtcggagaaggcggtgatgccgatgccgtaggtgctgtcatcgtccgggtccttcccgtaggtgacggtgacataatcccggccctccatggagatgcagaagagaatgccgttgcgcccgtcgccgtagtccagggcgtggtcggtgtagtacgccttggcaaagtcccggatggtctggctgccgatggaatcgacggtcagaacatagacggcgcagctggtgctgtcggcgatggactgggcctgcttctccagggccgtttcttcgtcataggttagaagcagcgcttcatcgcggatgtacggcgcgccgtcgctggccagggccgggagggcgagcaggagcgcagtggccaccaggagggccaaaaggatggaaagacgttttttcatcgttgccgccccctttcaaagcaggaagaagtagtccagcgccgccagaagcagcgtcaggatgccggtcatcccgccgagccaggcccagaatttcccccgggagacgggcagatcgccgatgagcttacccgtctgcccgttcatggcgaagaggaaatccttgtcctgccatttcgtgtgcagcatccagactggcagcagggcgtatttcaccgcgccccggtgcaggcggatatcctgggaagcgacgctgacggtgctgtagcccttggcggtggctgtcagcatacggacggtggtgttttccgcccgatgctcggcccggggggcactggcgttggcatcaacgtcgtatttatcggccaggtagccgggtaagtaagccaaggtgaagggctccagaccgctgaaatcgaagggctcgatggcgtccatatgggcgtcaggcattttggtggagccgtcgacggggatgcgctcgaagcggcagcgcccggcgcggtcgagctgatagtgctcggtgatcgtcacttcctcgtcgtttgttgaataggaatgggtgcgggtggcgtccagctgcacgctgccctcggattcaccgtcgaagagccagaagggaacgtagacgccctgcagcttttcgatctggttgtgggtgcggaaggatttggggaggaagcgcttttttctatagtatttttccaaagcggcgatggcatccttcttttccaggcggaaggggagaacatagtccggccgcagggcgccggaaaacttaccggggatgaccgtcgggttgccgcagtagacgcaggcggtggcggcggtcgtttcgtcgcagatgagttccgcgccgcaggaggtgcagacataggtacgcagcttcgcggcctcggattcgtcccactgggtgccggcgctggcggtgtcccaggcttcctcctgagggggctgctgcgcctctttcgcggcgttctgctcggcttcggcggcttttttggcgtagagggcttcgatctcgtcgacggcaaattcggagccgcagtagtcgcaggacagtttgccggtcgcgctgttatagtgcaggggcccggtgcaggacgggcattggtaattgaccgtttgcgttgccatggggatgcctcctgtgtttttcagaatttagaatggggtgggctgggcatcagccttgagaaaagggggtgccgcaggatgggcaaaatttcggggtagcctcgccgtcctttgctttccagccgcacttggcacaggcgtgggcgaccggcttcggcgcgccgcactgggtgcagaagcggccggtgttctcctggccgcaggcacaggtccagtgctcggggcgcttggacccgcaggcggggcagaagttgccgtggaccgtttcaccgcaggtgcactgccaggcatcgtccgcaggcttttttgcgccgcactgggggcagaaattgccggtggccgtgtgcccgcaggcgcaggtccagctgccgggggcggcttgccgcgcctgctgcgcttgctgctgcgcgcccatctggaagagggactgggcgttcatgccacccatctggcctgccatatttgcacccataaaggccatggcagggcctgcagcttcattggctgcggcggcttgcatcgctgcagcctgggcgccgacgagggtcgcggctgccatggttgggttctgcagggcagcattgcgctgcagctgcttaatcatctgctcgtcttcctcactggccttgacactggagacgccgacggagacgatctcaatgccccggagcttgcgccacttttccgttaggacgtcgttcaaggcgccggccagctccagggtgtggccggggagggcggagtagcggatgccgaggtcggagattcgggcaaaggcgggctgcagggctgtaagaagctccgttttgagctgaccgtcgagggtatcacgacgataggcgtccgtcacattgccgcagacgttggtatagaacagcagcgggtcacaaatccggtagctgtactcgccgaagcagcggatggagatatcgacatccaggccgacgttctgatccaccacccgaaaggggacggggctgggggtaccgtatttgttgcctgtcagctccttggtattgaagtaatagacccgctggtcctgcggggcctggccgccaaactggaagcgcttgccgatgctggcaaaggtatccagaatgctctggctcagctcgcccgcaaacagggagggctctgtggatgcatcaaagacaaattcgcccggatcggcgcacagctccacgaccttgccctgctcgacaatcatcatgcactggccatcggccacggcaataacggagccgctggtgatgacattgtccgtccccttgcggttggacgagcggctggaggtccgcttttcgcctttgacggcgagaacatccgcatccagtgcgtcacagtaaaaatattctttccactggtctgccagtacaccaccggcagcgcccagggcagctttgatgagtcccatgtatggttgctcctttcgtcaggtcgaaaaccgccggggcagttaggctcgggcggatggatatttgaaaaaatcgcgtttccaacgccattataacatagatcccacggatttagaacagggtttggggatttttggcaaaatttgtatggattatgggatgctttgcggggcaaacgccaaactaggcggcgatagactgccttgcgtgacggaggacggcctgggtcggcggcacgcatcgcgcttgtgcgggtcaaaacactatgcccattttaccataccgccccgggccgcgcaaggcgcaaaaagcg

SEQ ID NO: 1318 - DNA, 10675 bp, Unknown
  16S sequences of unknown bacteria
ggccgccgcgctgatcatattcatcctgctgtttcgctccatgatgaaacgccgccgcaaatggttcgtctgggccagacgcctgctgatcacggtgctctgcgccgtcctgttcaccggcagcttttatacaggaaaggtcggaaagctgctcacggatatctcggccgatacagagatcaccaccgagatccggatactggcacgcaatgacggttccctctcttccctctccgagctcagcagcggcctgagcgtcggcatccagaacgggaccgacagcgccaacggcgaatatgccaagcaagcgctcgacgccgacgcgcccggatgtgtctatgacgaagagacctattacggcgatctgctggcctccctctccatcggttatctggacgctgtcgccatcagcgacacctattatgacatgatgatcgacaatgagaccatcagcgaatcagatttcatcacgctgaagacatatacttacacgcggacctgggaggatcccagcgacaaggacgtgaccaaggacagcttcgtcctctacatcagcggcatcgacgaaatgggatcgccggatcagaagctgcgcagcgatgtcaatctcctgctcatgatcaacccgcaggcgcaccatgtgaccatggtctcgctgccccgggatgcctacatccccaacaaggcctatgaaggcagcggcttcagcctggacaagctgacccataccggcctttacggcgtggacaccaccatcgagaccgtggaagatttcctggacatcgacatcgactactatgcccggatctccttctccagcgtcatcgagatcatcgatgtgctgggcgggatcgacgtggacgtggagatcgatttctgcgaacaggatgaaaaccgcaacaaggatgaagcgcatcagatctgtctggccaagggcgaacagcatctggatggcagacaggcgctcgcctatgcccgccaccgcaagaccgaaggctatgacagcgccggccgtgagcgcgcgcagcagcgcatcctgaaggccgtcatcgacaagctgctgtccgtggacggcatctcttcgctcagcaagctttttgacatcatcccttcttatgtgatcaccaacatgccttccgacaagatcgccgcctttgcccgggcgcagctggaggatatgcggccatgggccatcgagtcgctctcgctggaaaacggggtcaacacccatatgatgctgcaggcatcgctcaacgattattccgatgcctatgtcttcagccgccaggatgtccagtacatcgaatgggcatatgaatccaatgaacagcgtccgaagatgagcagcttcagcttcaacctgagcgatatcgccgccgggaccaagcagatcagcgacgatggaagcctggtgtggagcgatcaggtcattccatattaatatgtgaaaatcgtgtgcaaatcttgtaatatttgacaaaaacaggggtttccgcttattcccctgttttttttatttccattaaatagcgattcgtgtataattactaaaaggtgatagtatgcaaaataaagagaagaaaccgaatccgaaaagacgaagccagaggctggactggatcctgctggcgctgtgcctgctcagtgcggccctggcttttttcctgtgttaccggatgagcgtgctgccgacgcgctatctgaccatcctcggcctgatcctcgtgatcgctgtgctggtcagcttcctgctgtgcctgtgccggctgcgccgcaccgggcgctggatcagacgcgcgttcatgatcatcctatgcggcgtgttctgtttcggcgcatataccgcaaattccgtccattccacattctcgatcatcacgcgcaacgatccttcgatcgtcaaggtctccgtggtgacgcttgcggacagtgacatcgccgctgtagaagacctcagcggcaagacgatcgccgtgcagaacggcatggacaaagacaatgccgattttgccagagagcagctggatcaggaagccagcaacatcacatatgaagaagtgctcgactatctgaccatgtataacgagctgacggatggcaccgtcgacgccatgatcatcaccgacagcagcatctcgctgctggaagatcagcacagcgatatccgcagccagatcaagacgatcgctacttatgagcgggaaaacgaatccgtcaacaccgcgacgaccgacaaggatctgcgaaacgatccgttcgtcgtctatctgggcggaatggatgaaggaaccgacccgagcatcgacggcaagtgcgacgtcaacatcctgctcatggtcaatccgaagatcaacaagatcacgaccatctccatcccgcgtgattcttatgtgcctaatccggcgctcaactatggcagcgacaagctgacgcacctgggcaacaacggaccggagaacagcattgccggcatcgaagaattcactggtatcaacattgacttctatgccaaggtcaacttcttctccgtcatcgagatcgtcgatgccatcggcggcgtcgatgtcgatgtgcagctcgatttctgcgagcaggatgaaaaccgcaacaaggatgccgagcatcagatctgcctggccaagggcgaacagcacctcaacggtcaggaagcgctcgcctactcccgtcaccgcaagacggcaagctggggaacgcagggacgcgaaaaggcgcagacccagatcatcgaagccatcatcaacaagctgacctctgtggagggcgcagccaacgtcaacagcgtcatgagcatcgcgcagcagtatatctccaccaacattccgatggattcgctgacgagcttcctctcctatcagctggatcatctgaagccatggaccgtggagggcatcacgctcaccgatggagtggacggctattacacgaccgtcagcatcccgagcaccccgctgtcctgccacctgctgacgcaggaagacgcgcgcatcatcaatgcggtctacaacagcatgtatgagacgccggacatgagcaagttcaccttcgacctcaatgacctgtccttctccgatgtcgagatccaggacagcgaatacatgatctgggccgaggatgccgccagcctggattcctctgccgtctacttcggcctgagcgaaccaagcgttcagcagcagtacacgccggaatacgaagaaatcccgcaggagacgaccgatcaagttcaggacagcgatcctatcgtacaggatccgcaggaagatgtgcctgaagaaccgacagaaccagtcgttccggaagatccatccactgaagaaccgggcagcggagacgaaggcggatccaccacgccgccatctaccggcgatggcgatcagggaagcggatccggcggagacaccggagatggatctggatcaggtaatggcagcggagaaacccagccgcctgaagttcccgcacaatgacacacgacaaggaagaccagcgcgtcttccttttttcatgcagaaaaaaagcgggcattcccgcttcgtctcatgcctgataggactgctgcgccgatccctcatgacgctcgcactgcttcaggcaggcctgaaggtatggcagatcatccggatcgcgcacatagatctgaatggacagcttctccttgccatggcgaaggaccgcgctgagcagcgtatgatcttccatggcagtcacctgacagctgcctttcaccgtatcattctcccagcgctgtacatcctgcccttccgcaagatcaccgtgcgcgctgatcttccacatccatttccacatctcatgcgcctgcgcataaggcgccatcagatacagctcatcattggatgcgtcatagctgcgctcacagcagccaggggcgtatatgcgccattcatgaaagagatgatagacctcatgcaggcggtactgcacgatttcctcgtccatctgctccgcgtccgcaaaggccgcttcccgatgcagcgcttggcagatcatctggtattcgttgtaaggcagggccagctgaggatccttcgcatgcgcgatctccacataatcggcgatctccgcagcatacttttcgctcatctcgttcatgggcgcatatgtcccatagctctccttggccagcagatgcagggcacagctgcggtaatattccgcatcccgctcttcatcgttccagatgaagaagcagcgcgccaggctttcctcatccatcgcctccagctcatggcggtcgagaaagcccatcggggtggcgaccacatcctcccgcacatgcggcagataatccgaatggtcgaaataatagttcttcgtccgcaggtcttcctccaggagcatgcgcttgagatcgagcagccatgggtagaaatgctcatatttcagcttgccgaagtcgccgtgctccacatagccgcagtcatcgctcagcgtgcacggcgtctcgcactcctctgcgagccactccaggatgcgcacgcagcaggcgtgaaagccaggaccgcccagcgtcgtatctgcgtggatgcggatctcaccgccttgttcccagcattccagcgtcccttgcggacaagccttcacgatgaccctgtcctggcgctcttcgatctgcagatgctccttttccgcgatcagccccatcacctcatagatctcatttttctgtttttccgtctctgccctcgctctgagcattaccttcatgttcattcctccttcaaaaaagaactgaatcgcttcagtccttttttaactcagtgagatgacgcggaacagattctttgcctccgggatctcctccagttcgccggattccatctcttcccgcgtatcgtgatcataatcatccatgcgtgccagacgcagcgtgacctccgtcttcaggtcgctcacgctcgtatccgcatactggatctgcgcggacacctcatagccgctgtaagtatccacgccgtaagtgacgtctgccggcgtgatgctggtcacttccaccccgaccacggcaggcagctgatcttcgccctcgttggtcttgatgtctgaataattgttatagaaataatagcgcgcatacagcgacatgtcgtcatatgacgctgaggcaatgtactccagcccgccgacatccgtatccgccgtcttgttcgacagcgtgaagaaatccgcgatgaatagcttggcgactgcctctgcttccttttcctcgtccgcttcgttgagcgcgctgctcacttcgtcgtaagcagtcttcatgtatgcggtcggatcgtccggcaccagatagacatcattctccgtgatctccaccggctcactgtcggtgttcttgtctgtctcctgctgcgcatcattgcagccggtcaacagcagggcacatgcgcccaacgccgcgagcgagcgtttcatccaatgagacatctaatccctccattaaaatataacaaaacaagtataccatattcctgtatgaaaatcatcgcgaaagtgaaaaaacgtcgatcacagcgctgctttcagcgtctccatcatctcctcgtcgctcgttccgccaaattccatatactcgctgctgccgccgcctttgaaatgcagctgctcgaccagcatcctgcggatacggttcaggtcataatcgctgccatgcccgcgtgctaagacgaccttgtactgatcgtccgcatggcccacgaagcagacggcccgatcggcgttctccgccaccatcttcgccagctgacgcagatcgtccggcgtatactcctcatattcccggaagacgcaggcgccctctgtctccagcacgtccctgcacaccttatcgaaatatctgtgcttccactgcttcagctccttctgcagctgattgcgctgagagacgacgcgggagatgccggtgttcagatacagatgcgggaccgccagcgccgtgcatgcctcatcgagcacctcataacgccgcgtgacattatccagcagctgatcgccgcacgcatagcggatacggatgccccgcgagctcttctcaaagccgatgatctgcagcatctgcagatagcgaagcgaaggcacatgcatgcagccgcacggcgtcacatcgatgttgccgatgcgcacgaggcgggtatcctcctgcggcagcttcttgtccggacaaagcgtcttggcatcgcggaatgaaggatagatgatcttcacctccagatcatcgcggatcagcccgttgcaggtcacctgcagctcgatcgccttcttccggtcaaactctggcagatcaaattcgacatagcactcttcctcgccgacatgatgcgatgtcgtatgcaccccatagatgctctccaccagcgccgagatcagatgctgggccgtatgcgcctggcatttgagaaagcgggtatgcgggttcacgttcatgaacacctgtccctccagcttctcttccagcaagtgccaggatctgccttcttcctgcttcagcgccaccaccggcttcttgttgatcatgccggtgtcatctgccatcccgccttttccctgatagaaaatggtatccttgaagcaatgccagtacatgccgttttcctcacgcacttcttctactcttgtattcagctcggtcaaaaagcagttatcgagcaatttattgatcatatcatgacctccttttcttattcgttgaattcatgccgcttttattctatcacattttattcttcgtattttcgcattctcagtccacaattatgtgaaatattgtgttcatcatccgcaaaccatgctataatacgcaaagaaatctggagaacaggagtgaaacgccatgaatcagatcgcatcccgctgggaagattacgaatgcatcgatgccggaaacggagaaaagctcgaacgctggaaggacatcatcctgcgacgtcccgaccctttggcgctgtggccgatcgcagaggaaagcggcctctggctgcagccccatgcccgctatcatcgttccgccaaaggcggcggacactgggaatacctgaaacagctgccggaaagctggaacgttcgttaccgccagctctgcttcaaggtcagccctaccggcttcaagcacaccgggctcttccccgagcaggcggccaactgggatttcatgatggagaagatcgccggcaccgacagagagatccgcgtgctcaacctgttcgcctacaccggcggcgccaccatggcctgcgccgcagccggcgcgcaggaagtcgtccacgtcgacgccgccaagggcatggtgcagtgggccaaggaaaacatggtgctctctcatctggaagaccgccgcatccgcttcatcgtcgatgacgtcctgaagttcgtcgcacgggaaaagcgcagagggcggacctaccacgccatcatcatggatccccccagctatggccgcgggccgaaaggggagatctggaagatcgaggaacagctttatccgctggtcagcgcctgcctggacatcctggatccgcatccgctcttcttcctgatcaactcatatacgaccggcttcccggccagcgtgctgcgcaacatcctctcctccaccgtgctccgccgccatcctgcgggaaaagtggaggccggagagatcggcctgccgctcagcgcttccgatatgatcctgccctgcggcatctatgggcgctggatcgaagaatgactgtcccggacagtctttttttgtaagtattttctcatttctttcatcatttacaaaaatagtgaaatttctttcttcggtgctcttgacgaaaccgcaaataaggactactcttaaaacagtaagtttgaaaggggtaatcttatggagatcaagatcgaacgcgcgaagacgctgaaaccgaaaccggccgccaacacagagctcgggtttggaagatactacactgaccacatgttcgtcctggactgggacaaggatcagggatggcatgatgcccgcatcgttccattcgcaccgatcccgctcgatcctgccaccatggttctgcactatgcgcaggaaacatttgaaggcctgaaggcctaccgcacgaaggacggccgcatcctgctgttccgtccggagatgaatgccagacgctttgccaattccaaccgccgtctgtgcatgccggagctctctgaggagatgttcgtcgaggccatcgaagcgctggtttccgtcgaacaggactgggtccctgccgaggaaggcacttccttgtacatccgtccgttcatgttcgcgacagaggctgccgtcggcgtgcacccggcatcttcttataaattcgtcatcatcctctccccggtaggcgcctactatccggaaggcgtcaacccggtcaagatctatgtcgaggatgaatatgtccgcgccaccaagggcgggaccggattcaccaaatgcggaggcaactatgccgccagcatcgccgcccaggtcaaggccgaacagctcggctacacccaggtgctgtggctggatggcgtggagcgccggtatgtcgaggaagtcggcacgatgaacgtcatgttcatgatcaacgatgagatcatcaccgcgccgtgcgaaggcaccgtgctgccaggggtgactcgcgactccatcatccagatcctgagatcttggggatatcaggtcagcgagcgccatctcgccatcgacgagctgatgcaggccggacacgacggcacgctgcaggaggcgttcggcaccggcaccgccgccgtcatctccccgatcggcgaactgcgctatcgggatgatgaagtgatcatccatgactttcagaccggagagctgacccagaagctgtatgatacgctcaccggcatccagtggggcgacatcgaagacaccttcggctggacaagagaagtcaaataaaagcgatcacccgctgcggcgggtgatttttcaggaggaagacatgaatctcatctttgatctcgacgatacattatatgatatgatgcagccgttcgtccgcgcctgtcacaccatctgggaagcaccgctgccctttgatccctgggcgctgttcatccgctcccgccgcatctctgatcagctctatcccctgatcgctcaggggaagatgagcgtggatgaagtcggcaccgcacgcatcctgcaggccgcgcaagagctgggcgaagacatcggcgaacaggctggccgccgtttccaatatgaagcgcagctcagcgatgagatgcgcgcgctgctggatgagctgtcccgctcaccgctgaccatcggcatcctgaccaacggtcctgccgaccatcagcgccgcaagatcgaagggctcgggctgacgcgttggtttgcggaagaccacatcttcatctccggcgtgatcggcatgcaaaagcctgatccccgctccttccttcatgtccagcaggcgctggggctcgacccggcccagacatggtacatcggcgattccccttcctgcgatgtcaagggcgctttggacgcggggtggcacatgctgttcttcaaccgccgcgcacaccgcatcaccatgcatccggacatcaccatcagcgatgagcatatgctcatcgactggatcagaaaagccgccgttctgcgctgaacggcggctcttttctttatttcgcgtgcttcaggaaagcctgatagccgcgggtggtctcatagatgtcggccttggagctgatctcccaaggcgcgtgcatattgtgcagcgccacgccgcagtcgatgacctccatgccatagttggccaggatataggcgatggttccgcctccgccctgatcgaccttgcccagctcgctggtctgatagcgtacgtcttccttttccatgatcgcgcgcagctcagcgatatattccgcgttggcgtcgttgcagccgctctttccgcgggcgccggtgtacttgttgaagacgatgcccctgccgaagtacgcgcagttgttcgtctccatcacgccggcataattcggatcgaaggcagccgagacatcgctgctgagcatgcgggagctctgcagtgccctgcgcaccttcagctcggaataatcgccgagcgcgttcatcacctcggccagcgcattgacgaagaaatgcgactgcatgccggtcgcgccctggctgccgacctcttccttgtccacgagcaggcagaccgccgtcttgtccacatgcgtcatcgaaagcatcgccttcaatgaagtaaaggcacatacgcggtcatcctgtccatagcccaggatcatcgaccggtcgatgcccagatcgcgcgcggcgccggccggcacgacttcgatctccgccgagacaaaatctgcctcttcgatatcgtaacgatcagcgagcagcttcagcacattggccttcactttgtccttctcttcctttgccagcggcatggagccgaaggtgacgttgaggtcctctccctcgatgacggacgctgcctttttctgcatctgatcgcctgcgagatgcacaagcagatccgatacgcagaacaccgggtcatcctccttctcgccgatattgaccatgaccttcgtgccgtccttcttcacgatgacgccatgcagcgctaacggcagcgtcacccactgg

SEQ ID NO: 1319 - DNA, 1743 bp, Unknown
  16S sequences of unknown bacteria
aaatgattttgactttatttgcgccgtgcgcggcgcaaactctgcgaggctttttgaggcttttttattgtctgaggtggagcctttatgagagtatacccgttgactgcaaaaacagcaccagcatcataattggcaccacataccggcggcagtttgaaattttttccggaaatttaaatttcctattgacctaatgggaattttgtgctatactcgcaccaacaaaaacagatcaaaccagtagggaataggaatggaggcagcgcatgcggctattattgcaccgcctgttgcggcaaaacttccgctttggccgaatgcgcggggcgttttaagagaataaaagaaaacgacccatgcggagaaaggatgttaccccatgaaacagaattataaatttgagaccttgcagctccacgtcggccaggagcacccggacccggcgacggacgccagagccgtccccatctatgccacgacgtcttacgtcttccgcgacagcgcccaggccgcgggccgcttcggcctgacggagcccggcaatatctacacccgcctgatgaacccgacctcctccgtctttgaggagcgcatcgccgccctggagggcggggcagccgccctggccgtcgccaccggcgccgcggctattacctatgccatccagaacatcgccacggcaggagaccacatcgtttcctcccagaacctctacggcgggacgtttaacctgatggccaataccctccgggagcagggcctggagacgacctttgtcgacccgtctgacccccagaatttcgagcaggccattcgcccgaacacgaagctgctctacgccgagagcctgggcaaccccaattccgatgtcattgacctcgaagccattgctgccgtcgcccacgcccacggcatccccctgatcgtcgacagcaccttcgcgacgccctatctactgcgccccatcgagcacggggccgacatcgttgtccactcggcgacgaagttcatcggcggccacgggacggtcatgggcggcgtcatcgtcgattccggcaaattcgactgggtccagaacgataaattccccggtctgacccagccgaacccgtcgtaccacggcgtcgtcttttcagaagccgtcggcaatctcgcctatctcacgaagatccgcacgactctcctgcgggaccagggcgcaacgatctcgcccttcaacgccttcctcctcctgcagggactggagacgctgtcgctgcgggtcgagcgccatgtggaaaacgccctgcaggtcgtcgactacctcaagtcccacccccaggtcgagcgggtgaaccacccgagccttgccacgggccacgcggcggagctttacaaaaagtacttccccaagggcgcggcgtccatcttcacctttgagatcaagggcggggaagcggcggcccggaggtttaccgagagcctgcagctgttctccctgcttgccaacgtcgcggacgtcaaatctctggtcattcacccggcctcgacgacccactcccagctctccggcgaagagctcctggccagcggcattcgtcccaacaccatccgcctctccatcggcaccgagcacatcgacgacatcctcgccgacctggagcagggcttcgcggcggtgaaataaatgctttcacaacacccatttctttcctctcttgtgtgtttccttacaaatgagcaaaaaccgacccgggcagc

SEQ ID NO: 1320 - DNA, 4830 bp, Unknown
  16S sequences of unknown bacteria
gagaagtatgaaaaggaaaaattccggtatacgtcgaatacggatgaactcaccagatgttacaacaggcatgcgtatgaagaggacataaacagccttgaccttgataaggaatgggtgtatgtttctatggatctcaatggcctcaagcgtgcaaacgattccttcggacatgcagccggagatgagcttatacgggcagctgcagattgtatgaaaaacagcttcagtgaacatggaaaggtttacagagttggcggagatgagtttgttgttatcgtcacgaaggatgtatcgcagtttgaaaatattctgagggcatttgagcaacgtgtggcaggctggcatggagcattcgtggagtcaatgacagtatcatgcggatacgttttcagttcggaaagaaaatgggacagcatttttgagatttccaaggtttcggatgaaagaatgtatgagagcaagaaacaatattacattagaaatggaatagacagaagaaaatgattattggagatattatagtatgttcaaatataacttatagtttaaaccccgtatcctggaagatggaatttaaatgttcggaaccagaagactctttttatgtttatatgaattctttagatgttgatgagttaatatcattaggagaaaacgtgaaaaaaattgtcaatgatgaagaaaaagagtatgacggtgagaatgaaataggtaaaattcatgttgaaaaggattttacaatcatcgaatcatatgttccgggatttgaaccatcaaaactaaaaaccaaatattttttaaacataattgtatgtgttttaattaattatgaaatattagaagatgattccattttagaggaatgtcctagtattaataattacatctattcagtaatccgtgatcgtgtattaccggaaaaccctttaactacattaaaaagggcgggtgtggatgaaaaataatgcagttgcatccacaaatacttgcaaatcaaaaaagatatgtgtataatgatcagaaaatagggagctcatgttgctctctgttttttgtgtgaactgggggcaccacttttcacagaacagttcaggcgccggacaatgcagaaagtgtgttgtccggtgccttttttgatatcataagtgagataaattcactcatttatacggtgttaaaaaggtgaaaggagtatgagaatggtaaagctgaatggagaggagaaggagcttgccgggaagaatcttctggagtacctgaaagcggccggattcaagccggagcaggtggtcgtagagcgcaatcttgagattgttccaaaggaacagctgggctgtgtaacgattcaggatggagatgtgattgaagtgttgcactttgtcggaggaggctgagaagatgacggaaatgcaaaaaagaatgcaggaactcatttcaaaggaagcactggaccgtgcgtttgatgccagatttccgaaagagatgcaggaaaaactgcgggcagcaaaagttgcagtcgcgggacttggcggtctgggatcgaacattgcggtcatgcttgcgagaagcgggatcgggaaactgcttctggtcgattttgacgtggttgatgtgacgaacctgaaccggcagatgtactttataccacagcttggaaagccaaaaacagaggctttgacagagctgctggttcagattaatccatatacggaatatgaaacagtttgtatcaaagtaacgccggaaaatgtaaaggaattattttcggaatatccaatcgtatgtgaggcatttgacaggccggaccagaaagcaatgctggtacgggagcttctcatccggtgtccgaagacgacagtcgtatcgggaaacggaatggcaggatatgcagatacaaacgagatcagaacgcagcagatgatgcagcggctttatgtgtgcggggatcagggcacggaggccagtgaagggaacggactgattgcaccgagagtggcggcctgcgcggcacaccaggcaaataaggtactgcaaatcgtctgtgactaagaaaaggagaccaacatggaagacaaatttatattaggcggaaaagagtttcagagtcgttttattttaggatcaggaaaatataacctgaatctgattaaggcggcggttgagcagggcggtgcagagatcattacccttgcgctgcggcgtgccaatacaaaggagagtgagaacatcctggattttattccggaaggggttacattgcttccgaacacgtccggagcgagaaatgcagaagaggctgtgcggattgcaagactgagcagagctatgggatgcggaaactttgtgaaggttgagattatgcgtgatgcgaaatatcttttcccggataattatgagacaatcagggcgacagagattctggcaaaggaaggatttgtcgttttgccttatatgaatcccgacctgaatgtggccagagatctgcaaagtgccggagcggcagcggtcatgccactggcagccccgatcggaagcaacaagggactggcgacaaaagagatgattcagatattgattgacgagattgatctgccgatcatcgtagatgcgggaatcggaaagccatctcaggcgtgcgaggcgatggaaatgggcgctgcggcgattatggcaaatacagcaatcgcgacggcaggcgatgtaccggagatggcgaccgcatttaaactggccattgaagccggaagaaaagcttatcttaccggaatgggcagagtacttgccagaggtggaagtgcctctgatccattgaccggatttttgcggtgagaggagaacgggaaagatgaatgaagaaaatcaggtgtattttgtagacagcgataagcttccggcggctgcgctggagagaaagcaccggctggagcaggatccgtccttccgcaccaatcatatggaatacatggaaggaatgcaggtcattcaatcggatatcaaagagaaggtgcttcaggcaatggaggaatatgactacatgggctataccgccgctgacgtggagcgggcactttctcatgattcctgttcggtcgaggatttcaaggcgcttttatctccggctgctgcgccgtacctggagcagatggcaaggaaagcggaggagattacccagaatcattttggaaatacggtctatatctttacaccgctgtatatcgcaaattattgccagaattactgtatttactgcggattcaactgttacaacaatatccggcggaaaaagctgacgtttgaagagatcgagcatgaaatgcaggtcattgcccgaacaggcatggaagagattttgatcctgacgggggagagccgcgcatattcggatgtgaagtacattggggaagcagtgaaaattgcgaagaaatattttaaaaacatcggaatcgagatttacccggtgaatgtggacgaatatcagtatcttcatgagtgcggcgtcgattatgtgacagtatttcaggagacgtatcataccgataaatacgaaacgcttcatctgatgggacataaacgcgtctggccttaccgctttgattcgcaggagcgtgcgctgatgggaggcatgcgcggagcaggattttcggcccttttagggctggatgatttcaggaaggatgcacttgcgacggcgctgcatgtctattatatcaaccgtaagtatccgcatgccgagctgtccctgagttgtccgcgtcttcgcccgatcgtgaacaatgataaaattaatccaagggatgtcggagaaaaggagctttgtcaggtgctgtgtgcataccgcatcttcctgccatttgcgggaattaccgtgtccagccgtgaaagtgccgcttttcgaaacggaatcacaaaaatatgcgcgacaaaggtttcggcaggcgtttccacgggaatcggcgatcatgaagaaaaatacgagggcaaagaggatgcagacgtcggagatgagcagtttgagatcaacgatgaccgttcttttgcaaaaatgtataaagatatggagcagggcggcttgcagccggttctgaatgattatatttatgtgtagatacgaacataccattgcgatcacaaaccgaacgctggtgcagggagattttctggaacaaatgaaaaaggtgattcgtctgcatccgcatgcggtgattctaagagaaaaggatctgccggatgatgcatataaagcattagcagaaaaaattctgcctttgtgcgagcgggaaggagtaaggtgttttctgcactccagagtttcgattgcacgcaatctgggatgcagacggattcacctttccattccggcgcttgagacgatgagcgaggcggagcgcttcgaactgcagcggaattttgaggagatcagtgtctcctgccacagcctggaagacgtaaacatcgccgtgaaaaacggagcgactcagatcatcctcgggacaatttttgaaacagactgcaaaaaagggctaaaagggaaagagattggctttgtcgaagcgatctgtaaagcctgtccgattccggtatatgcaatcggagggatcaatctggagcgcctgccacaggtcagaaaggcaggtgcggcgggcgggtgtatgatgtccgggtttatgcagcttgtcaaaaactgacataataaatgatatcatgcaaaacgatgcctgtacctgctcttttgttatatcagttatgtacgagcgccttttgaacgcagataagtattcccccgctttattgctttgcgtaattgaagcaggagacttgcttgattcg

SEQ ID NO: 1321 - DNA, 32759 bp, Unknown
  16S sequences of unknown bacteria
attgtggctctgggggccgtgggttcgaatcccatcatccacccttgaaccgtttggtcgatttcgattggcagacggttctttttttatcttttttccctctccaataacacaaaaacaccggctcgggctatgtattatccgaaacacagctccgtccggtgattttttattctattgtcactctaagtgaacgattttctcttgcgctgtcgcagagcactttttttatgcatccggcatagcaggggagatttttttcaagctcggcgaagtttttcacgagaatcacgccgctcctttccgtcagaacatcgtggagcgcgtcgagattttttccgaaatacggcggtgtaatcccgtcaagtgcggagaaaaactcgtcctttgagtgaatctcgccgcagtttactgttatgtatatcactcttccccaccgccctcgtaaagcatatcaaagctctcgtagtggtcgcccgtgtagtagatgtacccgtcgtcggtataaaccagtctttccgcgccgcgtgagcttttgccgagagtgtttatatcacattcgtagtattcctcgtcctgcggaagaagtccctcgtagttgccgaaggatgatccgccgatgcactttccgggagcgtacttttcaaccgagccgccttcccatccgagcgccttcgcctcagcctttgttatgtaattcttcggaagatagccgtagatgtggagatacagcgcaacgtcgtcgcggctgtcgtatattccgtcaatgtcaagcgtgacttcatccggctcagtcgtctcactctcggtttcggtggattttgtatcgtccgtttccggctgattttctccgaaacctgagacaagtattgccgtaggaccgtccgcgccgccgattattccgatagttttttgctcgtcacaagccgtaacaaacggaagtacggtaaatatcgagagaatcagcgacagaaattttctgaaagtcttcattcaatcacctcacgcgataggctcaagaattatctcggactcaacgttgacctgtccgttttccttgaccgttctcacatagtgattgccgtcgctcatgccggagtatatctttacgctttccccgagaggcgcttcggaaaggaacgatattcccatcgaaatgaccctctgccctctcatattctcggaaaggtggctgcacagaacgtcgggatagtgggtgttgttcatgtgtccgttcatgtcgacgtcggcgtattccaccactctctcgctcacaagccgcatatcaacgtcgtccggtatcttgaatctcgccggcatatcaagctcgagcatttcatccttgcggtaaggcaaatcaaattcatttacgcggtgaagatgacggtcgttcactccgacaagcgcccacaccgatacagcctccgcagcgataacgccgttttttattatcctgtagcagcggttgaactgtactccccttgattcgcacgcccacgactggacctcaatcttctcatgcgcgtatatcggagagtaaaagctcattctgattctgctgagcacaaagctgagtccgcgcgagaacagctcgttgtaggaaagaccgtcctcttccatttcgtagttcgccgcgtcctgcatatatctcagcatattcgacacggagacgatattgttaaaatcgacgtcgttcgcgttgacagtgtattcaccgctccatttcatttatctgacctcactgaatttaaaaattccttatattagaaaaggaaggagtcggcctccttcgctttccttaaaattactttattgctttaaattaaagagtgcctgcggaaccgagaacgtgctcgatcttatgagcaaccatcttcttaacctctgcgcgagctacgctgagatatgttctggggtcgaatacttcaggctgttcgttgaacactcttctgatgcctgctgtcattgcgagacggatatcggagtcgatattgatcttgcaaacggagagctgagcggcatgacggagttcttcttccggaatacctactgcgtccgggagctttccgccgagggagttgatttccttaacatattcctgaggaacggaggatgcgccgtgaagaacgatcgggaatccggggagtctcttgcctacttcttcgagaatgtcgaaacggagcggcgggggaacgaggataccgtcagcgtttcttgtgcactgagcggctgtgaacttgtatgcgccgtgggatgtgccgatggaaatagcgagggagtcaacgccggttctgccaacgaagtcttcaacctcttcgggctttgtgtaggaagaatgttctgcgcttacctcgtcttcaacgcctgcaagaacgccgagctcgccttctacaactacgccgtgagcgtgagcgtattcaacaaccttctttgtgagagcgatgttgtcctcataagcatgatgagagccgtctatcataacggaagagaagccgccgtcgatgcacgccttgcagatttcaaagtctgcgccgtggtcgaggtggagtgcgaggtcgataccgctgtcttcgatagcagcctgagcgagagctacaaggtaagcctgcttagcgtactttcttgcgcctgcggaaacctgaaggataacgggagacttgagttcgcccgcagcttctgtgatagcctggattatttccatattgttgatgttgaaagcgccgatggcatagtgaccttcgtaagccttcttgaacatctcggttgtagtaacaagtgccatgataaaactccttttaatatgataatctaacggctttattctacatcattcccgcccgaaaatcaataacaaaaggctaaacagatgttaatttttttcacaaacaaaagcggagggtatctgattttcttgtagaaaagagaaaaatgtatttttagttatttttttgcggatatatcttatacttttgcccgtcgttcttgacaaataataaataatttgctatcatttgttcagtcagattattaatctcaaggaggatacaatggcaacattattccagaaatacgctgccctcaaggtacgtatcggcggaaaccgcgagcttcacggatatgaagaaactttcggtatgccccgcgaagagcagcagcacatcacacccgtaccgcgctacatcgttcgtattttatcagaggttgagttttcaatccgcctctcaaagtcactctccggcaagtatgacagcattatcgactccgcgatagactatctctcatccgtagttgacgaggaaggctgcatcacaaagtccgcggcggctaaggcggaagaaatgctcatgcccctcgcttccgacgcaaaagagtataagctcatcctcgcaggtcacgctcatatcgacatgaactggatgtggagctggcacgaaacagttgcggctaccatcgctaccttcacaaccatgcttaacataatggacgagtacccggacttctgcttcagccagtcccagaccgccgtttacaagatagtagacgactacgcacccgagcttcacgacagaataaaagcgcgcattgatgagggacgctgggaagtcacctcctccgcatgggttgagacggacaagaacatgccgaacacggagtcaatcgtccgccacatcggctactcaaagaaatacctctccgaaaagtggggcgtatctcccgacaagctcgaggtggacttctcccccgacacattcggtcacagcgcattccttcccgagcttgacaactacggcggagtaaagtactattatcactgccgcggtctcgacggaaacaacgctctctatcgctggaaagcaccgtccggcaaggagctcatcgtttaccgtgaacagcactggtacaacagcggtatctcaccgaagccggctatggctctcatcgacatttccgagagaagcggcggactcaagacaggtcttgtagtttacggcgtaggcgaccacggcggcggacctacaagacgtgacgtcgaaagagctatcgaaatgcagtcatggcccgtattcccggttatcaagttcggcacaatgcgcgaattcttcaaggaagctgaaacagtacgcgaaaagctccccgttgtcgaccatgagcttaacttcacattccccggctgctacacaactcagtcgagactgaaaaagggcaaccgtcaggcagaaggcgctctctccgaagctgaaaccgcacttgcattcgctcacacaagagcaggcgcacaggttcactccgaagccgttgaatccgcatggcagaaggtgcttttcacccacttccacgacattctcaccggctcttgcgtacaggacagccgtgagcacgctatgggactgttccaggacgctctcgctacagctaatacagaaacatccctcgcactcggaaagctctccgcgaagatcgacacatccatgatagttacaaaggctgaccccaactcacaggctgagggcgcgggcgcaggctacaacatcgaaaactttgccggacgtgctgccgacgaaagaggatgcggtcttacaagaatctggaacgtattcaacaactcctacgctgaccgtgaagaacccgttgagataacagcatgggactgggtcggcgacatgagatacatcaaggtaacggacgcagagggcaaggagcttgaattccagctcatcgacggcggactccagcagtactgggatcacaaatacttccgcttcctcgtatatctgaaggttcccgcaatgggctacaccaccgtagttctgaagcagggcgatatgggcgactatcccgtatatctccagcccgaaggacgtacaaacggcgttgacagaaactatgtcctcgaaaacgaatatgtacgctacgagttcgactactccaccggcgagcttctctccatgaaggacaaggacaccggcagagaatacattgctcccagaaagcgcggcggtgtggttctctttgacaccaaccgtcacaactccaacgcatggaacatcggcacacacctcgaaatgttccctgttacaaacgttaacaacatccactacacaataggcggaaagctccgtcgcggattcgcttttgaaacaaagataagaaactcctccgtaactgttgaatacactctcgacaagggtgcaaaggcggttaaggctcacatcagagctgactggagcgaggtgggcggcgaaaaggttcccgttctttcatacgttctcccgacaaacatcgaatgcgacaagtttgcttacaatgttcccggcggtcgtatggttcgtgaagctgcggaaggcgacagacccggtctttcctatatcacaacatacgcaggctgcggcacaacaaatgcgggtatcatcgccgacagcaaatacggcttccgcggcgtagtcagagacggcaaggcagtagctgaatgcactctcatcaacactgcgacaagccccgatccgtatccggaaagaggtatccacaacatcacgcttaccgtaggtctgttcccgtcctgccccgttgagatggaaaagtgctccgttcgcgccgttcacaacatgactcccgtaagcacaggctctcataagggtgaacttgctcccgagggaacattcatgaagttctcttccgaaggcgcaattctctccgctgtttacgcacacgacgacaagctctgtgtccgctgctgctccgtatccgacaagccaacggaggttactgtagacacgctcggagacatcaaggaagcatacgcggctgacctctttgaagaaaagacaggagaggctcacgttgacggctcaaaggtattcgtaacggtagctccctacaacacgacaacaatagttatcagataaattaaaaagagaaaaagcggcatcttcattttgggggatgtcgttttttcgtaaaattcagcataaaatcgtagctttttgtaattgcaattatgtgatatatatgatataatgagcttgtaaaaaataatatcacatgaaagaggtatatagaaatggcagaatccagacttatcggcagctcccccgttatcggtatccgcccgacaatcgacggcagacgcggcgcgctcaaggttcgtgaatctctcgaagagcagactatgaacatggcaaaaagcgcggctaagctgttcacggaaaatctccgctactcaaacggcgagcctgtaaaggtagttatcgctgacaccactatcggtcgtgtaggcgaaagcgcggcttgtgcggacaaattcaaaaaagaaggcgttgacatcaccctcaccgttactccctgctggtgctacggctcggaaacaatggaccaggacccgaacaccattaaggctgtatggggatttaacggcacagagcgtcccggtgcggtttatctcgcttccgttcttgcaactcacgcacagaagggtcttcccgcgttcggtatctacggtcacgatgttcttgacgccgacgacacctccatccccgcggacgttgaagaaaagctccttcgtttcggtcgtgccgcagttgcagccgctacaatgagaggaaagtcatatctccagataggctccatctgcatgggtatcggcggctccatcatcgactcacgcttcatcgaggaatatctcggcatgagagttgagtccgttgacgaggttgaaatcatccgccgcatgaccgagggtatctacgacgaagcggaatacgaaaaggctctcgcatggacaaaggctaagtgcaaggagtcatttgacaagaatcctcccgagcttcagaagacacgcgaagttaaggaagaacagtgggaatttgtcgtaaagatgatggtaatcataaaggatctcatgaacggcaacaagaacctccccgagggacgcgaagaagaaatggtcggacacaacgctctcgcagccggcttccagggacagagacagtggacagacttctacccgaacgcagactttgcggaagctcttctcaacacctccttcgactggaacggcgcgcgtgaaccctacattctcgcaaccgaaaacgacgttctgaacggtctcggcatgatgttcatgaagctgctcacaaaccgcgctcagatattcgccgacgttcgtacatattggtcgggtgaatccgtaaagagagttaccggatacgaaatcgaaggtcacgctaaggaagccaacggtttcatccacctcatcaactccggtgctgcctgccttgacgcctgcggtgaagttaaggacgaaaacggcaacgctgtaatgaagccctggtacgacatgaccgaagaggactgcgaaaaggttctcgcggctacggaatgggctccggctgacctcggttacttcagaggcggcggatattcctcacgcttctccacaagagccgaaatgcccgctacaatgatccgtctcaatctcgttgagggtctcggtccgatgctccagatagcggaaggctggactgtaaagctccccgaagaagtaaacgacgctctttggaagagaacggactacacatggccttcaacatggttcgctccgagatgcacgggtaagggcgcgttcaagactgcatatgacgtaatgaacaactggggtgcaaaccacggcgcaatcagctacggtcatatcggcgcagacctcatcacactctgctccatcctcagaataccggtagctatgcacaatgttcccgaagaagaaatcttccgtcccgcttgctggaacgctttcggcatggacaaggaaggcgcggacttcagagcctgcgcaaactacggtcctcagttcaagagagtcagataacataaaataaaatatcgccggaatcatggaatttttccttcgactccggcgtatttttattctatataatattattcgccaagcataccggcaatgctcttgtcaagcagttttgtcgacggctttaacacctttgcgtaagaggaagctatatcgggattgccgtttgatgcatttgatttgagcaaatctcctatcgtggtaattccgagagcgtccgcaaggttgaacacgcccgtgtcgaacacaaggttgagcatttccgcgctgtcctcgtcgcgtatatacttgaagttaagcgtagccttgttgtatgcctcgcgtactccgccgtaggattctgcgcaaaggttttcgaggataacgcccgttctctcggtgtcgccgtttgtcacgggaattccgcagaacgccgcatactcggagataagagaaacgtagttttcctggctttcctcatacttaggataaggaagaacgccgaattcaacgtccatatcgcgcagcttcttgaggcttcctaccgggtcaaagaaaaacattgcgtgtccctggctgaacactcctacccatccatcactgtagctgctgactccgggagtattgtagctgtcgcagaaatagttgttgtcgccgtagaagctgttcactatatccgcataaaccgtgtagaatctgtcgccgggagttttaatctcgggtacgccctccgcattcttttccatgagagtttcgcccgaagcgaaaagaagaggctttacgcatccgctgtacgataccgcaccgaactggtcgcttgcgtctacctttccgtttccgttgagatcacgcgcagccgtcgccatgtattccaccatcgtgtcaaacgtccattttccctcacgcaccagctcatacgtgtcgccgaggttgttctgatccatgatgctcttgttaaagcctactatccagtaggcttccttgaacatgaggtgcaggtcccccacaaggaagtagagattgtccttgacctcaacgtcgttcatcgcgccggaattccaccaaggcttttcgaggttcagcgcgtcaatgccgttcacattaacaagagagcctttcatagcaaacggcgctacgaatttgctctcgttccagaagcaggcgtaggtgtcggtgttcgacgcgatttccgtgttcatcgttgttgtgacatcgttgtagccaacaagattctcgctgatgtttatgccgagcttgtccgccaccttgatattgcggttgtaaacggcatcgttcagtccgtctcccgttatttcttccgctgtcatgaaggtgtaggcgaagttgctttcgttgttgagcataacaaagtcgtatccgtcgtagttaccggtcggcaggtcggcgtaaagctccgcaagcgggtcggtttcagcctctatctcgacactctcgtcggatgaagcactcgcagctgtttcggtatcagtttcaccctttgtctcagagctgtcgctgacattgtttgagcatgacacaagcggcacgagaagaagcgcggcaagaagcaggctcggcattcgttttttcattggttttccatccaaaatgattttttatttcaaccaaaatttcaaccaaaatatataatagtactctttttatattttgtcaacattttgcagggttttgttggcacagtttgctctaaataatatcaaacgtaccgtcgtgataccacagctcggacatcttagaagagcaaaacatctcgtacagctcttcgaatcccggcacggtatcaagctcgaacagttttttctcttcttcccatagcacctctccctcggaagaagagcgcagcgttcccgtaaatttatcggatttaaagaggaacacgatgtatctgttcccgtcgtcgttgtagaaatttttgactccgcaaagcacgggagagagcacgttcagtcctgtctcttcaaaaacctcgcgtattaccgaatcggttatggattctccgtcctcaatgtgtccccccgggaaaaccgctccgccccatcttttgtcgttccttatctgcacgagaaccttttctccgtcgcgtatcatgcacatattcgtcagcaccaccggttttgcttctgccatatattcctccaaggtttcttcatatttgttttaattatatcaaaggctatatcataatgcaatagaagcgcggaattttcatgtaacaattcattaatatcatatcagataaaatttcatcatagctgctcgtgaattttgtcaaatattgaaattttaccgccttgacacaaactgtgcaatatgttatactttagcgaacgaaaaaaatacggtttcgcgttacaaaaagctctatctttaatccgatacagagatgtcggcaagatcagctgatataaacagcgtttttctgcgcgtgtggaatttagtcttgcctcggatgatgggcaggacttttttaatgcgcccgtcaaatcaaacatcatcggaggaagttatgaaactgttttatcagcccaatgaaagacctaaattcggtcagatgatagtgttcgctatccagcagctccttgcaatcatggcggctacgctcgtcgtccccgttatcaccggcaacggaatgagcccggcggcagcgcttttcggagcaggtgcgggtacgctcgtctacgtgctcttcaccaagagaagaagccccgtattcctcggctcatcctttgcgttcctcggttcaatggcggcagccttcgcaggagctgtaagcgtagaagtcggctatctcggactgataatcggcgcgatactcgcaggtcttgtttatgtagtaatcgctattctcgttaagatagtcggcgttgaatggctcaacaagctcatgccggcagtcgtaatcggtcctacagtcgctataatcggtctttccctcgcaggcaatgccgtaggcgacctccagtccagcggcacaggcacggcgagcgtaaacctctgcattctctgcggtctcgtaactctcttcgtaacgatactctgctccaccttcggtaaaaagatggcgcgtctcatcccgttcatcatcggtatccttgcaggctatgccgttgcggcagtattcaccgttatcggcaacgctacaggaaacgaagctctcaaggtaatcaacttcagcgtatttaacttcctcgttgaaggcggcgttggtcttcacacattcttcgctgttcccgagttcacattcatcaaggctctcggcggattcagcgagattaccggtcagtacatcggcacaatcgcggcggcatatgttcccgtagctctcgtagtattcgctgagcacgttgcagaccacaagaacatctccacaatcatcgaaaaagaccttctcaccgaccccggactttcccgcacacttctcggcgacggcgtaggctccatggtaggcgcaatattcggcggatgccccaacacaacctacggtgaatccatcgcctgcgtagctatcacaggtaacgcttccgtagcgacaatcatcaccaccgcagtcctcgctattatcatttccttcctctcacccttcgtagcattcgttaactccattccttcctgcgtaatgggcggcgtctgcatagcgctctacggcttcatcgcagtatccggtcttaagatggtacagaaggtcgacctcgaagacaacaagaatctcttcgttgtgtcaaccatcctcatctgcggtatcggcggacttgctgttacgttcggtcaggtaaccatcacctccattgcagccgcgctcatcctcggtatcatcgtaaaccagatgctcggcggcagcaaggcagagaaaaactcaaagtaacctaaagtaaataataaaaaggctggctttcaaaaaacggaagtcagtctttttttgtttgctgtttaaaattctccgcgcactctttcgagtacaagcttcatcgcgtgctcggcggtcatttgtcttacctccgaccttgagtattccctctcgcggcagaagtgcatcgtctcggtgtaaactcccttttcgtcagccactccgaagcataccgttccgacaggcttttcgggtgttccgccgccggggcctgctattccggtaacagacaccgttatgtcgcagcacagcttttttaaggctcctgccgccatgtatcttgcacattcctcggagacagcaccgacagtttcaataaccgacgccggcacgtcaagcaggtcttcctttacttcattcgcgtatgatacaatccctccgacaagcacgtcagaagctcccggaacgtcggcaatctcggcggatatcataccggcagtgcagctctcagccgtgcctacagtcattctgcgccgtctcagctcgtctataagctccgcggcaatttttgtttccatatttctacctcacagaaaaagtccgacattgtttcagccggactcttttttatcttaataaatttaccaaacgaccttttcgccgccgttttcagctgacttgaacgcgtcgagtattatcttcagcacgcatctcatctggtcgtgagttaccatctgctcttcaagaccgtcgatcgcacggacgaagttgcggtagtaatcgtgaacgtcggagtgcggcttttcgatatcgtattcgtcaacggtaatgctgtctctcggagccatagtctttgtaagaccgcttgcgttctgtacgggaagaacatctgcctcgttccatgccttgcactttacaacgtgagcgggaactctccagtcggtgatgatagcgctgccgcccttagctctcatgtagaagcggggcatagcgatgaagttgtatgtgccgacttcgagataagccttctgaccgttcttgaactcgagccaaagctggaatccgtcgtcaacctcgtcgtttgtgatgtggtcgaatgtgcagcgaacggacgcgacgtcgtagccgagtatcatgcacgcctggtcgatgatgtgtacgccccagtcatagagcataccgccgccgtacttttttatgcctctccagtcggagggaataccgcggcttccgtgaattcttgactcaatgttgatgacctcgccgatttctccgctgtcgtgaatcttcttcatagcaagagcgtctacgtcgaatcttctgttctggtgaacggagaaaatcttgtggtttgccttagctgcggctatcattctctcaaggctttccatggagagtgtgacaggcttttcgctgatgacattcttgccgtggttcagcgcgtctatagctatctcctcgtgaacgtcgttcggtgtagctatggttaccatgtcaattgtcgggtcggaaagaagctcctcgcggctggaataaaccttgatgccgttctttctcgcaagctcgcacttcttttcgtcaatgtcgtagattccggcaaggttgcacacgtcgcttgtgagcaggttctttacatggaatcccgcgcccattccgccatatccgattacggcagcattctttttcatattcagctccaatctccgcgcccataacgtaccgacgcggtaataatattgttcaaaggcgattgtttatctaaaaccaaaacaaatttcatccttaatatgtgcgggagagagtccctacaactatatattatataaaaaaaaccgctcttgtcaaggggatatgtacataatcataatgacagaaaggtaaaaataacggacagaattttactttgactttttgtgggtgttttttcggctttcatgttgattttcacagatttctcggatataatgtagaaaacaatattttcggagaaaaaacatgagccagaaaaaacctaacctaatttatatgttcgccgatcagctcagactttgcagcatgggctactacggcgacaagaaagcgataacgccgaacattgacgcgctctcacacgacagctgcaatctcatcaacgccgtgtccggtcatcccgtatgcgcgccctacagagcctcactcttcacgggaaagtacacgacgagcacgggcatggtaataaacgagataagactgaacccgaatcaccgttcatttgcggatgtgcttgacgacgaaggctacaacaccgcgtatatcggcaagtggcatatgtacgcaaatcagctcggacaccacgcggacccgaagaactcctacatacccgagggaagagaccgtctcggcttcaacggacttttcgcggcgtacaacttccatcacgaaaactacggcgagacgtcatattaccacctgaactcccccgaaaagatacactacgacggatttgaacccgattgccagaccgacatggctatagaagagatgaagagactcgcgggagaaggcaagccgttcgcgctgtttttatccataggcattccgcatgacccgtgggatgagtggaactgcgacccgaaggcttacaagatgttcgagaacaccgagttcactctgccggagaactatctccccgacaacgacccatacgccgacgactgggcaaagctctcccccgaggacagaaagaacctgccgtactggatgaagggatattactcgatggcggagaaggctgacgaagaggtgggacgtatgctcgccgcgataaagaaagcgggactggaagacgacacgatattcgtattcacttccgaccacggagagcttttcggagcacacggaagacgcgcgaaaaacatattctacgaagaagcggtgagagtgccgttcctcgtgagatatcccggaaagctgcaaaacggtgagcgcgacgtatgcatgaacactgtcgatatcatgccgacgcttctctccatgatgggcatgaaggacgacattcccgaagaggttgaaggacgcgacttatccgaggcagtctacggcagagaaggcgcggacaaaccctacggcgcactgatgatgggtacgggagctacggcggcatgggaggacggtcacgagtggagagcgtacaggacggacagatacacctacgcgctttacctgagagacggtgcggagctgctgtttgacaacgtggaagacccgcttcagatgcacgacctctcgcttgaccccgctcattttgagaagaaggtggagctcaggaacgagatgtacgccgagatgaaccgcataggcgaccgcttccatacaagcacctactaccgcgacaactggacaaaagacagaatcattctcaaaacgaaggctgactgaaaatgacaaattccggctgaaagctgctctgaatattagcagagtatccattgatttcagtcggaattttcttgtttacggcgataaaactgataaattttcgctccgttgagttttcacttgacattgaaggcaaaatatattaaaataaaaacgtatgtaaatcgtagcgtaaattggcgatacaaactttcatgaaaggtaaaataatcatggacacaaaaagaaaaaacgagcttaccgaaattgcccgtgaaatccgcgtaggaatcattgacgcagttcactcggcaaaaagcggacatcccggcggaagtctctcgatcgcggacgttctgacatatctgtattttgaagaaatgaacatcgaccctaaaaatccgaaaaagcccgaccgcgaccgtcttgttctctcaaagggacactgcgcacccggtctttactccgctctcgcgcacagaggatacttccccgtcgaagacctcaagaccttccgtcacaccgacagctatctccagggacatcccgacatgaagcacactcccggcgttgaaatgacgtcaggctcactcggtcagggcgcgtcaacctcctgcggcatggctctcgcgaacaagatcgacaagacaagcgtgcgcatctacacaatcctcggcgacggcgaaaccgaagagggtcaggtatgggaagcggcaatgttcgcggcacactatcacctctccaacctctgctggctcatcgacttcaacggtctccagattgacggacctatcgcggaagtcatgaaccccactccctacgacacaaagttctcggctttcggctggaacgttatcgaatgcagtgcgcacgactttgactccatcgaggcggcatacaaggctgcaagagaatgcacggacaagccgtcggttatcatcagccattcaatcaagggcaagggcgtttccttcatggaaaacaatgttgcatggcacggcgccgctccgaacgatgaacagtacgaaattgcaatgcatgatttaggcgaaagataacttcattctgcgaaaaacaattactacacgaaccaccaaaaccaaccgttttttccatataaatcgaaaggataatataaatcatggcagataaaattgctacccgtgaagcatacggtaaagcgcttgccgaattcggcgcagtttacgacaatctcgttgtacttgacgctgacctcgcggctgctacaaagaccggcgtattcaagaaagcgttccccgacagattctttgactgcggtatagcagaaaacaacctcatctgcgttgccgtaggtatgtccctctgcggaaagattcccttcgcgtccacattcgcaatgtttgcggcaggcagaagcttcgagcaggttagaaactccataggctacccccacacaaacgttaaaatcggcgctactcacgcaggcattaccgtaggcgaagacggcgctactcaccagtgctgtgaagacatcgctctcatgcgcactatccccggcatgaccattattaaccccgcagacgctgttgaagcaagacttgcagttaaagccgctatcgactatgtaggtcccgtatatctccgtttcggcagaatggctgtaccgacatactttgacgacaagtacgagttcagaatcggcaagggcgttaagatggctgacggacacgacgtttcccttatcgctaccggtatcgaggttgagcaggcgcttctcgcacgtgagcttctcgcaaacgaaggaatttccgcttccgtcatcaacatggctacaataaagcctcttgacaacgagcttgttctcgccgaagctgaaaaatgcggatgcatcgtcacctgcgaagagcacaacatcatcggcggtcttggcggggctgtatgtgagcttctctccgaaaagagacccacacccgttctcagagtcggcgtaaacgatgaattcggacgcagcggaccggctaaggagcttgtttcctacttccaccttgacgctgccgctatcgcagaaaaggcaaaagccgcagttgctctgaagaagtaattccgaaaaaaatattcccggacaaaggttacgtaatcatcgtaattcctgtccgggatttattttattcttttatcctgattttgccgttcctgtacgcttctatgagactgcgcaggtcgtttatccttaccataagctcttcgccgtagtcgatatcggcaatgttgaccctgcgctccatcttctcgactatgctcaccttcggagtaatgtccgcgccctctccgtcgtacggcttatgctccgcgagtctcagcgaatggctgtcgtagatgagagtgtatcctgctattcccgtttttactctgtacgcctttgagattccgccgtctatcacgaacagctttcctccggcttttatcgggctttctccgtcacatctcagcacgggaacgtgtccgtttactatatgtccgcggcgtttgtccagtccgaactcttcaagtatcatttcgcataccgaagcgtcgtttgtatggctgtagtacggctcgtaatgctctgtgcaaagctcagcggcctcttttccgaggaatgtccgctcaaagaacgccattttatccttgccgtagaggggggagtccgcgccgcaccagagataccacatgaaatccgcggcttccttctgctcttttgttccgtttgggctgaaatacgcgctgcgcacctcctgctcgattctgtcaaggagcgccttaccgtggaatgtttttcctgcgcagtcggcaaacggaagtgtaatctcgcggaagctgccgtcgtcgttgagcggaatacagccgtggtagaggagatttccgtttatctttctgtacattccgccgtggtcgtagatgaactttatgtgctgtctcagcctgccggagtggcgaaaggagctttgcagtattctcacaagctcgctctcctctcggctcagcttcagcgggtcggacacatcaactgtcgggaaggatttgtctcgcagctcgtattcctttccgccgatatttatcacgccgcgcccgaaatccaccttgtcgaagaagctgcgcccgtccataccgtattccggatgatttttaataagctgtccttcgagcttgaactgtatgaccgcgatagccttatgcatttttgcggtgagcgagtgttctattgagtcgtaaacaacgtcgtcgagcgtgtgcgggtagaagtacgtgcatgggtcgtcgcggtacacctccgaggcaaagacagacagcgggcgcagattcagtccgtatccgtcttcaagcacgtcgaagctgttgtagccgagcgcgattctgattacgtttgcaatgagcgcggtgtttcccgagactgcacccatccagcttatgtcgtggttgccccactgaatgtcgatgtgggtgaaggtcataagctcgtccattatcttgtcggctctcggacctctgtcgaaaatatctccgatgatgtgcaggcggtttatcgtcaggcttcggataagtgagcagaccgcgattataaaatcctccgcaatgccggtttcaagtatggctgagattatctcggaatagtaatactcgcggttgatgtcgtccgtcacgttcagcagctcgtcgaggatgtaggcaaagctctgcggcattttttctcttacctcggcgcgcgtgtattttgccgaaactgattcgcacaccaaaatgagcctgtatatgacgatactgcaccactcgtcgctgagagagccttcaaaccgcagctttttaatctcgctttccgggtagtatatgagcatagccagacggttgcgttcgcttgatgatatgcttttttcaaatattaggtcgatttttgacttaatcatacccgaagccgagcgtatcagcctgagaaaagaatcatactcaccgtgcaggtcgctgaaaaagtattccgttcccttcggcagacttctctccgcgcacagatttatgacctccgccgcggctgactcaactgtcgggtaattccgcgcgagaagctccagaaaatgcaaatcgttttgataatcgttcatatactcaccgctatttccttatttataccaaatttattataccaaatcccgcagtgaatttcaacacgggcggcatattttttatttctctattgtccgcggcgctgttttgtgctatacttaacgtgaactaaattaatgaggtgcttccgtatggataattatacagaaaaattcacctgtaccgtatgcggcaaggtacacgactccattgtctcggactgctgtatcggcaagggtacacttaaaaagctgccggaaattctcgaaaaatacggtgcaaaattgcctttcgtgctgtgcgacgtcaacacatacaaggctgcgggagaaaaagtcacagctatactccgcgaaaacggtacagagccaatcctgcacgtcattcagtcaaccgagccttccccggatgagagaacggttggtgaagcggtgatgtactgtcagaagagcgcggatttcgtcataggagtaggcggcggtgtgataaacgatacctgtaaaattctcgctatgacaaaaaatgtccacatggcaatagtcggcactgctccctcgatggacggctttgcttccgctacttcatcagtcgaccgcaccggactgaaggtttcgctcccgtcaaaatgccccgactgcgttataggcgacacggaaattctcgcaaacgctcccgtacacatgatacgctccggaatcggagatatgcttgcgaagtacgtcagccttgcggagtggaagatagctcatataatcctcggcgagtattactgcgaaaaagtagccgacacgatgtactctgccctcaacaaatgcgtaaataacgctcacagtgcggtgggtcgggacgagaatgcggttgcggctgtgatggagggactgacgctcggcggtataatgatgaactgggcgggaatgagcagacctgcatcgggcatggagcactacatatcacacataattgatatgcgcgcgcttgaattcggaactccgcatgaccttcacggaatacagtgcggaatcgccacgcttcacacgatacgcatgtacgagaagttaagtcaatttctgtcctctcccgttgatattacttctgcaaaaaagcacgcggaaagctacaacctcacagcgcattttgacaagatgagagaaaagctcggtcacggtgcggagactatgattgctcttgaagctaaagaaggcaagtattcccccgaaaagcacgccgcacgaatcgaaattatcgccgcaaaacgtgaggaaatactggaagtcatcgacgctttaccgaagtcggaggaacttgagaaaatgatgctctccatcggacacccgacaaaattcgcggagattggactttccgacgacgacgttaagactgctgagatgttcgcgcgtgacattcgcgacaaatacgtcctcggaaggcttctctgggacttaggtctcgcagaataaatatacaaaaacagcgcatacctacggattatacgtaagcacgcgctgtatttttatgccattgttttaagcatttcaaggctgacggaatatttcaccggctttccgctgtcatacgctctgaactcgtcgagcatatattctcccatgcggtggacttcgtttccgagagagccggcaatatgcggagtcaggaacacgttgtcaagggtgtacagcgggctgtccttctccggcggctcggggaacgtcacgtcaagcactgccgaaatcgacgaatcccgcttgagcgcttctatcatgtccgcctcaacgacctgtgctccgcgtcctgtgttgatgaacgacgagcacggcttcatcttcaagaagtgagttttgtttatgattccgactgtctcactgttgttggcgaggtggtttgagataacgtcgcattcctcgaatatagtttcgagcgagcattttctcactccgagctgctctgctttctcatcgggtaagaatgggtcaaacaccagaatatccactttttcgagggttttcaggcgttctatcaccatttttcctatcattcccgcgccgaggattccgacttttatctcgtaaattccgggatatcctccgtgtgaacgtccctgccaagccgaaccttccgccgcacgatggtatctgttgaagtatccctttgacgcgagcattatctccgcgaaggtgtagtccgctacgggaaccgcatttgccgcccacgcgctgaacaccgccacgccttcttcaaggaactcacgcgcaaatccctgcaccgagcctgctccgtagaacagtgccttcacattcggaaggtacttttttatctcctcgcgggtgaagtgcggcattccccatgtggaaaagatgtaatccgcgtgcgacaatgtgtcaatgtagctgtcaagctcgtttttcgcaataacgtgatccgtttcaaacgtcagctcatcgtgaagcgcgctcatgacctccggcgaatacacgttagcaacagagcctgccgagccgataaaaaccgcttttttcatagccgtctccttatatcgtcaaccgaaattatattttccgaagtcctcgaactcaaggatgtcggataaaatgtagtttgaaatgaacatacccgcgggtgtcagtgaataaactccgccgcgcatagtcatgtagccgtttttgatgaatttttcgcattttccgccgtacagctgctcaaacgaacgtccgaaacgatagttaaactcacgtgaatcaactcccgcgacaagcctgagacgcagcatgacgtattcgcccattctctctctctcttcaacctgctcgcactcgtcggtaatgcgtacctttgaatccttcaccgtaactccctgcatataccgctcgatatccggtgtgaatgagaagcgcgtcccgttgaaatatgagtgagcggacacgccgaagccgaggtattcgtcacagttccagtatttgaggttgtggacgcacatatgtccgggtctggcgaagttcgatatctcgtactggagataaccgtactgtcttagctgattaatagagccgaggtacatatccgcttcaacgtcgtcgccggggagatatggggatatgctgtcgtaatttctgtagaacgcagttcccggctctatttttaagtcgtacagggagatgtggtcggggcgaagcgaggcggtaaagttaatgctcttcgccagcgactgcggagtttgatacggtatgccgaacatcaaatccacgttaatgttgtcgaacttcgcgtcccttgccatgcggtacgaacggacaaaatcgcggcgtgtgtgccttctcgacagtgctttcagctcgttatcgttcgcgctttgcagacccatgctgatacggttcactcccatgcggtgcagctttacaagagtagcgtatgacaccgttgcgggattagcttcaatcgagaactccgcgtgctttgtgaggtggaagttccgcttcactgccgtcacaagcctgtacaaatcagccggcggtattgacgtcggtgttcctccgcctatgaaaaccgaatccggctcataagcagatgcggcggcagagtagctttcgatgtgcgagattagagcgtcaatgtagcgtgtgactatctcgtctgacgagggcggcgcggagttgaagtcgcagtaagcgcattttgatatacaaaacggaatgtggatgtagattccaagcctttttttgtctccgtaagtaaagctcatattacgccttccgtggtcagttttcgtcgtcgagcttgagcacagccatgaacgcttcgggtgaaacctgtactgtaccgagctgacgcattttcttcttgccttccttctgcttttcgaggagcttcttctttctcgtgatgtctcctccgtagcacttcgcaagaacgtccttacgcagagcttttactgtttcgcgcgcgattatctttgagccgattgcagcctgaatcggtatctcaaacagctgtctcgggatgttgtccttaagcttttccgcaatctttctcgctctcgcgtaagctttgtcggcgtgtacgatgaatgtcagcgcatcaaccatatctccgttcaagaggaagtcgagcttaacgaggttggaaggctcatatccctcaagctcatagtcaagcgaagcgtaaccgcggcttctggatttcagcgcgtcgaagaagtcgtagattatctcgttcagcggaagcttgtaatggagttctactctctccgtgtcgatatacttcatgtcgatgaatatgccgcgtctgtcctgacagagatccataattccgccgacgtattccgtgggtgtgattatcgaagcggcgactataggttcaagcgcagtctctatttcgtcgggagcggggtagttcgtcgggttgtcgatatagatgacctcgccgtttctcttctttatctcgtaaataacgctcggcgcagtcgtgataaggtcgaggttgaattcacgctccagtctttcctcgattatttccatgtgcaaaagtccgaggaaaccgcagcggaagccaaatccgagcgcgatggatgtttccggctcaaaagtaaacgcggcgtcgttgagctggagcttttcgagcgcgtcctttgtttcgttatactttgcgccgtctgcgggataaattccggcgtacaccatcgactgaaccttcttaaatccgggaagaggctcgtccgcgggagtttcagagtgtgttacggtatcgccaactcgcgtatcgctgacgtttttgattgaagccgtgaaatatccgacctcgcccgccgaaagctctcctgtgggtctgagtccgaacgggtccattactccgacttcgacaacgtcaaactccgcgccggtgtgcatgagctttatcttctcgccgctctttagtgtaccgtccatcacgcggatataaacgacgactccgaggtagctgttgtaaaccgagtcgaagataagagctttgagtggtgcggtttcgtctccgccggggcaaggaatatcgcggattatcgccgtcatgacgtcagctatgttcagtccggttttcgccgaaactactgggcagtcctccgcgggaataccgattacgtcctcgatttccgccttgcatttgtcaggcatagctgagggcaggtcgattttgtttattacgggaacaatctcgagatttgcgtcaaccgcgagatatgcgttcgccagagtctgcgcctcgattccctgagttgcgtcaacgacaaggagcgcaccctcgcaggcattgagcgaacgggaaacctcgtaattgaagtcgacgtgaccgggggtgtcgatcatgttgagggcgtacttttccccatcgggagcagtgtagtcgattctgacggcgcgcgcttttatcgtgattccgcgttctctctcgagatccatgttgtcaagtatctggtcttccatatcacgcgcttcgacagtgttggaaaactccaaaattctgtcggcgagggtggatttaccgtggtctatatgtgcgattatcgaaaaatttcttatatgcttttgcttttcacttacagccattttcgtctccgttaagcattaaacactattttactattatatagtataacataaagccgccgaaattgcaaatataattgagccgcgagagcaaatttttgcgaaaaaagcactcgacatccgctctctaatcgttagtttttaagtctaagcattcagtcgagccttacatcgggtgcatttttatgagattgttcagtccgttacaacttcgttttcgcgcagtccctttaggaaggattcggcgtcgcgcagtgcggtttcttcatccacgtcgaactcatccgtcagagccttcacaatgtcggacatttcgcagccttccgcaagctttttcacgataaccgcgccgacctcgttcagtgctatgaatccgttgattttcgcggatatctcccccgtcggtacgagcatcgcttctcccgcaatttcacgcaggacaaaattctggttcagcttcatttatttctcactttcgtttttttgaatgtaattttgcgccagtctgaggtatgccgcggttttgtcacagctgtacttcggaacggtattaaagcttccgttttcggcatagcaggacgcagggcaggactcacacgcgctcctcatcgagcattctgtacaggctttcggaatgaagattttttctctctccgcgcggattttctgccatgcttcggtaaaatcaagctctcgcataggaactgtgggaacctgcatcatgccgcacggtcgcatttctccgctgtaagtcagccagaacgctgttaatccggctcggcagcgtattttctcactgctcggcgcgtccgtcggaagctccatgcactccttgtcatcgtcaatcacgtttccggcgagcatggacttgcacctttccgccatattttcgccgaatctgcgcacgtcgtatcggaacgcgtactcggcggcttcatcagcgggaacacggacggcattatattggcacagctcacagactctgacaggcggaaacatatacgtcgcaggctgaagcggaagctggtttttctcggcaaaatcgcatatcttatcaaagtcgcacttgttcatcggggtcaggctgtagttgagcttgagcggaattttcgcctctttcagcatttccaccgctttataagccctcgaaaatgccgtttcatcccccgaaagccgcgaatatgtctcctcggatgcgccgtacagtgtcaggttcactctcgccggagaattttccgcaaggtgacgcacgactttttccgtgatgagcgtgccgttggtgtttatcgaaacggacagcccgagggacttgaattcgtcgtacatctcgaagaaatccggacgcagaaacggctccccgccagtcacgaggagcaggaacattccggctttttgggcagttctcgcgatgtcgatccactctgccgcgctcatctccgactttttcaccaaagaatcgttggcttttttgtggatatagcacattttgcagtcgagattgcaccgcgccgtcagctcaaacgtgcctgagagcgggattccggcttgtgctgccttgtacgtcagaaagtcgatgtatcgtgtgtagttgcttggcataattcacctcgtgagtgttttttcgagaagctccaccgcgcgctcatcgggagtacacgacagctcgaacaccggcacgtctcgcagcaccttttgaagcacatccgacatcaggagcatggtttcggggacggatttgtgacccatgcagtttgcggacagtgcggagagagccgtaattccccgaagtctgcggattttgttctcgggagcttgtttcaacaggactatcgcgccgagcggcagggaatattgtcggcagattccgcttgttccgcaaaatggaagaccgtgcgcgagggcagttccactgttttcgtcaaacgagacgcagtttttgtcgccgtttagtacctccgcgtagcgatatttctcccaaagcgcagcctgagttgattttcccgtaccagacggagcggcgaagaggattaccttcccgttcacgaggatggacgagctgtggagaccaagtctgccgtgggtaaggagcgcgaagcagatatccatggctgtccagatgtgcgttgttctggcaatatatggcatttccgaaccaataacggtgacgtttatctccccgcccgcgacattgtactccgactgcgcgaggattctgtcgccgccgtgaaacatgaggtcaatgcggacagtgtcgccctcgcggaaaagtcggatgtcttcgtttttggtgagcagtctgccggaattctcgcgcggagcatcgacggttttgacgcggcacgtgatgtcggttttgtcgggagcgtcgtgaagccggaacagcgcggaataatcgtcgtcagccggaaaaaaatcggataatacgcggatattcagaccggcgatattgtaaaaattttcgtacatattcaataagtgaaatacgcctgcgcgaaactgacacaggcgtatttggtttagtgggttaggtcacgatgttgatacgatattggaagttgatgtgaagtaacagtagccttcaatccagatggagcactcttcgtccttaccaaagttgaaactttcgaaacgtggatcttcatcacaactgcttgcactgcctgaatttatatatttcggaactgtgcagttagcggcaatagcttcttggagtgaatatgtaattacgttaaaagtcggtgcttcgtagttctttttcatacttattcctcctttccgttatttaacaacaactgtgcaagtgacaggtgcagagtatacatcatcagtgccagctttgtgtgcttttaccgtaacagtaactgaatctgcttcaccacgcttcggagctttgaatccgcatgaatatgtgtaaacatctgcaacaccgaggctaacaagctcagcattatcaggtgttatttcatattcaacaccctgatattcaacgatgagcttgtcaacatctatagatgtctgcgcaccaagatagaatctcttaccggctttaactgattcagcaacgttcacagtgaatgaactcggaataaactcatcgctgtcttgagcctttgctcttcttaatacgtcagccttaaccgattctgttgcttcggcaatagtaacaccattcggtaattttattgctccaattgaaagcatagaatttgttccatcagtatttttaggacacttaatactgaggtagtattctttagtgtcacttgtagttaacagctgaacactataatacatttctgtatttgttgcaatcggtatagttttaccattatctacaaatgccgcttcttccgttacagcccttgcagaaatctgaattgatttaagattaatctgattttcagaatatccgttcagcttaaatgcaagagtattgcctgatgtaagataaatctcgttctgaggtcctttattatgataattttctaatgtagctctatttccttcaccttcaacatagacgaggtatttacctatagtcatgccggactttttagcaatttcatagatatcataatatgttacatcttgttcactaacaacatagttgggagtatgaacagtttcggtcttgccagtctctttattctcttttgttgtatcggtttcctgcattgtatggtaaactctgataccgtctacgtaaacatactgagtggcatctgtttccgccataacatcgtttgccatgctctgaactgaaacgccggatcttacaacgtccgaagcaaccgcatagtcgttgaggacactgttttcatccatgtatgatacttcatagagcgaagcgtcatcgtcaagtccgagatctctgagagcctgttcaaggtaggtttcagcggaatcaatagaatagagcgatgcggtggatgtggtgtttctattaaccatatagccgtaaacctcgactttgtatgtgccgtgttcaagattaatgtcgcgaactacgggaacctgataatcgagaacaccattgacatcagcagcagagttaattattccggtattatctcctgtgaagtaagtgtcaacgaagaagccgtggttaagcactccgtctttataaactctgacaaggagagcgccggtttgaggtccgcactcggaaatgaggtcgaagccgttgcctgtgaactcgaatgtaagaggctttccatactcggtagccgtcttacttgcgtcaagcgttgccttataagcagagccgccactgaatccggtgttttcggagtagtagtcgtcgtagccgtggcggttttcttcaccgagcttttctgttgcctgagttgtggttgcagtaattgcagatgtaccggttgttgtccactcagtgccgggattggttatgacattctcctcatagagcacgtttgttgcggggtagaggtagatgaagtgggttgcggcattgttattttcgctttcgctgttttcatcaatgaggtcaacggctatcgtttcaacaccggtcataactttattaggagtatagtcaagaccttttccccattcaactttagctttaccgtaatataattcattacctttagtaaagtctactttagtccaatttgcttcaccatctataccaatatcagccggatcaagatgaagcggaactccgaagtctacaacgaagtcatgtctgttattgaatgtgtaatacagtgttacttcctttccgtcagcactacgtacaacttcttcgagagtaaagttgctgaatctgtagtaggacgaaatttcgggcatttccttaaggttggagtttaccgtctgagtaacgccgttgtagttgacaactgtattatatacaagagcaccatttacaagagcaaagcctgcatcaaatgttgtaccttttttaactgtaatattgtagttgtagaagtttgtgcctgttcccttgtcaacatagtttaatttaagtgaatcttccgtagcagctgccttaacgtaaacacgaataaggattgcgttgttcttgttgtattgagttgtgttccatgcaaggttgtcataaggagctacatatgaaggctttcttgcaggattgccgatacttacactctttgtagcatcgccttcccaaacagtttcttcatttttgtcccatgtgaagtttgttacagtaacggtatttccacttcctgtggtactcgtcacatctccggtttcggcagtaaccttataaatttggtagttctgctggccgctgaatatcattgtaccaagtccacgaccgccgctccaataaccatacataatagtctttgacttaagatttgcggctgttgtatctgacggattggttgaaccgtcttcatatactatttgaacagataccgagcaacggtttgattcaggtggataaccccatgagcctgtgccgtcgccttttgtaccccagtcagccgcatttacatgaagttcgctttcattattagcattgttaatgttaacagcttccatgtagtacgcaacaagttggtttttgtcgccggaatacgttacagttgtggaattatctccagtatacttaaaagatacttgtgtgcggtctacatcagtccatttagttgtataaacctgccacttgctattgtaataacgaatctttgtgaacgcagaaccgttcagagtttcgtcatcaccctcttttgtggtttgcagttccgtaccgcttgtactgttgttagttttttcaacatcaagaatctttgactgccaatattcctgtgttctgttgtctttattaccttcggggtcaacttttgcgacgatgtcaacaccgccttcgccaaatgcttcttgagcggttatcgtcacatgattttttttgctttctgtaccggtcaaacgggagttcgtaatccaatactcgaccgtaatcgacgtaacatcggcgaggttttccttcgttatcgtcacgttgtaggtgtaagtcgcgaggacagcgccggctgcattctttactttagctactaccgtcgccgtcttgtcttcggtaactatttccgcagtgattgtaccgttttcatcaaccgtaatgtactcgctgccgaaagtaacctcgtatgtggtattggtattgccgacaatgcttgcgtcaagtgccggaacatccagtgccgcagtattaccggacgatactgtaaggctctttgtttcctcaatagcgtttacagaaatgttgtaggtaacgccgccgacttctgccgttgtgtagcccggagccttgccggtgatggttactgaggttttttcttcggctgttgttgtggtcttggtgtagggtaagccgtgaccgtaatcacgctggagtacataccacttattattataacatctgatataataatctctattgtatctcctaacgctaaatcctgacgagctataagaccaatatcgatatgtactatttttgctagcaattaaatcgtcccctgaagtattatagcatagataatagccggtggtataatctttaatagtatagctgctgccggaaccctttattgtccattccgtaggagaatctttttcgctttcgtttacagttgctccgcttgaatttacggaaaggtaattaccattgccatctgaaatgcaatactttttaccgctttcaatattatcggctaaagcatatgttggctcacccgcgacggaagcgtcaaccgcaactactttagcaacacctttgtctattgtatcagtaacagccacgccattgatagttcttgtagttgatacgccgacattgagggtgatttcaactgtctcgcccgccgggtcagtcgtgccgccgttggttacagaatctaccgtgggaagcgtaccgccgaacgcctctattgtatcggcagtcttgctaattacgcttgcttccgtttctgcgcccggataatcgctccaaatgcagaacgttgagccaccggggtctgatatattactgcccgggaaaacagtcttatcaaatccgcttgctttttgagcagaacactgatcactaggtttgccaagcacccaatagtagctgccgttggtgtttaccattttgaagcctttagcggcaaggttagatgcagacataggaagatatgtactccaaccgcttgaccaatattcaataatgatatctgtatcaaaagtaccgctcgaagtattattattgaagtaaataccatcgttgaatgccatgggtgtcatgccggcatttttgataagtgcagccacttcattaacataggttacaaagtagctgtattttccactgttctggagattaccaaatcccatagagccgccggtatacctatcattagcatactcatccgcgcccatgttgaacagcgtgcagcctttacctgcaaaatatgttatatatttagtaaggaaggcttctgtaaatgcaactgctgtgctattggtaacatcaattgttcttgcagagtagttatacgaacaattagtgccagtcagcgaagttgccgccgcgagaatagcgtccatatgaccgggtgtgttgataagcggaattactcccataccctttgtgtacgcatactcgatgatgtcatccatttcggactgcgtgagttcatttactgtaggattatatgtactatgtgaaccattatcatcgcttgcgcctttaaacgtggcgttataatccgtattacccttctgaatagctgctttaacagcatcactgtcgtaagtcttagtaccaaccgtcagtgacatatcatcaagcaaaaatctcatgccgtcgttgcctaccgcaagctgaatatagttgaagcctgccgcggacgcattgtcgattatctgcttaatgctgtctacgctgaaatactttctgccgcagtcaaggtggataatgttgtagttgtatccgtcaacc

SEQ ID NO: 1322 - DNA, 6887 bp, Unknown
  16S sequences of unknown bacteria
cttgctgccgccaatcatgcctttagagtaagcgttcgccgccgccgtaggctttgtcacgcggagggtctgcttcacgacgttcgagcgcccgccgaacttatcggtgcagcgcgcggtgaagctgtccttgcctgtgtagccctcgtccggcgtgtacatgaagtatccgcgcgacgcgtccgtgaagctcacggttccatgcttcggctctgagatgatctcgaacttcaccgtgtcgccatcggggtcgacagacgacagagttccgatatatccggcgccggggaagactcccgcgtcgatcgcgtccggctgtgtgatcaccggggcgccgttaatgttctcgagcgcgaagaccgtgcaggtgtagccgggtccgctttttccggtgctgaaggtgaaggtcgcctcacagggcgcgccgtccgggacgaatctcagggacgagagctttgagcgggagacgcggtcgccggtttttacctctttttcaccgagcttcagttttcctccggtcgggagactgcggatggtgatgcgcttgacgcggtcgactccgagagcctcggcgaagtcctgctccgagaagtatatgtcgtgttcgtactgaccgctcaggacgactcccgcgtcctccgcgatgacgtcgagcccgggcgagagaagcccgtctgacgccgccgccgtcgccgccagcagagccgctaaaagtcccgccgcggatgatgtcaacagcatttttgttttgttgttcatggatattacctcctgatttgaagtgcacagctattttttgcctctgcccggtaaattatgcaccgacagcaaaaaatacggctttatgcggcgattgccgccgaacacaaaaaatattaatgtgcacgcggctgtatgccgcaaaaattttccaatcggtatttactttatttggttgaattattaacaactttgcggtataatggagatatataaatttttatggaggttctccaacaatgatggatatcagaatagaaaaaacaacctgcccgaaggcaaaaccggactggtcgcatctcggcttcggacacatcttcacggatcatatgttcattatgaactataccgagggtcagggctggcacgacgcgcgtgtcgtcccgtaccagaacttctcgcttgatccggcgtcgatggtcttccattacggtcaggagatgttcgagggtctgaaggcttaccgccgcgccgacggtcacatccagctcttccgcccgcagaagaacatcgagcgtatgaaccacacgaacgaccgtctctgcatcccgcgcgtcgatccggacgatgtcctgaacgcgatcaagacgcttgtcgaggtcgataaggattgggtcccgtccgcggagggcacttcgctctatatccgtccgttcattttcgcgaccgacgctcatctcggcgtccatgtctcgaagacctatatcttcgctataatcctctccccgtccggatcctactatgccgccggaatcaacccggtcaagatctacattgaggacgagtatgtccgcgccgtcaagggcggcaccggcttcgccaagtgcggaggcaactacgcggcgtcgctcatcggccagaagaaggctgaggagctcggctacgcgcaggttctgtggctcgacggcgttgagcacaagtacatcgacgaggtcggcgcgatgaacgtcttcttcgtcatcgacggcgaggtcgtcaccccgacgctcgagaccgggtccatacttccgggcgtcacgagagcgtcctgcgtcgagcttctgaagagctggggctacaaggtctctgagcgcagactcgcggtaagcgaggttctcgaggcacagaagaacggcaagctcgacgaggcgttcggcaccggcaccgcggctgtcatcagcccgatcggcgagctctgcgacaagggcgagaagtttgtcatcaacaacggcgagatcggcccgatctcgaagaagctctacgacaacctgaccggcatccagtggggcaagctcgaggatactcacggctggatcgtgaaggttgactgagacctgacaggtaaataatgaatcgcccgggaatttgcattgtgaatcgagcagtccgggcagaatcagaataaaacaaatgagcccggagatcagtcgggctcatttgtctgtatcccgacccggaagtgcgaaaggcggtgaatcaattctggaaaaggtcagactgagccggcatacggaatatatcgagccgatctgcaagaattattccgagatcttcggaatatgcaacaatgattttcccgtacacatacatgacgacatagagatagtccacattctgtcaggggatcggatggcgataattgagtcccgcgagtattatgagcccgaggggtctctgactgtcatctttccgttccagcggcacggctacagaacgctgaacggtggacagcacaatgtcatctgcatcgacccgcagtatctgttcggatacagcgaaaggctgttcagcttcatgccgtctgatcccgtgctgcgtgccgatgaactcggtgaacgcgcggctgcgctgttatcggtaataatggatcgttcgcgtccgcgcgacaaggtacagacgaacgcgctgatcacggcgcttcttcctgagcttttcggtccgctcggactgcgtcagcgcgccgatttttcgctttcgggcgagatacttccgcttgtcatggagcattgccgtgagccttcgttctcgctgctcgcgctgtcgagattcaccggaatcggcgagcggacactgtccggcttcttctcgaagagcttcggcatgagcttcggaaacttcatcaggaaataccgtctgaatcttgcctgttcactgctgcgcggaccgcagagggtaactgtgaccgaaatcgcgtacgactgcggattctcgagcgtgcggacctttaaccgctgtttccgtgaggaatacggcatgagcccgtcgcggttttccgaaattgactgtcagactccggaaaatggcgagacataataatgaacctgtggtataattgtgtaaaataccataccggaggttcgaaatgaaacgcaagttaaggcttatccttttattctgcatgacactcgcgcagttttcctgcggcgctgaggacgccgtaacaacgatcgaaagcacttattcagaggcaacaggcgaagccgcgccggattatccgctgccggaagccgacttcggcggcgagagcttcgggatactctgccgcaccgaaaagaaatacgagatggattcagagtccgagaacggtgagacgctgaacgacgcggtctaccagcgcaaccggaatgtcgaggagcgctacaatatcaacctcgagtgctacgacaccgcgggcagctgggatcaacgcgataatttctataaggtctacaccggaagcgttatggcaggcgaagacatctatgaccttgtcgcttactacgaggcgacggcgcaggtgccgatttcagagggctgtatgcttgaccttaatgaaataaagtcgctcgatttttcgcacgactggtggtatccgggatataacgacattatgacgataaacgggaagctttactcctgcctcggcgacgcggcaatgacgacatgggagtatcctgctgtcaccttctttaacaagaatctgatggacagatatggcatggagtatccgtaccaggcggtcatggatggaaagtggaccttcgatatgctctgcgagctcggaatgagggtcagcgaggatctgaacggagacggaaagctcgacggcgaagatctctacggatggataacgagtgacggtatgctccgctgtatgccgacttcgtttgattttccgctctgtgtcgtgaatgacggcgtgcccgagctctcggtcggaagcgagaaatactacgacgtctatgaccgcgtatataatgttctttgggaaaacgactgggcaacggtcctgaacggttcggacgacgacggtcggacgacctgcttcactgagggacgggcgctgttctgcagctatgacgcgaaatccgtcgctgaactgcgggagatgaatgatgagttcggaatacttccgtatccgaagtataacgaggctcaggataactactacacggttgtattcgacaatcattcggttttctgcgtgccgaagaccgtcaaagaccctgagcgctccggacttatcatggaggcgatgggatatgagagtatgcggattgtgacgccggcttactatgagataatgcttcgcggcaaggtcgcgcgcgacgacgagtcgcgcgatatgcttgacattatccgcgattcattccagttcgactttgcgatagtcaactcgatgctgatcgacaatatctttccgttctacggcggtcagatgtgttccgaaaatcagtcgatcgcgtcagaggtagcgtcaaagctcccggtctggcagaagaaattcagaaatgtgctcggattctacggaatagaataatcctgcacgaaaaaatcagaaaacaagcaaatgagcccggtcggattccgggctcatttgctatttacttcagttcatccacaagcgaatccatcgtatccgcgtagagcttttccatcgacgcccagagggacgagatgtcactgttggtgtttacggactttctcattgccattgagggcgatttttcgtctccgaagttgtaggagtagatctgcgtgaagtcgaactctatgttcgcgaagatcatgtcgagcattgcctccgagtcggtgtcgcgcgccgccttgcccttcagcgcgcggtcgtagtacgcgggcaggaggttcttccagccgtagtacgcgagcgcctcgagaaccgcgccggacagctcctcgtcagccgttatcgggatgacgaacgccgtcgagtctccgatcgcgttgtaggtgatgtatttctcctgcgcctcgttgaacttcgggtaggggattatcccgaagtcgtctttcatgctgcgcagtatgtgcgccgcctcgatgttgttagcgaggaagagcgactgcgagttctggaacagctccttggcgtcaggcgaggagccgaagaacgcgatgttcttgttgttgagaagcgcccgtatcttcacctgcgcgtcggcgtagcgctcggtgagaccgagaagtttcggcattccgtcagagtcgcgctcggtgatctttatatcgcaggactggatatatccgtcgacacacatccacatgtccgacgagatcccgaaccggtcgttcttgtccatgacggtgtcgccgttcagatccgcggcggcggtctcggagagctccgccatcttgtcgagcgtccacttgccgtcgttcacgagaccgtagatgtcgccggtgttcagatcctccgcgagcttcttgttgaagtacatggcgtaagtcacgtcgtagtatgtcgggtcgatatttccgaagcagagggtcatctgaccgccgaggtcagccgcctcgattatgtttgacggccaccacgggttcgtgaaatcaatgtacgggttggtcttgagattgtggaagttgccgccgagcgagtctttcgccagtctgtagccgtagccgcccgcgagctgataggagtcgtcgcccgcgagaatgctcgcgttgagtacgttcagccactcgggataatcgctgacaagtccgggacggatgtcataagtgaaggtgacgccgagagtgtcctgaaccgtgaggtttctctcgaagaccgcgtcgtttatgacgtcgccggtctcctcttcgaccgggaagcggctgtctgtccagatcaggatgttgagattctgacctgagaagtccttgtccggcttcttgtagacgggaccggtctcagcctcggttgttgtgtcagttttggtattgtcaggcgcggaggttgtcacggcaggtgtgccggagtccccgcaggacgcgagcgcggaggacgcgagcagcgccgccagcagaatagcgagacgtgatttttgttttgtttccaagatctttttctttcctttctttgtttaccgctttatcgggataagaataattatacctcgctcttgtaaaccgatcaagcaccattatgtaaataataagaaaaatcagtccgcggacagtactataccccctccgagatcggtcagctgtccgtcagtatccgcgacgatgtatccggcaccggcgacgaaatccgcgacatccgccgggcatttgccgaaaaagaacacgatccgcgagtcctcgtcgacaaccgacgcgccgccgatgaagccgtattcacagccgtcgagcgctatcccgccggaccggatgaccattacatcgattccgttttccgtcagcgcctttgccattcccctgtcggcggtcacggcttttccggcgctctcaagcgggagcacggcgcatctcgcgtacccctgctttgtgttcaccggcgtgagaccggaaatctccgcgagcttcaggacgtccggagacaggctgtcaagcctcccgaagagcttcccgcaaatggcgagcgcgttgaagcgcgtgtcgtccggatagacgccgcgcgggaagtcgtcgcttgtgaatatgccgttccccggtccgaccggtctttccggtattccgagccgcgcggcgtattcgcggttcatgagcgccgcgccgcccgcgctgaacaccagcgtgtccgcgtgcgagcggacgacttttccaagcctttcgtcctccgggagaaaaacgacgtcatatcccggaaacatattcacgaagcgccgcgcgccctcgccgataagcagttttttcatccgtaatcctttctgccgtttgaa

SEQ ID NO: 1323 - DNA, 4338 bp, Unknown
  16S sequences of unknown bacteria
acaaggtgcaaaaggtgaaacaggtgcgacaggacctacgggtgcacaaggtgcaaaaggtgaaacaggtgcgacaggacctacgggtgcacaaggtgcaaaaggtgaaacaggtgcgacaggagccacaggtgcacaaggtatccaaggtgttacgggtcaaacacctaacattgcggtagcagaagacacgcctaccagttataaagtaagttttaaaacagatactcaagaaattacaagtccaaatttaaaatcaaatgttgcatattataatgcaaacttagcaacattaaacagctatatagatattcctttggataatctcactttcactgtagcaaatacttcaaccacatctgtaagaatgtctgttcagcctaaagtagctactacacctgtattagcagatattcgccgtaccagtatatatgacggggcaagtgtagagtctcaaacattcaataatactactacagttgctgctaaactggttatagatgacctggtatacagtcagtctcaagaaataaattggattagaatcaggcagcaaaatccaacaacaaaactatggtctatgtgtgaaatacgcacgtttatttctcaaggtggtgccagaactaccgtttgtgtagaatggatttatacgggtgcatcatttgaggttcctacacactcatagaaaaatttttatcctatcgcttatgtcatataaaatctttcacgtaaaaagtacgtgaaagatttttcattttatcagatactgcatttattttaaggtttaatcgcaattttaaatacaccgtctgttttgttttcaaacattttatatgcagtatcaatctcgtttaaaggaaatgtatgggtgattaatttggttgtatccagcttaccttctgaaatgagttgcaataattcaaaactgtcacatccgtccacgcctcctgtttgaaatgttaaatttttaccatacatatcaggaagcggcagaatttgaggacgatgataaagagcagggatggtaacaattgcgttgggacgagcgcattgccaagcaagctgaaacgtttcatctgcacctgctgcttcaaatacacggtccgcgcctccatgttcactgttcctacgggtaaattccagtacatgctcgggagatacggtaagaatatttggccaatttttttggacaaactgtaaacgttgagaatctttttcgcataaaatgatgtttcgtggagattttaaaagtgcgcaaagcatggtacatatgccggttggtccggcaccaaaaaccaatatggtgtctcccggtgtgatgtctgcaatacgcacggaccaaaatccggttgctaaaatatctcccacaaataatgcttgttcgtccgaaacattatcgggtatgacggttaatccctgatttgcatagggaacccgcacgtattctgcttgtccgccatcgatacggcagccaagagaccaacctccctgtgaatcgatgcaattgttgacatagccatgcctgcaaaaaaaacaatgtccgcaaaatgtttctacatttaccgtaacacggtcacccggttttactgcagtaacttctgttccaatactctcaacaacacccaccatttcatgtcccactgtaatgccgggaactgcttttggaacactgccgtattttatatgcaaatcactggcgcaaatacttgcaagggttacttttacaatggcatcttgtccttcttttaacattggttttgatttttcttttagttcaaatactcctttttccatataagtatatgcgagcatatgacgttcctccattactgtttttattttagtatacgttgatatgctgaatatctcaatattaattatcgtgttatgaaaaatctgtacttttatgatgcattaggaagaatctcaaatattttcattaacaaaataatgttactgaattattagatttgtaagtatgaaaattttttagataaaaaagagataacggattttatccgttatctctttttattatgattcattttgttccaacatttgataatagtgtatcgcttttctcataaaagattctgttacacaaaagtattctgccaaatcccacacttcgcaaattccgttatgcagtgcgtgtatatattcttcgtgaggtacaacatgttgtattgcccagcgactggctttttcttcatgccgtgcgacaatctcacagggactgtttactttgtgagttgtgccggtcatgatatgtccagcttcatgagctgcaatacaagtttcgtctgctaacgagtggatagcattcgggttaaaaaatatagcatattgcttgtttgcttcaatggtaacagcaggtgtgtcacataaattataactatatacttttacacctgccttgtatagctcctcataaattttaaacaacgttttcatattttatttcactttcttttctcttccttttcctgctgctgtacaaaaaacttagccatttccagcagcttagctttgttctcttcacttaatttttttccttcgtcgtacattgcataggtaaagtcatcaaatgacagctcttgagctgatacagccggagtgtttctttgctgtgattttccaagtagataatcaacgcttacatgaaaataagaagcgatttttgttgtgtattcagcagacaacgtttttgtacgccctgcttttaattcggacagggtgcttcggctaatatccaatagacggcacattgcagtgatatttgtgttattttctttacatagttgttcaatcttgctatacatatctgccatattctgtttctcctttagatattatgaataaaaattacagaaaactgaaattttattacaaatatcattgactattacagaactctgatatataataaagaagggttgacagagttctgtataacacttttacttgcaccctaagtatattgcagaattatgtaaatgtcaacaataggaaaaatagaaattcaaatgcaatttatgccgctgatttatgttgatgtcattaaatgtgaatttaattcactgaacaagccataaaaaacttggaattgtaaaacaacattcattttacaatccaaaatcagaacacaaaaccaaaagaatccctgcagataatacgacagatagaaaaacagtggcgatatgtacaaactgttttgacaaaacacacagcttgcagcaaagatgtaccattcatatgatgttacgagtcatagtataacaaatagtttgtcccattaatcggactttggatttcaaagtggtacaacctaaaaaaggaggaattcgcatgcgttttcaagaaaaaatacgcattatattaaaatatgtttccggattgctggctgcaattgcagtcattggactgattggcactacgggttctgattttttaggtaatatcagttatatgcaaatggtgttacagcttattattttcagttgttttatggcggcaagtttggcgatttattggtttatcaaataggtttgattatagataacaaaaagaaagtgaggttattttatgaaaatagaacagcatccattattttctaatcagacacaccaagcaaatcgagattttctgtatcatgcagttgacgtttactatcagatgaaaagtttggttagcggaaacggaactgtagaattatgtaaccagttatttggtggtgttcaagtgtacaaaggaattgagcagctggcgtttgcagcaggaaaatctcccaaaacaaattggtcgggaaatgaagaatatccgtttgaaacttcttttgaattctgcggtatccgtttttatcaattgaaagaggcgaatgcataatcgtatttataggtattggtaaaaataaaggacgagcagtaaaagaatcggatgcaccgtgttatgcaatgcagcattgcggtattcaaattacccgtatcacggaagagacagaagaatttttggacatgttggtatcttggtattttagcggagattggctggagcaagatgagatgttctatttagaggagggatgataaacagttgatggcaacacaggaaaatgcaattacacatacaaaacaaaaaattgaaaaatggtccgctttggtaaaatcttgccgcgaaggaagctgcggagcattatatgcaatacaaaaattagagatgtatcaaactattttgaatgcattgttgcagcaaaaggagtgtgcttcgtcatgaaatgtatcggctgttattattataggagtttatctcagaataaatatatggacgattgttgttgtc

SEQ ID NO: 1324 - DNA, 3903 bp, Unknown
  16S sequences of unknown bacteria
taattttctctcgggcttcattataaccgaacgcaattccgcatgcaagaacagcgccctattttagttaaattcaacaattatattgcgaaaaatttgtatactatttttcactttgttggcatgtaagacgcattttcggagttgacaaaatccctgaaacgtcttagaatgtattacaacgttatagcagtatcacgctatagcaatctcacacacaaggagggtgcggcgtatcccgccgccacaggagagcaatgaaaaagaagtacagttccccctatgagctggacggacgtctcccgttaaagacggccatcccccttggcatgcagcacgtgcttgccatgtttatcggcaacctaactgccccgatcgttattttgggtgtctgcggcgttgccagcggttccccgatccatgtcacgatcctcagcaatgcgatgttcattgccggtatcgtcaccctgttccagctgtaccccgtctggaaggtcggcgcgaagctgcccatcgtcatgggcacggacgctggcgttcttggcatttacatcagcgtcctgacgctgctgggcggcggctttgattcttacggcgtcttgctgggcgcttgtatcatcggtggctttgtcgaagtgatcatcggctgcttctacaaatacgtcgaaaagctgttcccgccggtcgttatcggcgttgtgctgacggccatcggcatcagcttgattcctgtcggcgtcaacaccttctgcggcggcgacggcgcgttggacttcggctccaccgcaaacctcttcctggctggtctggtcctcgcttctgcgctgatcttccagtttgcattcaagggcttcatcagcaacatctctctgctgctggccatcgtcgtcggctatatcgcggcaattattatgaacctcacaatgccccatacatttatggcaacagacgccagcggcgctgctgtcgaagtgacaaagtcctgggtcatgaactggtccgccgttggagacgcggcttggttcgcactgccaaaattcttgccggtcaagctaggctttgatatccgcgccatcgtgccggtctgctttatgttcgtcgccatgacgatgaatactatggcctgcgtcagcgcactgacgaagatcgccctgggccgcaagattacccaccgcgaagtcaccggcgctctgaactgcgacggtctcggctccagcttggcagccatcttcggtgtcctgccgaacacagccttcacccagaacatcggcatggtcaacatgacccgcatcgtcaaccgctattctgtcctgatgggcgcaattttcctgattctctgcggcttctgcccgaagctgatgtccgtcatctccattatgccccccgctgtcctgggcggtgtggtctgctacatgttcggtacgatcctggtcggcggcattgagctgctgggtgacgaaggcttcggcccccggaacacgactatcatcgcagtctccatcggcgtcgcttttgccttgggcaaccgggaaggctccatggttggtctgcccagctggttcacctccctgtttgcttcctccggcgtcgccttcgctgcattcagcgcgctggtgctcaacctgattctgccgaaggagaaaaagggccagaagcaggcgcaacagccgaccacggaggccattgccgacgaagcggcagctctgagcggcgataccgcggcggcgattacaccggaagccattccgacggaggcttgatcgccccccttctccacgatctcatgcattcctttttcacattcctttctaaaaaatgcgggaaaggccgtctgtcagtcctcgggctgcaggcggtcttttccgttgagagagaaagcctccgcccgggccgaagcgccgaggcggaggctattttcgttttaattttcgtttgccggagcgcaggcccgtcggttcctgacctttctatgctctgctgcacagctgcggggctttttcttatagccgcagtcgcagtacgggccgccggaggcaagggtgtgcttccgcacagaatttgtcgcgccgccggcctcgctcatcgtataatccaggtggcacagggcgggcgtgaggtcatacaggccaagctcctgcatcagcgtacagatgccgcccttggtgaagcgaccctcatagccgctgccgtcggggtattcgtaaaactccatgttccacgggaaggggttccgggctgccgtctgcttcatcgcggcgatgtcctttaccgtgaatttggacttcccgctctttctgcaaaaccagcgcatcggctttgtcatcatggtctgggtgtagtattgcgtcagcggctccagcgcagggcggttcggcatggacaggatgaacgcaccgagcagggcgcagtcgacggcgttcatttaaaaccggtcggccttcttaaattccggcagctttacaatggtctggcggtatttcggcttggcctgctttgtgatggctgccacacccacagcgtcttagccaagcaccgccgtcagctggcggcaaaaggatttggaaaataacaccaacatccccaagggcattccaatatattgcattgcgtaacctcctattttatccgcccaacgtacgcacgacgccgggccatcttttttcccgcggcgccgaaggttagcttcctctaacccgcacccccacaaaaagccgccaacggcagcttgcttattacaaaaacgtgcaaactgctagcgcatttccgacgctatacgggacccagaggcttaccccaaggccatcaacaacagcggctatcaagtcaccctcgcaccccgtaagctacagcgaagcggcaagcggtctgctcaccagccaccagggcacggatgcacgcacaaatctgtctggcagctggtgcagtgtgcggctgcgatgacagacgcagcccaggcgagctcctggcagggatcgtgtgaaaggggcggtcttggagcccctttcgcgttcaatcaaaaaagcatttgcaaagcaaatgcttggggccggacgcttgcggccggcccgccccctgccctaagcggcgtctttcttccccgattctttcttcgcggtagcagaaagaatcgggcccccggagggcgctagataattcgtctggtagaaattagcgtgtagagactctcaaatttgttttttaaagcctggagtaatcaagtactgcgccaaaaacttgcttttgcgttgcagcaatccctctacgctgcatgggttcgacttagccaaacgctgcgcgtttggagtctcacccaagtcagcgctcacgcgctgactgctcccttagctctgcacgggttcgactacgctgtataagcttgaggagcaaaatcggagattttgctcctcaagcttattagccaatcgcgctgcgcttcgcttgcgctcttggagtttcacccatacacaagggagcctttggtgcagtgcgccgccctcggtactcagctgctcttcggtgcgcagcaccgaagagctgccgcgggtccgatggtatgccgcttggggcgcccgaacacggggccctacgctattttcgtataattgaatacagcagaacgccaggcgcggagcgcctggcgtagggtgggtcaaaggaccttggctaggaagctttggaggcgctcactttgcgggtggctgaagagctcgtttggagtattctcctcgacgaccttgccgccgtccataaagacgacgcggctgccgacctcgcgggcaaagcccatctcgtgggtcacgacgaccatcgtcatgccgtcgtgagccagtgccttcatgacatccagcacctcgccgaccatctcagggtccagcgcgctggtaggctcgtcgaagagcatga

SEQ ID NO: 1325 - DNA, 3411 bp, Unknown
  16S sequences of unknown bacteria
cccgacgaggcggtaagacgcataaaaaccgaggaggttgtcgcaaagttgggcgaatttgacctgtcggctccgaataaggacagcctcgaggcgctgaaatccgcggcgcaaaaggcaagagcggagtatgacggctttatctccgatttccccgagggatatattatgaattatgagctgctggaggcggccgaaaagctcctttcggcggtgggctacggagacgttgacggcgacggaaatgtcaatgtaaccgacgccttgaccgcgcttcaggcggcggtcggaaaaatcagcctttccgatgaggccaaaacggcggccgatgttgacggcgacggcaagataacggtgaccgacgccctgcttattctccaaaaatctgtcgcaaaaatcgacaggtttcccgccgaaaaataattaaaaaaggaatccgagggcttaaatctccttcggattccttttgctttaaaggtcgtctgcgtcctgaacaggctctccgccgtcataaggcgtacctgtccagctgccttgtacgtcggtgtggctcttaaagtcggtgttatccttgttctttaaggtcttttcgtttttaaaggcgggaatgaccccgaactctgcgtcatattccgccttttttgcgcggtttttcttggatttcatgcttttcacctccacgggcggcgatttttgttgtttgccttgcccgagaatattatctgcataaagatttgccataattccgattttgtgatatattaaattgaataacaaagggggattttcatgaaaacgccgtttttttcaagaaatacactttataaaaagcccttcggctgtcccgccgacaacgagaccgtgacctttcgtctgtttttgccccttgactgttcggaagccgttatcgccctttgcaaggacggagaaatgtgccgatattatcgtttttcgagagaattcgagaccgagtccgacggcgtttggtggagctgcaccctcggccccttttcaaaagggctttatttctattatttcgaatttgacacgcccttcgggcataatgttttgtataagggaaaaaccgacgcctgcgtcatgaatcaaataggtgaaaaatatgtcatgtcggtttatgaccatgaatataaaagccccgattttctttgcggcggcattatttatcagatttttcccgaccgtttttgtaaagacggcagctgtgaaaatccatttcccgacagatatatttacgataaatttgagggtactcccgcctttgaacagcttgaaacccgcggcggcagacagcttaacaacgactatttctgcggaaatttaaaggggataacgagcaagctcggctatctttcctccctcggggtgagctgtatttatcttaatccgattttcgaggctcattcaaatcatcgctacaacaccgccgattatatgaaaatcgaccctctgctgggcggcgaggaggattttaaacggctctgtaagaaagccgaagatttaggcatacgcataattctcgacggagttttttcccacacgggggaggacagcgtatattttaacaagctcggccgatacggctccctcggagcatatcaaagcaaggaatcgccttattataaatggttttcctttgatgaatatccaaacaaatatgcctgctggtggggtataaaaagtctgcccgaggtgaaggaagaatgtgaggaatatctcgagtttataaccgggcaaaatggggttgcggccaagtggctgtccctaggagcgagcggctttcgccttgacgtggccgacgagctgcccgacgtttttctcgacagatttaacgccgccgtcaaaagggaaaagaaggacggcgttataatcggagaggtttgggaggacgcctctttaaaggaaagctacggacaccgccgacattaccttctcggcggtcagcttgacagcgttatgaactatcccttttatgaggccgtgataaaattcttaaagggcggagacggcgacgagctgcttgaatcggtcttttcggtgattgaaaactatcccaaaagcgccgtcgacctgctcatgaaccacatggggactcacgacacggttcgtctgctgacccgtctcgggggcgagcccctttgcggccgcgacagagcgtggcagtcgcggcaaaggatgacggcggagcagcggcaaaagggaaaggctcttttaaagcttgcggcggtgcttcagtatacgcttcccggtgtgcccagtctctattacggcgacgaaacgggtgccgagggctattccgaccccttcaaccgcgctccctttaatgccgacggcgacgccgagctgaccgaattttataaaaagctcggggctttccgcagaaacaaccgcgtttttgcaaagggagaatttcacccgatttatgctcagctcggcacctttgcctttgaaagaacaggcaaaaatgaaaaaatcctcgtggcggtcaaccgttggcacgaggaggaatgcatagccctgccgccggaatatgaggaggcggagatcataagagggcggagggagaacggccgcctgattatgggggcaaccgacttttccttgatgaaactgtcttgacagaacacaaaatattgtgtataatcataaaaaatcacttaaggagtgtatgttaatgaacagtctttacggcctcgaagacattgtcggaggtgcaacccgatcaagcgacttcaacggcgcgatttcggttcttgccttggtgcttgccgttgttgccaccgtgcttgcctttgtggtggtgctttccaaaaagggtagagaaagccaaaatccttttatgaaattccttgttaatgtatgcgatttccgcagcctcatcatcgagaagattctcaaggcactctacattttctccacctcttatgttattcttaagggcgttctcggaattttcgatttcggctcttacaactacggccttaaccttatcacctcgatcttgaccgcagtcctcggacccattgccgtgcgtatagcttatgagctgcttatgctcaccgtaattcttgtcaagaatgtcatccaaatcaacaacaagctttccaagctgaccggcgacaagacttcaaatgatgtcaacttcgacaccgacctttccgagcttaagaaattcgctcccgcccccaaggcacccgttgcccccgcagctcctgccacccctgccgcacccgccgttcccacacagcagaccgtttactgcgaaaagtgcggaaccccctacgatcccaccaaaggcggctgccccaactgcaacaagtaaaaccgaaaaaattaagaccgtcactatgtgacggtctttttttgttttgacagcttatttttgcccgcggc

SEQ ID NO: 1326 - DNA, 32759 bp, Unknown
  16S sequences of unknown bacteria
atatcatatttttgctgtttcttcaatcttttacagtaatataaaaaccgcataaaatattatgcggtcaaaagcttcttgtttttttattacaaaaattaaaaaggaagatatttcataaaaggcataaaaaaaagataccgatttcattcggtatcttatacggagaaggagggatttgaattataaaaagttgcaaacagcattaaactaaattgcatggcagttatttaaaccctataaaatcaaggattttagttaatgtcaataaatacagtatattcatttttaattctctaaagggtatttgaaagggtcaaacagtgatattttttagctctcacaactcccccaaaagcttaaaagctgcccgttctgtagaactgtaaccgctacgtttccatataataaaattgcccctatatccgtatctgcttataatatcgtccttgtattctctaagcctattatcacgccttaacgctcttagactttcgtcttttgcatatctggctttatgctctgttatattataacttttggcaatatcatttaccgtataccctttataatagatactttccaatatttctttattagtcggggttagcttactcatagccttgtctaaatcgttgtgtaattcagtgttatatattcgcttttctgcatcctctatgtccgtgctgtcatcggctattgtctctaatagttccagttctccgtctgaattgcctaaaggagtatttaagctagtagaataattaagagtttctttcttgctactgcgtacccctgtaagctcattaaatgccgtttgtaggtggtatgtcatataagttaatagtttatatccctttaacggttcgtagctttcaacggctttcagtagtgcaaagtacgcctcttgcattaaatcatcaacagtaataccggcagataaacacaattccgtctttgagttgtaaaacctaaagcagcacttatatataaatggtttcgttgctttccataactctgatattgccgttttattgccttgtttaatttgtattgccagttcttcattgctcatataatcatctactttaatcgctcatttttccgcaatcttcaagcatattaatttctttgcaaattccgtttttatgcggatttctagaatcataataattttgacattcgctttctaattttgagacatttttttgatttacgttaggcgcaggttgaaactgtaaatcgtttttatgtgggttcatgtcgtcatagcacttctgtatctcctctaaactattgctaaacagaggcatagaggcgtcataagtcattatccttttacctgttatcatttgcatacctcctcatctggtactttgtacactacaacgcctataaaagtagcattaggagccataaaggagttaaagcctactacttcgccgccgttttcgtttatttgcgataacacggcgtctaaccctctctctattgtgtccgttcttgccagctctatctgtattacttttgcttttgctatcatctaaaaacctccttattataaaatattacatctgtagtaattataccattgcataaaagaaaagtctatgatataattaaattaccccttttaagagaggaaaattgatgcttttgtcttttatcaaaaagcggactctgttaccaatagtagcggagtccgcttttttatccacttaatactacagttgtaataatatcggctactgttcaacactatccctctttttatattatattaattaaacttagtcatcttatttaataacttaaaagtatttgacatatcaataacttttaagtataataatagcagagaggaggaaaactaaacttgcataggataaacttttacagagataaacacggtaatgagcctgtagcagaatatatagcagaattagcctggaaaaaggacaaagacagccgtataaagctaaacaaaataagggattatataaaagttttaagcgagtacggaacacaggcaggagagccatatataaagcaccttgacggtgaaatatgggagcttagacccctccgagatagaatattgtttgtaggttgggcaaatggtagttatgtattgcttcaccaatttatgaagaaaacacaaaaaacacccgcaagagagatagaaaaggcaaagcgtgaacttgcagatttgatagaaaggggcgtaaagtatgaataatacagagaaaacaagtaaagattccgctataggaagagatgccttagagtttatggacgctcttttaacatcggaagaaatagcagaaagcaatcttagagttgcccttataggcgaactcattaaggcaagacaggaaaaaggcataagccagaagaaattagaggaattaagcggagtaaaacaacccgtaattgcaagaatggaaagaggcgcaacaagtccgcagcttgacactattcttaaggttttggctccactgggcaaaactcttgccattgtaccgcttgaaacaaaataactaagtataagtaagctcggttatataaccgggcttttgttttatctcttatatatcgtgtcaacaaattatattttccgttatcctgcttaataaaaaattggtgggatatgctttttattttcaccttaacaaaccttagcatttcttagcaataaacaatgcagattctgctttaaatctcttttttatgttctgcttttctctgctttttaccgaaaaaagttcggagaaacacgcttttttatgttgcgcttttctgcgcttttattaaagggtgaatctcaaactagacacccttgcatattgttatagtatcgtattataataaaaaaggtgggtagtttatgcctacccactaacacggtatttttatttgtccccttagagattgccgtctctaaagggattttttatatctgacatgaatttaattcacctcatattttaacgccttaattcttctatagtcggcacatataaaaccaatggctttatgatactctttgttgtccataggttttaaaacctctttccaaagctctacacgctgtttcatttctccgctttgtggggaatgtttaaataaatcttgcacagctgccggcaagctatcaaatatagttctagtcaaataatatgtatgtgtgcggtaaagatgacaattcatgttccacccctccaatgtatttataaaactaataccacgccctaacgccgggttagaccgttcagaccgtccgcacagttctattgatttataaatcttatatgataactttgtagttttaacaatatttgataccttgctttttatgttcattgttttatactccttttcatttattattaatccgctcatttttgagcaaaagtaccgcttatcaccattgttttttaatcttccgcaagcaacgaaaccatgtaaaaaaaatttccgcaactggctgttttttgggctcacaagcaccacaggcttttatatccctgtaaagtacctacggcatattagattgcactatacttgtccttatatgtaatcagtgcggcgaacttctccagattgccgacagtacccaggtgagtaaacttaatatcgtttatacgtcctccgttaagctcaatagaggctatacactcggttacattggtttgaaaatcctcgtattctcctaggtctgcatcttctgtcatgcctctagctccggtacctctagctccggtagtgaacataatatccatgtatatcaattcctttcgtttgttattgtattatttacagtacggtaaaacgccgtatagggtttttattgatattctatagagtgagtacatgacattttgtcagcttgtctatagagatatggcaataatttagttacggtcataggaccagtgcagaataataatctatcccctgatattccgctgtgtgtataaatttaatatcaataacctttccgccgatggtttctatattagaaatacagtcattcaatttattttcgatggatgtttcattttcgcacccatttatgtacttactatctcctgtaacaactttaactttcattttgcgcgcttcctttccgttttctgatacctcataccctttataaagccataggcaaaaacatcacacattacatcaaacaacccgtttctatcttttagttgcaacaattcttcataccgcaagccgtatctattctttactgctttatcaagtttttcatattcttccaggcccttatctactctccgcattatatatcactccttttaaacaaatctaaaagtctgcccttctgcctgtataattcagaggatatttttaaaccgaatttatatccgctttcctctgctgcgtgaacctgttttataatagcctctatcaatttgtcattgtcttcacttgtaagaggcagatttttaataaattcccctaactccttagcggcagtataaaattcctctgttctctctatttctattattctgtcagtatctgaaaaatttcccatagttttaagcctcctcaacaataaaatgcacctctgcagcctcatgcggctttatacaaataatcatttctccctcttcatattcatcttgagagaaaaaccattcttgcatgccttttatagccttgtccacatcgtcatcttttatcgtttttactgttttcatatattattctcctttctttcagcctcttttttaaaaaactggttttaccaactttttagagctgacaaaccgcatgattacggggtttaccacaaaaccacgttttttttcaattatcttttttatatataaggctctatactatatatatttttatatataattctttttaagaaataatatggttgtttggtttagccttgattttaaggctttttctgcgtcatgttttttgccgcgaaaccatattttaaattaagaatgtggttttacaaacatcgtgggtctgtctggtattgtctggtctctaacttttttatatccagcgttttccatagcctcataaaacgaattgcgacccaagggcttatagcctgcatgtttacaaaagtcttcatattcaaaatatacagtctgcgcctcttttgctaatatgaagtctctcttttcctgtatgaactccatgacgttgttatttttctcatcaaacgcttttaacgcctctttgcttatcggggggattgtgaatccgccgttcttgaaaacattatctaaattttcaagtcctattttaatggcgtattccgctacttcctcagtacatagttttgataacatattgacaaccgcttttttcctaaagtcatttagaaatggcaatatctttagcctccttttcaatccgtttgttttatcattcatcttcggtattgtgttccctgtaaagattaacttaccgtaatacctcatcggctttttgtctttatattttcctcccgcctgaaacggttcgccggacaccatttttttcaatgggcctacccttgatatatattcattctctacgtcgtcgccaatattaagcagtttgttttgaagctgaggcaatgtaaagttgtccgccatttcctcaagagtgagaaaagaaatattgtcatttccaatcagaaattccataaatccggaaaatgtacttttgccgttcccgccgcctccaaggatgaataaaaacgcctgtaatgggtttcccctgtaaaaacaatagcctataacctcttttaagaactgcatagctacctcatcgccgcatacaaggtcagatataaagctgtccaatacatcttgcctctctgcctctgcgttgtaattgtgcggtattctattgcaaaatacatagtcctcttttatcgggattagcttcttttcttttaagtcataaatgccattattaaataatatgtatcgcttatcacttgtagttttttcatctgcataacgctctacataccgtctaaactctaatcggtcttttattcgtgtgttatacacttcatccatgacaattttgtcaaactctccgtcggacaggtgaacatataagccactatcatatctgtgtagatgttcgccaattttgacaatcttatatttttttatcagatataacgctagcttactgaaatcaagatttttaatagatattctgccgttctccatttcaaagccgttattgttatactctatttctttgcgccgtgttgtgtattttcctacgtatttatcaattgctgcttttacctgtttatcatcccaagaggcgtaaggcttattataaaatatcttgtacgcctctttatcaatcggtataccatcgttttcaagttcagcggtaaatatatcgctcattgtttttttgattttagcagggaggaaaacaaaatctttaacatacccctttgtcagtccgtctattatagggggcatatatctttctgcgtcctctttatcttgtataagcatcgaataataacccgaatagattatttttttatccagggcttcatcatcaaccagaaatatatacttcttgtttccctccggtggtttgctgaaaatatcagcgaatactttttcatttatcgacaatgtttattcaccttgctttctgctgttgacccattcttttaagccttctaatgggattaacacttttcttcctattctcaaacagggaaatccctctatccttgtaagctcatacgcctttggcaagcagatatttaacatttctgccatttccggtactgttatagttagtttctccatgtgataacctcctttggctcttaatccctcaaattttccgtttactatgactattagaggcacgttattttatttccctataaagtggataaattaatcactgacagttgttttatttttacccttattatttaaatggatattttcaaaaatacgagtagccattgctttcctctgttcttctgtgtactccactttctttctatgggggtctttcccaaaacgataatcgtataaagggcagttcttaacagggcaaagcttaacctcattactgctgccacatgaacagtcaatgcacttgcgccttattgctttcatcggtgttaatttcatgctttattcctccgtttctataatgtccgctacgtctacgcctaacacatcggctattttgtagcctataacgtcaatacatcttttcccctgttttatgttggttatggtctggcgtgataccccaactttttccgcgacttccttaactgacatgtccttgtcaattagcaaatgtgcaaatttctttctgttaattctcatagtttaatcacctccattttagttgatatttgaattatagtataataatttaatttagtcaatactttggtatagatattttactttagttaaatttaaacacttatatgtttttgacctttaatattgcaagtgcatatcttttgtgttaatctaaaactaaaataaaaaggaagtgattacatggacaacaaagaactttctgtttttgccgaaaggttaagaaatttaagaaatgaattaggcatttcacaaactgaatttgttgacgggatagggataactgcttcttctctttctgcgtatgaaaaaaactcaaaaatcccttctataggtgtagttaaaaaaatagctgaaaagtataacgtatctattgattggctatgtgggttaagtgaggataaacaaataaaccaagaaatcaaaacatattcagacttgtttaaggtgttgcgtaaaataaataatgtatcggaaaatttttgtgagtttgaatccgaatacaacaattcatatacgggcgagtatcaagacttgtgcggcgtagttgtttttaatgacaggtttatgacagacatgttaggcgattggaataaaatgttaaagctatatcgtaataatgcaatagataacgatattctaaaattatgggaagaaaaaacaattaataaatacaattttccaataggctatattgatgaaccaattactgacgatgatttacccctttaaccttgaagtagggtaatagcatataacttatcaaatctcctgtatttcaataaaaatactcactagacatagcgtaatttatcgctttccgttaatatattaaatataaggaattaaaggacggaacgggcagccgtcgcccttgttggagatgtgggagtgtcgccccacttaatttcttttaactcttgcggatgcgttatgcgtccgcttttttatttgattaatattacaaaagtaggtgataacatggcaagaggcgcacagggcaacggaactataagacagcgtaaagatggacgttgggaggctcgtataacagtagggcgtaacccctctacagggaaacagatacaaaaatcaatatatggcaaaacacaagccgaagtaagaaagaagctcagtagtgccgtacattcatttgataacgggacatatacgccgcctgataaaattctgacgtctcaatggcttgaaatatggctaaatgaatatgtggaaaacaatgttaagccatttacctataaatcatacgaaacgcaatgcagagttcatatagtgccacacttggggcgaataaagctacaatcacttaataccccctctatacagtcattttataataacatgttaaaagaaggtctttcagcaaagacaattaaaaatattcatggagttctccataaagcattagacaaagctgtcaaaataggatatatcagttttaatcctgctgacctttgtgagttgcctaaaatacagaaaaaagaaatcaagcctcttacatcggaaaatataaaggattttataaaagctctggaaggcgaaaaatacaaggctctttatttaacagccctgtttacgggaatgcgacaaggtgaattactggggttaacatgggattgtgtcgattttaaaaatggcacaataaccgtaaataaacagttgcaaagagagaaaaagccaaacggcgaatatattcttgtacccacaaaaaacagtaatactcgtactataacgccagccaagtttattatggatatgctaaaaaaagaacatcaaaaaactacggtttatagtgaatacaaccttgtattcgttgatgaatgcggcaaacatcttgcaatacatacagtatataagcattttaaaaaaatagctgaaaagataggagtgcaagaggcaaggtttcacgatttacggcatacatacgcagttacagctcttcaggaaggagatagcataaaaacagtacaggaaactttaggtcatgccacagcttcttttactcttgatgtatatgggcacgtgtccgataaaatgaaaaaagaaagcgccgcaagaatggacgcttttataaaaagtatgtcaatataggcatttaaaaacaggtctgaccctttagagataaacaacataaattctctaaagggtatttttaagggtcaaaactctaaaaagacaagaaaaaaccccgtaaacactagatttacggggtttctaaatacggagaaggagggatttgaaccctcgcgccgcgcaaacgacctacacccttagcaggggcgcctcttcagccacttgagtacttctccacggcttactgccttgctataatatcataaatacgtactcttgtcaactgtttaatggttttaaataacttttttaggttttttaatctttttatttctgtccgtacttacttatccaaaattcttcctcgtcctcgccctttgttttctgattaaaatagtctaccacaaagcacatcacaagcggtattataaacgcaatgacgccgaatttcacactgtctcctcctgccgccgtatattcatacctcagcagtttaagcgctttcagattaaatgcgctggcaataagctgttctattaccgctattataatgaatattcttaccggaatacgaaatttatattcccctatgctgaccttttccgtacagagtatatacctgtttattacctctgccactgcgccttcgtcattggtcgcctttgttatataatccgcttcgtccttcaaaggctgtacggcgtttcgcaccgcaacccccaatcctgccgctttcaccatggatatatcgttgaagctgtcgcccattgctatggtttcgcttatatccacgcccaaatctttagccagagaagccaacgcctcgccctttgtagaacccatgcccgtaaactccaaatagttcgggttggagaaaaagcagttgaactttccgcttattttatgcttcatctctttttctattttcaaaagcagttcgttggggccgttcagcagtattttggaaatttttccgtcgtattcctctatactgtcgacaacggtatattcggcggaaagcttatctatatacgcctttaccctttcgctgatgttttccacaatcagtctgtcgtccctgtatatctgtatatcaacgccgtatttctttgccgttttataaatttccacagcggaagcactttcaaacagattttccttcatcagcacaggcggaaatcctttatataccgctcctccgttaagacatataatatatccgttgtcgacgcccagtttctgcgctatatgctttacgctgaaaatacctctgcccgtacatataacaatattcgcgccggcgtcggaagccttttttattgcctccagattcgtttccgatatggacatatcagatgataaaagcgtatcgtccaaatccagaaataacattttataactcattttttatcaccgattcactacttatacacaattttatgttgataaccacagtttcctgtggataaagtcaaatttcctgttattatcctctgcctttatccacagatttttttacatttttcactgcttttttcctttttgcctttgccgcggcatttttatatatttctgctttctctttctgtctttccttttcagccaaagccttttccttcattttcttagcgcgaagcgtccttgccggctctttaacggttacggtctttttgaccgcctgataagcgttatttttagccttgtcaatggcttcctgctcctcctttgagagtatatatgtgcttacacccagttcgacaggctttgcataggtaaacgtaccgcttcggctgtgtattccgtttattacgattccggtatcctcggcgtccagtattgcgacggcaaaacacagatttcctcccatttcctcaaagggattatatcttactatgccgaccttctgacagcaatacttcatatttttgttcatatcctgtactatttccagtacctttgtatatttttcgtctatgctttccgcctttgccacacattccaccaacagcttttccatgttgacgtcgtttctgcgttttttattgatgcccataaatacttcgtatcttgctttcagcttccgatggttatatatatcgtaaatgacaagaccgagcaccaataccaaaaccgtcaatattatggaaatccacaggtcaaggttttgaccgaaaaaacttccctcaatcataagcctcacccttcatctattttattgatcaattccaatattctttccaaatccgcgtcggaatagtattctatttcgatttttcctttattttttttgcagttgagctttacctttgtaccgaaaaggcttttcagatttttttcaatggatttatactgactgacatcaaaggatgacggccttatttccacgggtttagcgttattcagcgtttttacgaggttttccgttgccctgacgctcattccgttttctattatcttttcggctatttccgcctgtctggcgctgtcgttaagtccgagaagagcccttgcatgtcctcccgaaagtttattatcatgtatcattttctgaactctgtcgtccagatttaaaagacggagtgaattggctacggctgaacggctttttcccaccttttccgcaacctcctcctggctcatggaaaattcgtctattaaccttttatatcctccggcctcttcaatggcgttcagattttccctttgcaggttttcgataagagctacctcaaaggcggcgctttcatcatagtttctgattattgcgggtattttatcgataccggctatttttgccgctctccaacgtctttctccggctattattttgtaaaattccccgtcccttgccaatattatcggctgtataactccaacctgttttatggattcagccagttcctccagggcaaactcgtcaaatacccttctcggctgttctctgttggggctgattttatttatatctatttccgccacgcccttgtcgtttatgttgtccatctgctgggaaataagagcttccagacctcttcccttggagcctaaaccttttttgaccattatttccactccttacttatgaccgtttcggcaagcgccctatagctttccgcaccctttgaccttgtatcatatacggttataggcagaccgtaactgggcgcttctcccagtctgacattcctgggtattatcgcgctgtacatggacggactgagaacctttttgacttcctcaaccacttccaaggaaaggtttgttctggaatcgtacattgtaaatacaacgccctctatttcaagggagggattcagcctgctctgtacgaggcttattgtgtggaaaagctgttccattccttccagcgcgaaatactcgcactgtacaggcacaagcaccgtatcagccgccgtcagtgcgttaagcgtaacaagtcccagggacggagggcagtctataataacaaaatcatagtttttctccatggagcttatacattctttcattatatattctcgcccgtcggcagctataagctctatctccgctcccgataaatccatattggacggtattacgtcaactccgtccgctacggttttataaacggcttcctccgcctttatttcccctaaaaggacattataaagcgtgttttccagtttatttttttccagaccgagaccgcttgtggtatttccctgggcgtcggcgtctattacaagaactcttttgccctgctcgcccagacatgccgccaaattaacgactgtcgttgtttttccgacgccgcctttctgattggcaacggctatttttcttaatttacccataatttcatcaatcctgtttataatatttatttcctcgggatatgaaaacaaccgtcggttattaatttcatatcctgtctttcagctcacatcaaaacttttacattcggttattattttaaaaaaactgcgaaccaaaccgcaatttttaaaaccaaaggcttaccgaacggattttttcgtcataaaatcgttttttaccgaaagtttatggtttttataatatgatagcataattttataataaaaaaaacctaatttctttaagtttcacgtgaaacataacatttaatcaaaaaaagaaccgtgtttcacgtgaaacacagtccttaaaatacgttttacatctgttcgggagcctttataccgagtatggcaagtcccgacttcaatacggttcttacacagtccacaaccataagtcttgcttttcttacggcttcgtcatctgtcaatataatattgtcatgatagaatttattaaacgcctgtgaaaggtcaaccaaatatctggcaattaccgaaggctcgtatctgttggcagcttcctttatctttgcggagtagttggcaagtattttgcatacgtctgcggaagcatcgtccgtcagtacggaataatctatatcctttttcatctcatcgcagtatcctgcttttttgagaacgctgcacgctctcgcatgagtatactgaacgtaaggacccgtctcgccgtcgaagttcaacattctgtcccacgagaatacgatgtcttttattcttccgttgtataaatcgtcgaatattacggcgcctatgccgacttccttggcaacctcgtcctttttcggtaaatcgggatttttctcatctattatgccgagggtctttttaacagcctcgtccaaaagttcctccataagaacgactttaccctttctcgtggaaagctttccgtcctcaagacttacaagaccgaagggaacgtgtacaaggttttccgcccactcatatcccattttttctataaccttgaaccactgggcaaagtggagattctggtcgattgcagtaacataaagagccttgtcgaaatcgtatgttttctttctgtaaagagctgccgttatatccctcgttgcataaagcgttccgccgtctgttcttataataaggcacggaggcatttttgcgtcctccaaatcgactatcatagctccgttgctttccgtaagaagtcccttttccttaagctcctccacaacgggcgccattttatcattatagaagctttcgcccgtatagtagtcgaattttacgcccagcttatcgtaaaccctttcaaattcctttatacttatatcatagaaccatttccaaagggaaatcgcttcctcgtcgccgttctgcatttttacaaaccatgctctggcaatatcgtcaagggacgggtctttttcagcctcctcgtggaattttacatatatacgcgtaagctcgcttatacccttttgttcaacgctttccttactgccccagcgtttgtatgcttctataagctttccgaactgcgttccccagtctccgagatggtttattcctacgcatttataacccatcttttcaaatattctgtaaagagccgctccgataaccgttgaacgaagatgtcccacatggaaaggctttgctatattgggtgaagaatagtctataacaactgtttttccgcagccctcgtctgtcatgccgtagctttcgccctctgcggctaccttttctataacagtctttgcgtacatacttttgtttgtaaagaaatttatatatgccgcaacaggctcgattttggagaacatttcaccgccgtcgattttgccgcatatttcggcagctatcatattgggcgcctttctcattgtctttgccaaacggaagcacgggaaagcatagtctcccatttccgactttgcgggaacctccataaagttttctatttcgtttatatccatatcggctgcctttgcaataagtgcggcagcttcgtgtctaaaatccattcttttcaatcccttcaataaatatcgtatatattttacaacattccgcctttgtaaacaagcaggacaggcatataatcggtaaattttattactttcggataaatatatttttgtcataataaaagactttaaaacacggtaaataaaaaagcgcagacacccaaatgctccgcgcagtttttatactgtttaaataatatgtttcaacctatcttcatggtcgcttacaagtatgttctgaagttcatggtatgctttaatatcactggttacatgtattacctcgttcagcttacggttcaaatcaacatgaccctcggcaactattctgatattcttatctgttacattctcaatatgggactctaatcttgtcagcctttggtctatgatttcaagtttctgttcaaatccggcttccagttcttctatgcgctgttctattcccgttacgctctgttccagtcctgcaacgctctgttccaatcccgttacattctgttttattcccgttacgctttgttcaagtcctgcaacactttgttccagtcccgttatgctctgttctattcccgccattttagataatattaaatctaatttttcattgtccgtcataatgcaaatccccctccttattaatatattaacgctttttaataagtatagcataatcattttctaaacacaaattaatcccataccgctaaaatataaaaatatttccgtcaaacataaagcaaaaacctttgttttgcgcctcctgttctgtttacaactattatcggacgtgatacactgtatacaataatagtttcacgtgaaacagaatgtaaaatcaataatgtggtataatttacagtgaggtgatttcaatggataaaaaacgaagaaatttacttatcggttcggctcttcttgcccctccgattataaataaacttgtattttttactgcaacaaaaaaatatcccatgcttgacgcctttcatatatacgaatggaggctcggcaaaataggatattccgtaaaaggaagcggaaaacccatagttcttatacatggcgccgttcccggttcgtcatcgtcagtatggagaaataacgtaaattcattggcggaaaactacaaggtatacagtcttgacctgcttggctacggaacatcagacagggcaaaaacgacatataccgcatacacctacgcttctatgatagacgattttgtaacggacgttatcggaaagcctgcggcggttattgcccaaggcgaaggagctgtgtttgccgcagctgcatgtatgaaaaatccgtcaaattataaaaaacttgttttcgtatgtccgaaaggcataaacgacagactcgcctcaaaaaaagataaacgaatccgtatgctttacgaactgcccataataggagaaagcctctatctgatgaaggtttctttttcgtccgttaaaaaacgaatgttggatatgatatacaacagcgaaaaaacaaaaattctgacagactgcttctactcctccgcacattatggcggcggtaaaaacagatacgttttcgcgtcatacaaaacaaactttatgaatatggatataaagccttttctaaaggaatttaaacagaaaatgctgataatatggggtgaatattcaaaggaaatcgacaatttcgaggaactgcaatatatgacgggtaaaccagaatacgccctttttgaagatacgtcggatatgcccaattatgaaaaccccacggagtttaataagctcgtaaaggaatttttgaaataaggagaaataaaaaattgacggaaaatatgacaaaacaggctgaaatggaaagctattacaaggagcttatgtcaacgatacttgcggagggcaaaaaagggcttgtgccgaaactggcgccgaaattcgtatcgtgcagccacaatgacagctccctcactctggaatttaaggtggcggattggatgataaatcccgaaaaaatacttttcggcggagcaatggtttcaatgctggataacacatacggttttttgtgccactatttcgcaggtgaaaattttatttccacaatcagcctgaatacgacgtttttaaaaccgggaaagctgggcgatataatccatgttaccgcaaaagccgtatcccacggaagaacgatagttaatatgaacggcgaggttttcgatgtaacgcagaacaagcttatcggcacatcacagacatcatttatgatattggacagaaaggtagaattataaaaggtaacaactatgatactgaaaaaagcggacgcaaatttgaataaccttaaagaactgtatataagggcgtttcccgaaagcgaaaggaaaccgttcgaccttatggaaaaaaatgcggataacggcagtatggaaatactttcgctggaaaacgaggacggagaatttctcggtcttgtaataactatcttatatgaagataaggttcttatagactattttgcggtagatgaaagcaagcgaaacggcggtataggcggaaaggctttgaaacttatatccgacagatataaagacagcaaaatttttcttgaaatagaaacgcccgataaaaatgcggaaaataacgcccaaagggtaagccgaaaggcattttatttaagaaacggtatgaaagaatcgggcatacacgccgacatatacgatacggacatggagcttcttatattcgacaatcccgttacatttgacgaatatgtcgccgtatacaaagccgcaattgatgaagaacagcttaaaagaatgggaatacccaaacaaatataaaaaacagggagacgcaaaaaagctaacgccatatagggcagtaatggaaaacaagattgaaatacaactttatatgtgcgttgcaaaggcaaaaagacagcgtaaaatgcggaaatgctttttgcgctgtctttctttatgttcaaaaataaaatcgcgtattcatctatcttaaaattcattgctgcaatataaacggtggaataaggaaacaatgtcggcaggaataatccatgataccatcaaatttagtcatcatcatcagaccaacctgaaataaaatgcaaatcacctgacaccatattcatcgccatattgtctcccatacgcattagcaaatcgccgtctgagtcaattgccatattattggaaatggtatatgcaaaatccccgtcatcataatcaaaaaaatttctgctcatacatataaactcctttctccttatcttaagacaattttttgaatttcggcaattgattaattaaacattctatttcctcatcgtttacttttacatcggcaaaaacaacaatatcatagtaatcttcttttttaaaatcttttaatccaccaagttcattgcaaatgtaacaatcgttaaaaacaatcttgctggctattcttctattatggtcaattccgaaccttaatatatctattgctctatgcttatatctatccaaatattttaaagcatatcttaagcagttgttgattatcggattaatagaacgatatgtaatagaatcaacttgtttctttcttctaccaatgctcccaagcttaagctcataaggttttgtttcaaatatcgaatggaacaagccatcattgtccagcattatttctaaatattcactttggcaaaaaatacaatcttctggaccgtaatgaccgtttgtaaaaaacatattgtaggaatcataaatatcattgaacagttccacatcatttaaacttgcaacaagacgagcaaactcaatacagttttcaaaatgaacccacagtatacctttattgttttttgtaaattcaaattgattgtgataccatttcaattttatcccatattcgtcgtgaagatatctaacaccatttaccgagtgatattccaccaaataatcaagaaatgttttctcaaattcatcggttttagtaaggatggactttccatcttttgaaagcaataagtcgaagtcttctttatataatttgggatcatctaaatatgcgtaatatctgaatcctttattgaacggcacattatctttttctacaggaaatttatacgcatcttcctctaataatctggctaatgaaacaccgaatattttttccaaagggataataaagtcgtatttaagtggcctttcttcttttaacatttttgaaaagttggatttttctctttttgcaaatatatatgcttcttgccctttaattcctaattcatgagcaatatcaacgagcaaatggctatacatctttattccttttaatttcatatggtggtcgatattgtttttcaaattccccataatttctccttcataatctttataattttatattatagcacagtgtttttgaatttagtagtcgtttaagacaacttttgttgtcgattttgacttgcgttaaaattcacaccaaaaatcacacagtcaaattagacaacttatttgcaatagtgcttcatatagaaaataaaagcttcacaaaaatatttttccaaaactgtcagagcctcgaaaggcaaccgactttttaggaagaggaggagcaacagcgtgagtgaacttttcgtgcattgcgtggaaatgagcgatacaaagtttgtacggtatctgcataacgacactacggtgagaatccggtacattatagtaaagactacaacttacggaacgggaattgcgatgtctcatactataacaagcagggaaattatattgacattttctgaatataagaaaacggcgtaacccattatactgagttatatcgtatcttatattaaatacttccttatctggcgttgcccaaagtgtctcccgttttatttactattttaaaccgaattaaaaaatatataaaccaaacggcttttttacacaacctgattttttatttccgtaatttacacaacaactcattccttgtttgcaaagctttccgaaccgtatattacctttatattaatctccaagcttccgtcagtctccgctatgtcataatatgccggtattccggcttttctgacggtatcgactgtctgttttatggaatttgtaaacagcttcatatcgttaaaggaggtttttattttttgtcctctttccccaaatctcagataaaataaaatcttatccacatagtcctcagcttttttcacagacatatccctttcggctatttctttaacagcctccgtacgcagcttatcgtcgggtattttcaatacaggcttcacatgctgttcgctgaggctgttttcggatattattttcagagcctcttcgggcagttccagtattttcagtctgtttgttatcaatgaacagctgacgcctgtttttgtcgatatttcatctatatccataccgaaatcatctgtcagcgccttatatccttccgcttcctccatatagctcagcgtttttctttggagattttctataaaagaaataacggagctttcctcctcgtcggcgtcgataaaaacagccggtattgttttcagtcctgccgcccttgccgccctcagacgtctttcgcctgccaccagttcgtatgttttgccgttgacaagccttacggttacaggctgtataacgccgtatttttttatggattccgtcagcctgttaagggaatagaaatcaaaatactttctctgctgatacgggttcggttttatgtcgtcgataggtaaagccattacattcgtctcatttaaaagttgcactgccataaaaaaacctcctcataaaaataagctaatttgcaatttctgccaaaattataacatatttttccagaggaagttttatttatacatacaaaattgtgtcaatataatacaaataatctgtcagattatcggttctttcttcgcttttccggcttttctcggatatttggacggagtcggctttaccttctttattattataagactgtgggttatatccgtttcgggtataatggcttttttgacctccgttatttctccgcccagaacttttaccgccttttcggcctcggctatttcttccgatacgtcggggcctttcattgatatgaactgccctccgacctttacgaacggcagacaatattcgcatagtacggcaaggttcgcaaccgccctcgatacgcacatatcgaagctttcacggagtttcttatcgcttcccccgtcctctgccctcatgtgtatacagtccacgttatccagttccagtttttttgtcagctcgttcaaaaatgttatccttttattaagtgaatccaaaagggtcatttttaccgacgggtcggctatttttacgggaacgcccggaaatcccgcgcctgtaccgacgtctattatatttttacccgatgtttcaactacggaatttattataagacagtcggcaaaatgcttcagcattatttccctttcatcggttatggctgtaaggttcattttttcattccactcaaggagcatatccttgtaatccataaactgttttatctgtctgtcgttcaattcgatatttattttgcggcagctgtcaaagagcagcttttccaaatcggacatattattcgctcctttttttgttctgttccatataaataagcagtaccgtaatatccgcaggggaaacgcccgttattctggacgcctgtcctatggaagaaggacgtatattgttcagcttctgcattgcctctattctcaggttttttatttcgttgtagtctatatcgggcggcagcagtttgttttccatttttttaaactgttccacctggttcatctgctgtcttatatatccctcatactttatttttatgttgacttcttcctttacgtcaaagggcagttccggtctttcggggtcggcttcctccagcttaaaataatccagctcgggacgttttataaggtcgcaaagcttcactcccgatttcagccttgtactgccgtacttgtccaaaagaagctgcgtttcttccttaggcgtaacgcccacatggtttacacgctctatttcctcgttaatcatttcctgctttttcagaaatctttcatatctttcttcggtaataaggccgacttcatagccctttttcgtaagtctttcgtctgcgttatcctgtcttaaaagcagcctgtattctgcccttgatgtcatcatacggtacggctccttacttcccctggttacaaggtcgtctataagcactcccgtatatgcttcggaacggtcgagaacaagaggttctctgccctgaacgtatctggcggcgtttattccgcctataagtccctgtgcggcagcctcttcatatccgctgcttccgttaaactgtcctgcggagaaaagtccctttattttcttaaactccagactcagcttcagctgcgtggcgtctatacagtcgtattctatggcgtaggcgtttcgcattattcggcagttttccatgccgggtatcgttctgtacatctgtacctgtacttcctcgggaagagatgtggacataccctgtatgtacatttcgcatgtatcctctccctcaggctctataaatatctggtgtctttctttatcggcaaatctgactattttatcctctatggacggacagtatctggggcccgttccgtgtataagtccgccgtacattgccgaacggtgaaggttttcccttatgagattatgtgtgtccgcatttgtatatgcaagatagcaaggaacctgttcgcgctttatctcctcgggagtattttcaaaggagaacggaacaatattttcatcgccgtactggggagtcatttttgaaaaatctattgtatttccgtctattctggcaggcgttcccgttttaaaacgatataatgttattcccaaatccaataaagatttgctcagttccgttgccggcataagtccgttggggccgctgtgcactatggtttcaccgtaaagacatcttgccttcatgtatgttcccatgcagagaacaaccgcctttgccctgtattccgcctgtgaggaagtcattactcccgtaacggctccgtcctccacaagaacctgcgttacctcgccctgtctgatataaaggttttcggttttttccagagtccttttcatttcacgctggtatctgcccttatcggcctgcgccctcagtgaatatacggcagggccctttcccgtattgagcatttttgtctgtatatatgttttatctatgtttttgcccatttcaccgccgagggcgtctatctcccttacgaggtgtcctttggagcttccgcctatgcttgggttacacggcatcatcgctatgctgtcaaggcttatggcgaatattatggttttcagtcccattctggcagccgccagggcggcctcgcaaccggcgtgtcctcctccgactacgataacgtcggcttcttccgctaaataagacattgcttttcctccttatttgccgagacagaatcttgtaaatatcctgtctattatctcatcatcaacactgtctcccgttatttcaccgagggctgtaagagcgtcctgaagatccatggatataaaatcctcgggcatacgggtctctatggttacggaagctctgtccaaagcctctatcgccttggcaagcatatttttatgccttacattatttatcataacgctttctttggcttccacatctccgctgaggaacatttctttaaatctttccgtcagcctgtccattccctcgttttccttaacggaaacgaaaattatattttctctatcagtataacggcataacagctccgtatcaatattaacggctatatccgttttatttacaagtataatcgcattttttccctttataaattccaatatttccttatcgtcgtcggttattccgatggaagcgtccagaaccaaaaatataatatcggcgttttccgcccttgttctggacttctccacgcctattttttcaacggtgtctcctgtttcccttatacctgccgtatcgactatttttacgggaataccgcccagattcatatattcctcaacggtatcccttgtcgtgcccggtatatcggtaacgattgccctttcctccatcagcagcagattaagcagagaactttttccgacgttgggtttacccaaaattacggcttctactccttctcttattatcctgcccatgtcggctgtatccaaaagtttgtttatctccgatttcagcctgtttaccctttccgccataacggaataggtttcctcctccacatcgtgttcgggataatcaatggcggcttctatggcggctgtcatatccagtatttcttccctcagctcatgcaccttgtttttcagtccgccctccagctggctgacggcggcttttctggaaagctcagttttggaatctatgatgtccattacggcttccgcctgagaaaggtctatcctgccgttaagaaacgctctttttgtaaactcacccggttcggctgaccttgccccgttgttaaggacggtttccaatactttgtttgttacaagcattcctccgtggcagtttatctccaccacgtcctccctcgtatatgttctgggagaaagcatgagcataacgagaacctcgtctattaccgcgcctgttacggggtcgcatatttttccgtaggatattgtatgggattttttctcggctaatttttttccgtcggctgatacgaatattttatcggcaatatccacgcagccttttccgcttattcttactattcctatgcctccgtttcccacaggggtggatacggcggctatggggtcgtccaaatagattttcataatatttcccctttattctaaaaagcccgatagaaactatcgggcgtaaatatcattctgctgttttctttttttctttaagcgctattacgacatttctgtgaggttcttctccctcggaatatgtagtaacgtatctgtcgttttgaagcgatgaatgtattattcttctttcataggggttcatcggctctaacacgacgtttttgcccgtatgcttaacctttctggcaaggttatgggcaagtgtttccagggtttcctttcttctttccctgtaattttcagtatcgagcgtaacgcttatataaggcgcagttcccttgtttacgacaaggtttacaagatactgtatggcgtcgagggtctgtcctctttttccgattattatacccatatcgtcgccgcttatttttatttccagatgtttgtcggtaaggcttgtctccacatttacgataagtcccattgcgataaacatttctttaaggaaatcctttgccgtcttttcgggattaaatttcttcttaacctttacaacggcgtctttggctccgaatactcccaaaaatcctctggaaccttcctcgataatttctatctcggcgtcttcctttgatattttcagttctgcgagggctgcgtttacagcttcgtcaaccgtcttacctgttttttgtattgcgtccactgtcgcccgctcccttctggtttgtaaatttgtttctgtctactatcgtgctcttaggcggttcgggttcgtcttttttctttttcttcttgtctttgaaaacaagctctccctttttctctttgttttcaagcaccttgtatgttccccatgtctgtattacggagaaaaggtttgaaagagtccagtatataccgagcgctataggcacgtttattgtgataacgcccatcatgataggcattactatgttcattgattttgtcattccggcagccatctggtcttcctgtccgcccatgataactttctgctttctctgcatataccatgtcgaaagatatgtagtaagaccggcgcatatgggaaccagaacaccggggaacctgagtcccgcaaaagatacaaggttaagaccgaagaaatattctatcgaatgtttctgtgcaagtattgcggaaagctctcccgccgactgtccgagacttgtaagcactccgttccagtccgctgcggacatggttcttacaagacccattacctggtcgaataccgaaacgtcaacagtcatattttttgcgagtattatgggttttaatacctctacccttgtagctgcgtcaatatttaaaagtccctgcgttatgtttgtgtaaacgtcgttgattacgcctacatattcatacggctgattgaagatatagtaaagagcatagagtataggaagctgtatgagcataggcagacatcctgcgaacatgctcgctccgttttccctctggaactcctgaatttcaaaagccattcttctctgagagtcctcgtctgtcttacctgcgtatttcgccctgattttgttaagctgaggctggagcatctgcatcctgtacgagccttttatctgcttataagacaacgggaacagtataagttttacaagtaaagtaaaaagtatgattgccagtacaagtgtacctgtctgtgtaaacgaataaatgaagttgaataaccagttgtaaacaatacccatcagcttggcgataggtccgactatgaatccggggcttccggccttcaacagtaccggcgcgccggcaagaaatgaattgaacactttttgttgtcctccttaagactgcgaaaaataagaatcttttttacggaaccgggtcatatccgccctcatggaaagggtggcattttaaaatccgtcttatactgaggtataaccctttaaaagggccgtattttgtaatagcctcaaaggcatactgcgagcacgtcggcgtaaagcggcatgtcggaagaaaatgaggcgatatacaaagctgataaaaccttatcagcgccaaaaataatttcttcagcaattttttcatcaataaatcagctcttttcggaaatatgggctttatccgtcaaaagaccgtgttttctgagaagatggttcagcgaacggtatatgtccgcatactgcgccgcgtttgccgacacccttgctataacgacaatatcgtatccctttgcgaccgtattctcgctcagacggtaactttcgcggataagcctagtaactctgctccttacgacgcttttaccgacctttttgcttacggaaataccgagcctgtttatattttttccgtttttaattacatacattacaaggtggcggttcgccagcgatttccccctgttatatacgtgtctgaactgaaagttctttctgagtgactccgtaaactccacaatctatccctctcttcaggatttttccaaaaaagcgccgcataatataaaagaccactctcagcggtcttattatatctgtatatgctaaagattttcaaaattatgctgataatacttttctgcctttttttcttcttgcagctaaaacctttcttccgttggctgtcgccattctttttctgaagccgtgaactttgcttctctgtctctttttaggctggaatgtcattttcatacccgcatgcacctcctttttattgcataagaaatccttgctcatgggcaagcactgttatcattatattcaataaagcccgtatcgtcaagaaaatttataattaattttatgttttcaataatatagtaggttcttttaaaaaccaatcaatatgttgtttttttatcacagtataaaacggcatatacggtaacggtcaatgtttggtaatctttcgtgttgataaaaatttatatttttgttatatttaatgaacagaatacacatctgtgcaaaactgaagttattaacatcaaaacttttgcggaaagttatcaacaaactgttgataagtctgtgaataacttttaaaatataaataaaacaagctgtttttaaggaaaaaacgtgtctgttaattattttgataagttaaatcttgaaaatgttaattaacgacaaaattttcatattaaaatcgagttatcaacataattaacagacaggctgtgtataaatcagataatttattaacaatcagggaggtagtctaaatggatatatcggaactttgggcaggcacgctcgcccttttggaacctgaaatatctccgatatcattcaaaacatggatagaaccgatagttccggtaaaaatttcgggaaacacggtagttttgaggatcgacgaaagttttataaaaagcatggtggagacaaggtttttgtcccttatagaaaattccgtaaagcatataatgggctgtgaatataaggtacatatcatctccggggacgaaaaaatcgaagaggttattaaggaagaaacaaaacagacaaagtccaaaactgcctttgacagcaaccttaacccgaaatatgttttcagcacattcgttgtgggcaacagcaaccgcatggcacacgcggcttcattggctgtagcggaagctccggcaaaggcgtataacccgtttttcctttacggcggcgtaggtctgggtaaaacgcatcttatgcattccatagcgcattacatactggatcaaaaccccaatacaaaggtactttacgcctcatgcgaaacatttacaaacgagcttatcaactcaatcagagacgataataatgaagaattccgaagaaaatacagaaatatcgacgttcttctaatcgacgatatacagtttatatcgcagaaagaacgtacgcaggaggagttcttccataccttcaacgccctgcatgacgccaacaaacagataatcatatccagcgaccgccctcccaaggagataaaaacgctggaggacaggctcagaagccgttttgaaggcggacttatagccgatatacagcctccggattttgaaacaaggattgccatacttaaaaagaaggcggaaaacgaaaatctggaaatagacaacgaggttctggcatatatagcaaagaacataagctccaatataagagagctggaaggcgcgctgacaagggtagtggcatacgcaaagcttacccaggcgcagataacgaaatccttggcggaaagcgccttaaaggatattttcaacgagcaggcagccatagaaataacgccggaaagaatacaggaaatagtggcgcagtactacaatatacgtccggaagatataatcggctccaaaaggaacagctccatagcgaagccgagacaggtcgccatgtatctttccagacagcttctggatctttcactgcctaagctgggcgaacatttcggcggcagagaccatactactattatccacggcataaataaaatccaggacagcctgaaaaccgataaaaatctccaaagcgtaatattcgagctggaaaacagaataaaaggcgaataaccgcttttatttgacaaaaaaacagcggttgaaaaccatgttgataacatgtttatgaaaaaattatattgtggattatttttatatttttatcgtcaatgttaaaactgtgtataactttaattttccacaggagttttaaacatgctttccaacagccaaaatcccactgtttttggggataacttctgttttcaacatattaacagcctctactattactactacgggaagaactatttatatatttatgttttatacagaaaggagttatcaacaaatgaaacttagctgttcaaaagattcgttgttaaacgccattaatatagtatcaaaagccgtatcgtcgagaactactcttcctatattggaatgtattcttctgacagcggacgaaaacggactaaaacttacatcaaacgacatggagcttgccatagaatcggcatacatagacgccgatatagaaaccgaaggaaacgttgctctcgaagcgaagtttttctccgatataataagaaaagtaaacggtgaagaagtcaatatttccgttgatgataagtttgttgctacaatatcttgcggaaaaagcgaatttaaaatttccggacagaacggagaagatttccctcccataccggaagttgaaaaaaacgataagtatgtaatttcacaaacagaattgaaaaatcttatacgtcagactattttttcggtttctcaggacgaatccaaaccgatattaacaggcgaatatatagaaatcgaaggaaatatgatagattttgtttctgtggacggttaccgtatttcttataaacagtcggagcttgttcaatcttccggaacaaaaagcgccatagtgccgggcaaatctcttggtgaaattgccaaaattctttcagccgatgaagacgaaaaggccgttatatattttaccgataaccacataatggttgatattgacggaaatatcgttgtttcacgtcttatccagggggattttatcaagtatcagcagagctttacaaacgactataaaacatcggcaaaaattaacaaaaacgaaatgctcaacagtttggaaagagcttctcttattgcaagggattcaagaaagatacccgttaaaatggaaatatcgggaagtaatataataattacgtccaatgccgaaacaagtacggcttatgaggaggtttccgcggaaatagacggagacaagcttcttatagcttttaaccccaaataccttattgacgctctcagagccatagacgatgaggaagtttatatccatttcaatacgcagctcagcccgtgcgttttcaagccggtagagggagacagctataaatatcttgttcttcctttgagaatgtaaatcggcataagaaacggaggcgagtttttgatggatgatgaaaaaatattgataaatacggattatataaaactgggacagcttttaaagcttgccagccttgtatcccaggggtctgacgccaaaacgcttatagtaaacggctatgtaagcgtaaacggcgaaaccgttttggaacgcggcaaaaaaatatatcccggcgatcttgtggaagtggaggaattcggttccgttaaagtggagcatgaataagtatgtatattaaaaatatttccttaatgagtttcagaaacataaaggatacgaccatagatttcggaaagggcataaacatattttacggagacaatgcccaggggaaaacaaacctgttggaatccgtctatatatgctccaccggcagatcccaaagaacaagaagtgaaagccagcttataaagttcggatatgaccaagcgcatatccgtacttttgtaattcgggaaaattcctcggacaggatagacgtccatttaaaaagggacgaaagaaagggaatggcggtaaacggcattcctatcaggaaaatgtcggagtttttcggaaatcttacggcggtcatattttcgccggaggatcttcgtcttgtaaagggaggcccgtccgaacgcagaaggtttatggatatagagctttgccagctgagccgtttatactgccatgatttgcaggactactacaaaatacttaaacagcgaaataacctgcttaaaacgctgtataaggacagaagcgccgaggatactctggatatatgggatatgcagctttgcgcctgtggggagcgaataacggcaaaaagagcggactttgtaaaaaggctgtgcgatatttccggacggatacattcgggcataaccgacggtaaggaaagtctttccgtggagtacaaacccaactgcgaagagggcagtatggaggaaaggctgaaatatcacagacagagagatattgcgcttggttccacatcctgcggaccgcataaggacgatatgctgttttttatcgacggaaacgacacaaaatcctacggctcccaaggacagcagaggacggcgtccctttcggcaaagctggcggaaatagagcttataaaaagcgaaaccggcgaagaacccgtacttttactggacgacgttttaagcgaactggacgaaagcagacaaacatatcttatggataatataggaaatctccagacgtttataacgtgtacgggtgtggaggacagcattggtaaatatataaaagactgcaccttatataatgtgcaaaacggagattttaaaaaagtgagccgataattttttgttaaaaacaatagtatgtttttattaaaatttcatagtttatttttaatttaaagagcctgtttccttgtaaaaacaggctttttgtgctataatggacttatattgcgaatcgaggacacatagtttttcgtgtataaaatacagagaacctttcggggtttttaaggagagatttataaaatgtcgacagagtat

SEQ ID NO: 1327 - DNA, 28036 bp, Unknown
  16S sequences of unknown bacteria
ggccgccgcgcccgccgcgagcgccttgacgatatcgcccgaatacttgatgccgccgtcggccacgacggttttgcccagcttgccagccgcttccgcgcaatccatcacggcggtgagctgcggcacgcccacgcccgcgatcacgcgcgtggtgcagatggaacccgggccaatgcccaccttaatcacatccgccccggcgcgcgccaggtcttccgcgccctgcgcggtggccacgttgcccgccatgacgggaagatgcggatattcggccttgatgcgcgaaaccatgtccagcacgccgcgggattggccgtgcgccgtgtccagcgcgatcatatccaccttgctgcccaccagcgcggccacgcgctccatggtatcgctcgttacgcccacggcggcggcgcagagcaggcggccattggcgtccttggaggaattggggtatttggtggccttttgaatgtccttgatggtgatcaggccgcgcagcatgtagttttcgtccacgagcggcaacttttcgatgcggtgctgggccagaatctgcttggcctgggccagcgtggtgcccacgggcgcggtgatgagatttttgctggtcatcacttcgtggatggggcgggattcatcggtttcaaagcgcaaatcgcggttggtgaggatgcccaccagcttgccgttttccgtgatgggcacgccggaaatgcggtagcgctccatcagagccagcgcgtctgccacgcggtggctgggagaaaggaaaaatggatcggtgattacgccgtgttccgagcgcttcaccttgtccacctgcgccgcctgcgcggcgatggacatattcttgtggatcacgccaacgccgccttcgcgcgcgatggcgatgcccatgcgggcgtcggtcacggtgtccatggcagcggagagcagcggtatgttcaactggatgccttcgcaaagctttgtggaaagatccacttctttgggaagcacctcgctcttctgcggcaccaggagcacatcgtcaaacgtaagcccttcgcgaattggtttcatgcgcaagcccccctgctttcgtgtaatttcgaagattatacctcattaacgttcgcaagtcaagttaattcctcggcatactccgctggcggcgtcgccgcgctttccggggttggcgcggcggtgatggcggcaaagagccagaaggcgaaggccagaatcagcacgcacagcccgcaaaatagcgcgcgcacccccttgcgcacggaaaagcgaggcttttccgcgccgcgcaaatcggcctcgaaggtgcggagcagcgcgcccatatccggggcggcggtatcggtgcggcttagctcgcgccgtgcggcgcgggccatggttttatcgaagggaaggttgcccagcgcgcggctaaaattcgcttgggcggcagccatcattgcgcgcgccgcctggcgggaaacgcccagcgcgcggcccgcgtcgcccgagccgaggccacagccatagcgcaggagcaataggcggcgggtttccggcttttccgccgcgagccatgcgcccacctcgccattgtcgcccggcaattcaaagcagcggaaatccggcggatattcctcgcggtcgcgccgggaaagctggcccagggattgctccaccacggcgtggcggatgctgtcgcggaagggcacatcgtcccccagcgaaagataggccgagcgcatggcggataggagggcgtattcggccagctccgcgttttccgtgatcgcgtgcgccatgcggaacagctcgcggcagtgcggcgtgaggcgcgaaagatacttttgtaaggttacattttcagacatagttcctcgcggcttgttcagccatcgctttgccgcagggcggcgatctcatcgtacagcggcttgagctgggcgtacatccgggcgtaaatggggtaaatctcgcggtacttttccatccaggcctcgttgggctcgtgcgtggagcgcgtacgcgccattttcgccccctgcgcgtagtcctcaaacaggcccacgcccacgcccgcggcgatggccgcgcccaagctggtgcattcgccaggcgcggaatgcacgcgcgtttgcgtgccgaaaaccgaggccagaatgttcggccacaggccgctgcgcgcaccgccgcccgccagcgttatgctgtgttggcggccgtccagctcttgcatgatctggtagcaggaattcagcgcgaaggcgatgccctcgtacacggcgcgggccacgtgccggcggttgtgatagagcgtgaagccgagcaggcagccgcgggtgttctcgtcccaatagggcgtgcgttcgcccatcagcgtgggcaggaacagcacgccttccgcgccgggcgcgacgctgcgcgccagattttccaccacggagatttccgccgccgaaccgctgccgccggaaaagaagttttccagcgcccagttgaaggccgccgcgccgcattgcacggtgccgatcatgtggttgaacttcccgtccatatccgtgacgttgaagatgcgcgcctgcggatcgagcatgggctcttccgtgagctggctcacccatgcgctggaaccgatatagcaataggcgtagcctggctcgtacaggcccgcgccgcgcgcggtgcacgcgccatcgccgccgccgatggccacgggcgtgcccgcgtgcaggcccgtgcgcttggacgcttcgcgcgaaatgcggccgcggatgtcgtgcccggccaggatgcgcggcatgcgcgcgatgggaatgtccagcgcttgcaggagcgattccgcccactgctttttgtggatgtccatgcagcaggtgagcgacgcgtcagaataatcggtgtaaccgaatttcccggtgaggtgcccgtagatatagtccttgacgttcatccaccagcaggtgtttttgtagacttccggcaatttttcgcggaaccagaggattttgggcaaggtgtagtgcgtgttcagccggttgccggtgagggcgtaaaacgcctccggctcgatcacgcggccgatcttctccacttccgcgccagtacgcgaatcggaatggatgatgttcggatgcaaagcgcggccgtccgccgccacggggatgcatccgttcatcgtgccagataggcccaagcaggcgatgcgcacgggagggacctgcatcaacagttcatggatgccgtcgcacgcggcggcgaggatggcgtcgggatcctgctcagcccagccagggcgggggtatgccgtggggtagccgcggcgcacggagcacagcgcgtcgcccgtggcggaaaatacggtgcattttacgcctgtggtgcccgcgtcgcaggtgagaagcaggtcgtgttcagccataatcaaaaaccctcctcgtcggtttgcgcgtcgttgcgcgctttcgtactatgtacaatacagatcacttttttcgccggtttttttccacgccagccgcgccgcccagcagcccggccaaaaatgccgcggcgcaactgccgccggtgggaagcgtgcccacaaaaagggcgtaaaccacgcacagcgcgcccacgggcggtatccaggcgagcaagccatgcacgcccctgcgcacgctggcataggcgcacgccaagcccgccaggggcaccgcgccatagaggcacgcgccctgcgccacggaatagggctgcacccataggggcacaaaaacgcacagcgcgcagcacagcagcatggcgccccattcggccgcccacacgagcggccacggaaaatgccgttccttcttcatgcaaccattatacctgcgaacgcgcaagatttcaagggattttcacgggtaaatccggtttttttgcttgacaggtatgcaaagaaatgataccgttaatgggggcggcgggcgagccgcgcgccagattgatagggctatatccggggaatttaaacggcgaaggaaaggttatttatacttgcgccatacttctgacaaagaaatgcgttacaattgaaaaaaagacgggaggaaagtctatggaagaatatcggggttgccgcgttctggtcgcggatgacgatccgaacgtacaccaatcactcaacgcgtatttcaaacgcgaaggatatttgatgctctccgcctatgacggggaacaggccctgcggcaggagacagaagcccatccggacatcatcattttggatatcatgatgccgaaaaaggacggattgcaggtgtgccgggaggtgcgcaagaattccaacgttcccatcattatgctttcggccaagggcgaagagttcgataagctcatcgggttggaattgggggcggacgattacatcaccaagccgttcagcccgcgcgaagtggtggcgcgggtgaaagccgtgctgcgccgtatgcgtgaaatgcacgatgaaagccgcgcttcgcgcgtggtggtggacaatttggagatcgatatgaacgcgttccaggtgaagctggatgggcagatcatcccctgcacgcccaaggaaatcgaaatcatctggacgctggccaagaatccgggcatggtattcagccgggagcacctgcttaagaccatctggggctatgatttcctgggggatacgcgcgcggtggacagccacatcaagcgcatccgcgccaaattgtgcaagccgagcaaccattgggaaatcagcaccgtttggggaatagggtatcgctttgaaaagttggaagaggattagcgccttgctgggcaggcgctcgatggggatcttcggcaaactgctcacgagctatgtgctattgagcctgtttgtggtagtggtggcgggtgtggtttcctttgcgctcagcgtggactcgatcaccagcgaaacgctcgcggaactttccgaacaggcgcagttcatggcggaatattccgcgcaggtggatcccagcgttgatccgttgttttttgaaaagagccagcgcgacgactttatggtgctggaagcctatggcgatgaattcatcgcccaccggaaaaagaacccgcaaagcgattgggaaatcaccgaaatcatcgatgcgctggataccgaattggtgaagcgtgtgttcgccggcgaaaccgtgctggacacgcgctatttggaattttttggcaaccagatcgcttttgccattgtgcccgtattcgaagcggatggcagcgtggagatggccgtgatggcctatcgcacgatgagcgaaatccacgtggccgcgctgggcatgtcgatgacgttgatcgtgggcgtggcgctggccatgcttttgtccacagtgttcgcctggttcatcagccgccgcttcacgcggccgttggtttccatgaaccagaccgccttgcgcatggccgaagggcattatggcgaccgcgtgaccgtctccgcgcgggacgaaatcggcgtgttgggcggcacgctcaatctgctttcgggccggttggatggcgtgatcgcgaacctgcgtgcggaaaagcgcaagctggagcagattctgctcagcctgggcgaaggcgtgatcgccgtggatacggagggcgaagtgatgcacggcaaccttccggcgctggaagtgctggaagtgaaggattttccggcgctgcgcgaatcggccaaccccaatcaccgcatggtgatggacgcggtgcgcgcctgcatcgaaaccggggagaagcaggtggtcacctgggtgaacgagagcgagcggaacctggaggccacggtgagcgccgtgatggatggcgaacatgtgaccggcgcggtggtgctcttgcgcgatgtatcggaatccgcgcggctggaacagttgcggcgggattatatcgacaacatttcccacgaactgcgcacgccgctcacgggcatccgaggcatggtggagccgttgatcgacggctatatggataccgaagaagaaaagcaggattgctaccgcgtgatttacaaggagaccatccggctggaacacctgatcagcgatatgctggatgtgagccgcctgcaggcgggcgtggcgcggatggaattggaagaaatcggcgtggagggcattttgcaggccgcacggcggcagattttgccccgcgcgcaggaagcgggcattgaagtgcgcgtggaggccggcgcgaatcttaccgccatggccgatgaagagcgcgtgatgcaggtgctgctcattttgctggacaacgccctgagcttcacgcccaccggcggcgccatcacgctctacgccaggagcgaacacgggggcgagaagaccgtgatcggcgtgcgggatacgggcacgggcatcgagagccgggatttgccctatatctgggagcgattttacaaggcggatcgttcgcgcatgcgcatgtctggcacgggactggggctggccatcgccaagctggcggtggaacgcatgggcggcacgatcgacgttgtgacggaagtgggcaaaggatcggacttttttgtgacgctcaaagcgacagatgaggcggaataacgcgcttttgatggcaaaggcattgcgcttttgcatggatatgctataattcccccatgcccgggcgggatacgcccggagggcaagggggattttttgcgctatgctgcaagtcaatcacgtaaccaagaaatatggcaaggtgctggccaacgacaatatatcgttttctgtgaaaaatgggcaattggccgttttgctggggcccaacggcgcgggcaaatcgacgatcatcaaatgcatcgccgggctgttgcgctttcagggcgaaatcctggtggccgggcagcccaacgattcgttggaagccaagcacgcgctgggctatgtgccggaaatgccggccgtgtatgaattgctcacagtgggcgagcacgtggagttcatccggcgcgcgtaccggctgggtgatgaggccaatgcttacgcggacgcgctgctggagcgctttgagatggccgataagcgcgataagttgggcaaggagctttccaagggcatgcagcaaaagctttcggtgatttgcgcgctgctgccccggcccgaagtggtgatcttcgatgagccgctggtcggcctcgacccgcacgccatcaaggagttaaaggaactctttggcgaattgaagcgcggcggcgcttccgtgctcatcagcacgcacatgatcgatagcgtggaagatttttgggatgtggcgcacatcatgatgaacgggcgcttcgccgccacgcgcgaaaaccgcgagggcgtggatgaaaagccgctcgaacagctcttcttcgaaatcaccgagcgcgataagggggagcgggcatgagcgcgttggcgtatttgctctggcgcacgctggccaatgggctgaagcgcgcgctgcggcggccttctttttggatcgtgacggttttggtgttggcgattttgggtgtttcgttctttggcggcggcgaaatgcgcgcggagaacctggccggggagggcctgcgggacgttcgcgaactggtcgccatggcgtttgccctgaacgccgtgatgttcgtgatgctcgccatgcaggggctttcgcgcggcgcttcgatgttctccatggcggatgtgaatttgctctttcccgcgcccgtgccgccggtgcgcattttgctgtacggccttttgcgcgggctgagcacggcgctgatgttgggtttgtttttgctgtttcagtattcctgggtcaatgggcaatatggcgtaggcgcgggcggacttttgttgctcgtgttgtgctatggcgtgagcgtgttcttgggacagatcacggctacggcgctctacgcgttttccagcggcagcgcagcgcgcaagcgcgccatccgcaccatcgcggcctgcgtatgcctgctggcggcgggatacgcgctctatggcgcgtttgcccgcatggatgcgccccttgccgcgctggtggattgcgcgaattcccccgccatgcgttttttcccagtgggcggttggctggcggcggtgatgggcggcgttttcacgggggatttgagcctggcgctgtggggcgcgctgcctgtggttctgctgccggttttgctcatcgccctgctctcgcggatgaagcgctcctattatgaagacgtgctggcggccacggaataccagcagcaggtgcagctcacgcggcagagcggctctatcgaaaccgcgccggaaaaggtgcgcctgggcaagacggggctgagccgcggcgaaggcgcgagcgcgctgtattacaagcacaagctcgaggaccggcgtgcgcgcgcttctctcatcggcgtgccagagctgatctatctggcgatcatcttcgcgtacaccttcttcttgcgcgaggaaggcatcctgccagctttgatctttgccacggtgatgcaggtcaccagcgtgatgctggggcggtgggtgaaggaactcacccggccgtatatctacctcatccccgagccgccgtttcaaaagttgctgcagtgcctgcgcaccagcctgcgcggcatgggcgtagaagccgtgctgtgcatggtgggcgtgggactgattctggggcttcccatcggggaaaccgccgcgctggtgctggtgcgcttttcgttcggcctgctcttcatggcgggcaacctgatgatcgagcgcctgttcggcgggatgaccagcaaggtgctggtgatgttcttctattatctatcgatgatcgtgctggccgtgccgggcacagtggcgtgcgtgctggccgcgatcgtctggtcgcagcttgcgggatttttcctgctggcggcggtcaatgtgtcgctcgctgtgctggtcgcgttcctgtgccgcaatgtattgcgctacgcggaactcaaccagcggtgattgggcgctggcggaaaggaaaataaaaaagcgcgattgcatcccctgggcttgcggtgtataatattgccattggcgcagtacgaaagccgaaagaacaggggattgatttatgtatatagcggatttgcacatccattccaaatattcccgcgctaccagccgggatctcgatttgccccatctggatttatgggcgcggcgcaagggcattgcgctggtggccacgggcgattttacccacccggcttggcgcgaagagatggaaaacgcgctggaacctgcggaagaagggctgtatacgttgaagccagatctgcgtttgccctgcgaggtgcaaggcgaggcgccgcgctttgtgatcagcggggaaatcagctccatttataagaagaatggcaaaacccgcaaagtgcatagcgtgatccttttgccggatcttgcaagcgcgcaggcgctttcgcagcggctggaggccattggcaacatccattcggatggcaggccgattttgggcctcgattgccgcgatttgctggaaatcgcgctggacgcctgtccgagcgccgtgttcatccccgcccacatctggacgccgcacttttctctgctgggcgcgttttccggcttcgatagcctggaagagtgctttggcgatttgtcgggcgaaattcacgcggtggaaaccgggctctcttccgatccgccgatgaactggcgcgtgccggatttggatgggctcacgctcgtctccaattccgatgcgcactcgcccgccaagctgggccgggaagccaatctgctggattgcgcgctttcctatcccgccatggcgcacgccatccaaacgggcgaggggttttgcggcacgctggaattttatccagaagagggaaaataccacctggacgggcaccgcaactgcggcgtttgcctggaacccagcgaggcgcgcaaattgggcgacgtatgccccgtatgtgggcggcggctgaccatcggcgttttgcaccgcgtggaggcgctggctctccggccggaaggcgcgcggccggagggggcgaagccatttgaaagcctcgtgcccttgccggaactgctctccgcctctctgggcgcgggcgcggccagccgccgcgtgcaagaagcgtatttttcgcttctgcgcgcgttgggcgatgagatgtacatcctgcgtgaggcggatcccatggatatcgagcgcgttgcgggctttgccgcggcggaaggcgtgcgccgcctgcgcgcgggccgggtgcgccgcaagggcgggttcgacggggaatacggggaaatttccctgtttgaacccggggaactggccatgctggaaggacagatggccctgcccggcctttctcccgtggatgcggcgcgcgaacagcgcgcgagagaacgggcgaaaaaagagcaaaaagtggcagaagggtctctggacgcgcgggaaacggaagcggcgcaaggggaggcgcacacgccccagggcctgaacgaagcgcagcgccaggccgtggagacagccgcgccgcatgtggcggtgatcgcggggccgggcacgggcaaaaccttcaccctggtggagcgcatcgcttacctcgtggaagttcgcggcgcgaagagcgcggaaatcaccgccgtgactttcacgcgccaggcggcggaagaaatgcgcgcgcgcctggaagcgcggttgggcggcaaaaaggccgtgcgcggcatgaacattggcaccttccacgccatttgcctggcgttgctggaaaaaaagcccttgttgggcgagagcgaggcgcgcgatgtggcgcgcggcgtgctggaagcgggcgggtctaaggggctttcgccccgcgcgctcgtggagcgggtttcccaggtgaaaaatggcgcgagcctggaaagcgcgggcctgccggaagatttgtatcgcgcttaccaggcgcgcctgaccgagttgggcgcgcgggatctggacgatgtgctgttggaagcgctggaaatggatctcgcgggcaagcgcgcgttcacgcatgtgctggtggacgaattccaggatatcaacgccgtgcagcgcaggctggtgcgccatttcgcggcggcgggcaagacgctgttcgccattggcgacccagatcaatcgatttatggctttcgcggcgcggacgcgggctgcttcgccgcgttggcgcgcgattggccggatttgcaggtgatccgcctgcgggaaaactaccgttccacgccgcagattttggcggcggcgctccagtccatttccgccaaccctggcgggcaacgcgaacttcgcgccgcgcgcccggatggagaggcggtgcgcgcgttgctcgcgccggacgcgttctccgagggcgtgttcatcgccaaggaaattggccgcatgacgggcggcatggacatgctcgccgcgcatggcggcggcgtgcgcgaaaccgcgcgcgcgttttcggaaatcgcggttttgtgccgcacacgccgccaattggaaaccattgaagcttgcctgcggcacgacgatatcccctgcgtgatcgccgggcgcggcgatttcttgcaggacgacgctgtgcgcgcggcgcaagcgtttttcgccagcctgctggaaaaggacgcggcggcgttctcgctcgcgctgcggctggggtatgactgtcccgcggaggaggcggaggccgccgcgcgggcatacgcggaggcgccttcgccgctcgcctttgcccaggacgcgggcgatctgggcacgacggcgctgtgggcgcgcgacgcgcgggatttcgcgccccgcgcggaaaaagaaaagccgcgcaagctgctggaaggctggtgcgcggcgcatggaaaaaatcccgccctggaaaagctgcttgccgcggcggcgtttgcccaggatatgccctcgttcctcaatttgctggccaccggcgaagaagcggatatccgccgcgctgcgggcaagggctacgcctccggcgccgtgcggctgatgacgctgcacggcgcgaagggcttggagttcccggtggtgttcctggcgggggtcagcgagggcgcgctgccgctggagcgggaggacgagccctgcgatgtggaggaggagcgcaggctcttcttcgtgggccttacgcgcgcccgggaggaattgatcctcaccgcggcgggcgcgtattccccctttgtacaagaattgcccggcgatgtgcgccgggcaagcataccggcgcgcttgcgcgcgccggcggcggaacaactcagtttgttcgatgaattgtgatttacaggccgaaatagcgcttggcgttgtagtagcagatatccttcaccatggcttccagcgcttccatatcggcgggatattcgccgttttccacccattcgccaatgaggttgcacaggatgcggcggaaatactcgtggcgcggatagctcacaaaggagcgggaatccgtgagcatgcccacgaactgcgagagcaggcccagattggccagcgcggtcatctgctccaccatgccggggagcgtgtcgcagaaccaccagccgctgccgaactggattttgccgcggatgccgtcgccctggaagttgccggtcatggtgccaatcacggaattggccgtgccattgaggcaatagagcacggttttgggcagggaagcgttcgcgtcctgcgcgtccaggatgcggctcaggtcgcgggcgaagggcgcgtcggaaacggaatcgaagccgatgtccgggccgaagcgctcgaacatgcgcttgttgttgttgcgcagcgcgccgatgtggtactgctgcgcccagcccatcttgtgatacatctcgcccaggcccaccagcacgagcgtgcggtaagcatccaggtcttcggggcgcaccgcgtggcccagcagtcctgcggcgagcgcacgatcggctttggcgcggtcgaaacaggcgtggggcacgctatccagcccgtgatcgctgatgcgcgcgccgcaggcgtggaagtattccacgcgcttgcctagcgcttcgatcacgtcgctggtggtgcggatttccacaccggaaacctcgctgagcttttgcatgtattccttaaagcccgcgcggtcggcattgatggccttgtccggccggaaggcgggcagtacgcgggtggcaaacgcgccatcctgcgcgatggctttgtggtattccagagaatcgatgggatcgtccgtcgtgcagacgacttccacattgaaacggcgaatcagccccttggcgcggtattcatccgtggccagcagcgcgttcgcgcgttcccagatggaaggggcgctcgcctcgttcagtacgtcctcaatgccgaacacgcggcgcagctccaagtgcgtccagtgatagagcggattgccgatggcggcgggcaacatgcgggcgtaggcgaggaacttgtcgtaatcgctcgcgtccccacagatgtatttttcgtcgatgccaaaggcgcgcatctgccgccacttgtagtggtcgccgccgagcatcaggtggccaatgttgcggaactggatgttttccgcgatttcctggggatttagatggcagtgatagtcgatgatgggcatggtttccgccgccgcgtacaggcgccgggccgtttcgtttttcaagagaaaatccttgtccatgaacgttttcataaggatacacctccggaaaaaaatcctgtgtttatactactccggaaccaggcgcttgtcaagaaaaatctaccggcggcggggttgcgccgtttacttttccggataaaaatgctataatgaaaccatcgcatggcgcactgcgcaattttggagcgctggatgggggatagaatgttccatttttatgcttatatgtcgcgcatgaagttgatccggcgctggggcctacggcgcaacacctgcgaggaaaacgacgcggagcattccctgcaggtggccatgatcgcgcattgcctggccaccatccgcaatgtgcgctatggcggccaggtggatgtggggcgcgtggtgctcctgagcgtgtatcacgaggcggccgaagtggtgacgggcgatctggccgcgcccatcaaatatttcaaccccggcatcaagacggcgtttaagcaaattgaacgcctggccagcgaacagttgctgggctatctgcccgaggatctcaagccctcgtacgcgccgctgctattccccgaggaagatagtccggaatgggcgctggtgaaggcggcggacaagatcagcgcctatgtgaagtgcgaggaagaggcggggtatggcaacgccgaattcgaaagcgcgcgcagcgtgattcgccggcagatcgccagcatggaactgccggaggcggaggattttatgcgggaattcgcccccagcttctctttgccgctggatgcgctgaattagaatggcttgtcaaaggagcttcatggaggagtggaacgcatgctggaactgagaaaacaggtttatgaggccaatatggaattgtaccgcaaccacctggcgccgctcacgtggggcaatgtttcgcaggtggatcgctcgctgggcgttatggccatcaaacccagcggcgttccttatgagcgcctgtcggcggaggacatcactgtcgtttcgctggaaacgggcgagcgggttgccgggcatttgaacccttcttccgatacgcccacgcaccttgcgctgtaccgcgcgtttcctggcattggcggcatcacgcacacgcattcgccctatgccaccgcgtgggcgcaggcgggcaggccgctgcgctgcctgggcaccacgcacgcggattgcttttatggcgaggtgcctgtcacgcgctatgtcagccgggaagaggccgctcgggcatacgaggcggaaactggcacggtgattgtggaggccttcgcggggcgcgatcccgtgcacacgccaggcgtgctcgtgcgcgggcacggcccgttcacctggggcgattcggccctgaaaagcgtatataacgcgatcactttggaagaggttgcgcggatgaacttgctaactttgctgctggacggcaatgttccagatttgccggaggctttgcaaagcaagcatttcgagcgcaaacatggcccgaatgcctattatggccaagggaacaatggataatatgggcattgcatccaatcatttcacattccgggtttataattgtggcgggtatagaaatgcaacaaaacataaacaatgaattttgtgaaatgtggctctggcattttgggcgctgagcctgtataataagaagcaggaaaaatggcaacgcgatttgcattttttacgaatcagggggaggttatttcatggcaagtttgacgctgaaaaacatctacaaggtttatgcgggtggcgtaacggctgtcagcgatttcaatctggacattgaggacaaagagtttatcgtactggttggtccgtctggctgtggtaaatccaccacgctgcgcatggttgcaggccttgaggaaatcaccgatggtgaactctatatcggcgataagctggtgaatgacgtcgccccgaaagatcgcgatatcgcaatggtgttccagaactacgctctgtacccgcacatgacggtgtacgacaacatggcgttcggcctgaagctgcgcaagacgcccaagcaggaaatcgaccgccgcgtgaaggaagccgccaagatcctggacatcgagcacctgctcacccgtaagccgaaggcgctttccggtggtcagcgccagcgcgtcgcgctgggccgcgccatcgtccgcgagccgaaggtcttcctgatggacgaaccgctctccaacttggacgcgaaactgcgcgtgcagatgcgtacggaaatcaccaagctgcatcagcgcctgcagaccaccttcatctacgttacgcacgaccagaccgaggccatgacgatgggttcccgtatcgtcgttatgaaggatggtttcatccagcaggtcgatactccgcagaacctgtacgactatcccaccaacctgttcgtcgcgggcttcattggcacgccgcagatgaacttcttcactgtcacgctcgaaaagcgcggcaccgatgtgtatgcggtgttcggcgagaacgccatcaagattccgaagggcaagctgcagaagttcgtgtccgattcctacatcggcaaggaagtctacatgggcgtccgtccggaaaacatccacgatgaagagggcttcatcaacgcctcccccgatagcaagatcaaggtttccgtggaaatcgttgagctgatgggttctgagacgtacctctacctcaagacttccggcaaggaaggcaacatcatcgcccgcgttgacccgcgctccactgcccgctccggcaacaccatcgaggttgcgttcgatgtgaatcgtctgcacttcttcgataaggacaccgaagccaccatcctcgagcgctaagcgaaaatgcgtgaagcggcccgaaggcatccgccttcgggccgtttgcttgtcttcgttaccgctcctcaattcagcatggtcgtcccactgcgctcgcaagctcgcttgcggcactccctgcttcattgggcttactacggcctgtttcgcgcactgcgcgcggccttcgtgcgcccctgcgcttcgctggcccggtattccggggctgcggagcgcttcgcgctgtcctcgcccctccaccccttcggggcttcgacggctgcggcctgtttcgcccacagggcgcgcgcttcgtgcgccccctttgtgaaaaaggagccttttgattagtggcactaccgtatgaagtagcacctacctcagagcctccctttggaatcaaagggaggtggcacggcgcagccgtgacggagggattgacacagggacgcacgaaggctgcgcacagcgcgcttatcaggtgcgcttgctgtttttgcccatagagaagggctccctctcttgatttttccaatcattttgaggaagccccttttatgctgcgtttgttttccggattcgccttacacgatggtgatgccttccacgaaccaatcgatggcgaggatttcttccggcgtgagggtctggccttcttccacgcgcagagtgccttcattgtcgtagatcgggcctacgaacacgccaaaggaaccgtccagaatggaggcacgggccgcttccacggcttccgcagtgccttcagccacgttcttggtcagcggggaaatgtcgaccatgccttcagacatgcccatgagcacgttttcgctggtccaggtgccatcgatgaccttctgcacggcatccgtcaggtaagcgccccagtcccagatgggcgcggtgaggtgcgcgttggggccagcttcggtcatatcagcattgtaaccgcaggcccacacgccgcgttcttcggcggcggcaacggggttggtggtatcctgatgctgggcaagcacatccacgccgcgatcgagcagggcgatagcagcctggcgctcgatggtgggatcataccaggtattggtgaaggtcacatccatggtcacgtccgggttcacagagcgcgcgccgaggaaataggcattcatggaatagatgcactcaggcgtctgcatggcggccacatagcccaggtgattgttttccgtgcgcaggccagcggcgataccggtcaggtagcgagcctcgtagatgcggccaaaatagttgttgaagttggtgtcgttggacatgtaaccagagcagtgggagaagatcacgtcgggatactgttcggccaggtcagccatgtactccatgtaaccgaagctgatgccgaagatgatgtcgcaaccctgttcaaccaattccatcagcgcgatttcacagtcgctgttttcaggcacgttgcgcttgatgataatctgatcatccgacaggccgagcgcttcctgcatggccagggtgccattgtgatgggccatggtgtagccaccgtcgctgatgtcgccaatgtagacaaagccgaccttaatctcctctttcggcaccggttcgaacgccaaggcgctcgcgctcatggacagcaccatcgccagggccaacgcgcaaaccaaaagcttcttcattcgagtacatcctcctcttttttctagcgtacaatttgaaatccaagcatttcaaattgtatgtcttattatacgcctgtattgccaagcctgcaagggcaatccgtgtaaggattttgcgtattcgccataaatgaaaagccgggccatggcaggtataggaaagaaatttttgcttaccccactcataaacgtatattttggggcatatatacgggcgtgagggattctggtatgaaaaagatggtgcaatgctggctgcggctggcgatttgggggctatggatggccctgtgcgtgcgtgcgcgggtggcggatggttttgcaccgttcgccagcgcggcatacgctgttttgcggctgagcggcattcatccgctcgtcttgctgggtgggagcgcgttggggtgcgcggcaagcggattgggatggatggggtatcaggcgctcgttgggtgcgctgtggtggaattgttgtaccggttttcccttttgcagcgcctggacaggccggttttggcgggcgtactggcgtttttgggcacgggtttgccgggcgtgttgttttcctatggcattgcgtacaatcttctgggttcggggctgagtgcaatggtgagtatggccgttgcgccggtgctattgcccctttgtgggcgaatgcaagaaaagcgaattttctcccgggaagaacagtttgccgtggcgctcgcggcggtgattgtggccatagggctgcgtgatacgccgctacagggcgcgtatatgacgctgtgtgtgttggcagcctccgcgactggggcgggcgcgggggcattgagcggtgtgttgatgggcgcggccctggcattttccggcggacagccggaagcggcggcggtgatgggcatgtcaggcgcgctgtgcggcgtgctcgtggacgcgccccaatgggtgcgcgcgttggcgtttctcgctgtgtgtcaaacggcgtatctcggcccgtttggctattccctgcccgcagcgccgtttccgcaagctttgtgcggcgcgctcgcctcgttggcgctgccttgcgggcgcataagggaattgttggcggcgggagaggcgcggcgagaagtgtgcgcgatagcgcgggcggaaaagcaactgcgggacgcggcggcggtgctgggcgaaatggcccaggcgcagcgggtggaaagcgaagaaggcggcgttcaggcagtgcggcagacttttcgcgcgctgcaaggcgcgttgcagggcgtagccaatggcctgcacggcggccagatattttggacgcgcaaacctgtgcggctgaacgccaccgtgggggttagcgtgcgggccaaggaagcggtatgcggcgatagttatgccgtggttcccctgtccgacgaccggatgatggccgtaatttgcgatggcatgggtacaggtgaagccgcgcgcgcgcagagcgagcgggctgtgcggctgatcacgcggtggatgcaagcgggcgcggacgcgccgtccgccattggcgcggcgaacgccttcttcttgtggcaaggcagcgaaactttttccacgctggatttggcggtgatcgatctgcgcgcttcgcgtgcggaactctataagttggccgcgccgccttctttgcatttgcacgcggacgcggtgacggaaatcgcgggggcggatttgcccattggcgtgctcgaaggggcacggcccacgccggtgtccgtagcgctacggcgcggcgatacgctgtttatggccagcgatggcgtaatggatcgatatacggcgcaggagttgtccgccgtgttgcggacgcaagtgaacgcgcgcaaagcctgcgaggcggtggtgcgggcgcaaaggacgcccaaagacgatatgacggccattgttgtaaagcttacgtaatggcggcccatttctgcattgcacattgcgaataagcatgctataatggtatatatctatgactggcaacggctccgcggcaggagccgcccaatatagccaattgcgtaagcgggcgcgctgtgcgagcggcaacgatggataaagaggtgaagaaaatgaactgggtgcaaaatctgctgggttcggccagtgtggcggatatcctggtatacgcggcgatcattgcgatttttgtgctgggcatcgccaaatgcgtgatgccggtgctcaacacgcgtagacttttgctgcgcgccatccgcaacatcaaggcgggggacaacgccaagatttcctggcaggacgacaaatttttgggcaaaggctcgctctttcctcattggagcgaatatttgaacaacttgttttttgccgatggcgcttaccacaatgccagcgcgattgaggactatatcaatgaagaaaccgtgattgaagagcccgggcgctccgttctggcggatgcgattcccggcatcctggtttcgctgggttttttgggcacattgatcggcctttctacgggcttggccaatttcagcatggaagattcttcggccgtgcagatctccatcgagacgctgatccccagcatgcgctacgcgtttatgacgtcgatctttggcgtgattggctccattcttttcaccatggtcgtgcgcatgaccaatggctttaccaaccacgcgctcacggaattttattccgccatgaaaggccgcgcgggcgtgctctccgtagatccgatgacgcaggtcgccatttaccagcaggagcaaacggcgctgatccaaaagctggaacgcgagctgggcgcttccatcgaggcgggcgtccggcctttgcaaaagagcctgaacgaattcatgagcatttccacaaacgagcagatgcgctttttgaacgccgtggtggagcgctttgtggatcaaatggatcagacgctcaaggggcagttgcgcaatttcgccgttacgctggatgaaacctgccgccaccacgaggaagtgcaggaaagctacaaggcgaacctcgctcagctcgagcgcatggcgcgcgaaatcgcccagtatgaaaagctgaatgatcagatggtttccaagctcgacggctatttgaaccggatgagcgcggcgcaggtcaaattggaagaaagctatcgccgcgtaggcagcagcgtggagcagatggagggcgtggcgcaaaagcaaaacaattatttgcaaaccgtcacggccgcgcaatccgaaatttccaaggcggctacgcttttccagcaggcgagcgagaagtatatggcgctgttcagcgagaacttccagaagtccacgcaggcgattctcaaggcttcttcgaacatggataccagcgccaaagcgatggatgcgggcgcgaaatccctggaaaatgcgcataaagcgctggtggggcagatcaacaaggatctgcgcgaaacgctggagattttcgaccagaacatgcagcacatcgtcaagcaattgggcgtcgcggtgaacgaaatcacggcgtctgttgagaatctgccgcgcgcggtgggaggaacggcgcgcgtgtttgagcagcagctcaatgagatgatcgccaccttgcagcgcgcgcaggcggcgctggacgatgccgttgcccgcatgcgctgaagcgggaggtgacggacgatgcgcaaatcaatgcgcggaaagcgcaggggcggcgaagataagagcttctggctgtgcttttccgatttgatgagcaccttggtgttggtgttggtgctgatcatgttttatagcctttatttgcattttgacacgatggaagaagccacggcgcggctgctgcagaccgagcaatccttggcggaccgggaagcggaaatcgccgcgcaggatgaggaactgcgcatcagcaacatgcaattgatcgagcgcgaggccgcgctgaacgaagcgttggcggagctggaacaggcgcaattggaattgcaggcctcgcagctgagcgcgcaggagcgcgaagaattgctcgccgccttgcagacgcaattggaagggcagcaggcgcagctggaggatcagcaggcgcaactggaagatctgatcggcgtgcgttcccgcatcatcgtggagttggccagcgcgctgaacgaagcgaatgtgcaggtggatacggatcagaacacgggcgctatccgcctttccagcgaggtgctcttcaacgtgggccaggccgtgctcaagccagagggcgaacgctttttgcagcgcttcatccccgtgtatatggatgtgctgctctctgaggaatacgcggattcggtgagcgagatcatcatcgaggggcacacggattccacgggcacgtacatcgaaaacatggagctttcgcaaaaccgcgcgcgcgccgtgctgcaatacattctcagcagcgatttcacccagctttcttacagtgaaaagcaggcgctgcgcgaggtggtgacggtgaacggccgctcttccagcgatccggtgctggatgaaaatggcctggaaaatatggacgcttcgcgccgcgtggaattcaaattccgcctgcacgatgaaaccatgatccagcagatgcaggaattgctcgatagcttttctatagaagagacacagacggatacccagcaagagagcgcgcagagcgcgcaataaaccaacagggcgggggcagcctcggcgcggccggggcggccccgccttataaaacggagggaaatcctgtgcaaattgttcggccaaggctggaagcgttgcgcgaacccatgggcgtggacgagccgcgcccgcggttcagctggcaactgcgttcgcaggaacggtcagcggcgcaatccgcctatcggattgaagtgcacgcgggtgacacgttggtgtgggacagtggaaaggtcgtttcgcgccagaattcacaggtggaatacgcgggggcgccgctcaagccgcgcacgcactattggtggcgggttcgcgtgtgggatgagcgcggcctggatgcgggcgctagccgcatcgcgcattttgaaacggggctgatgggcaaatggcgcgcgcgctggattgcacaccccaagcaatatgagccgggcaagccgctgggcgtggtgcggttttcgcgcgcgtttgaagtgaaggaaccggtggaaagcgcgcggctttacgtgagcgcgttgggcgtgtacgcggtttctctcaatggcgcgcgcgcgcatgacgcgcgcttgtgccccgggcccaccagcacaaagcggcgcgtgcattatcaggcttttgacgttacgaagtttttgcgcgaggggaacaacgagatttgcgcggatgtggcgggcggatggtacacaggcgcttatgcgcatgcgctgtgcgcggaaaagtgcggcccccggcaagcgttgatcgcgcagttgtatattcgctatacttccggcgaggaagacgccattctcaccgactcgcactggcaggcggacgccagcggcccttatcgcatggccgacctggctatgggcgtgtggtacgattccaccattgcgcccaaaaatccggtgaacgcctatttgccgagcattcccaaaacgcttttgacctggcctgcggtgcaacccattgtttttcgggaaacgctgagcgcccagaacctgtggaccgcgcccaatggggataagctggtcgatttcgggcagaacgtcgccggcgtggtgcgttttaccgtgcggggcgagcgcgggcgcgaagtggcttacgattgcgcggaagtgctcgacgcgcagggcaatttttatcgcgaaaattatcgctcggcgcgcgcggaagtgcgctatgtgctctcgggcggcggggcggaaacgttcacgccggatttcacgtatatggggtttcgctatatccggctgaaaaactggccggaaggcgccaagtgcgaggactttaccgctctcgtcctgcgcacggatttggaggaaaatgcgggctttgaatgctcggatgagcgcgtgaaccaactgtatcacaacgcgttgtggacgttgcgttccaacctagtgggcgtgctcacggacgcgcccgagcgcgatgagcgcttcggctggacgagcaattatctggccctgtccaacacgctatgcctgcaaatgaacgcggcggctatgctgtccgattggctgtgcgatctggccattgagcagcgggaaaatggcgccattccctgcgcgattcccaattgcttgagcgacgacctttccggctcagcgctcagcgacgatgcggtggtcacggtgccgtgggcgctgtataaagcctatggcaatgtgcgcatgctggaaaagcactatccctgtatcaaaaaatggatcgaatttatttcctcccgcgtacgcgatgggttgtggcctgtcgactatcaatatggcgactggctggcgctggacgcgcgcgccaatagttgcatcggcgtcaccgatgtttccctcatcgcttccgccgcgtacgcgcgggcggcggatctggccgcgcgcatcgccgatgtactcgaccgggattatgacgcgcgcaattttcgcgcgttgcacaagaaaatcaagcgcgcgtatcagcgggaattcatcaccgccacgggccgcttggccgtgaacacgcagaccgcgcacattttaacgctgcgctttgatctgtgcgaggaggagcatcgcgatcgcattgccaacgatttgttccggctgattgaagaaaacaacgattgccttaccacgggcagcgcgggcacgccatccgttttgtccttgctcaccagcctgggccggcacgatctggcggcgcgcgtgctgtttcgggacgatatgccctcctggctatacgccgtgcgccacggcgcgaccaccatctgggaacgctgggacggcattcagcccgacggcgcgtttgccaatccggaattcaattcgttcaaccatccgctgggcagttgcatcgccgcgtggctggtttcgtgcgtggcgggcatcggcttttatcgcagccccatgtatgcggatatccttttgcatccccgctttaccgaggggatgagctttgcctccggctggcacagaacgccctacggcgtgattcgctgtggctggcggctttcgggcgtggaagcgcaggtggaagtgtccgtgcccgtgagctgcgaagcgctggtgattttggaaaacgcgtggctgggcaatgtgcgcgaaaaggacggcgattttctccattcacccggcgtgaagcgggcctggcagtcggataacgatgtgtttgtgcgcgtggacgcgggcaattacgaattcacttggcgatttgaactgtaaagcggaaggaatgagaaccggtatgcagacgattgcgcgcgtgcgcacggatttttccagcaaatttggcgtgccccggcagagcggcacggaagggttgcgcggcgaggtggtgtttgagccgccttttcgcaatccggacgcggtgcgcggcttggaaggattttcgcacatttggctcctttggcaattttccctcgcgcagcgcgcaggctggtcggctacggtgcgcccgccgcggctgggcggcaatgtgcgcgtaggcgtgttcgcgtctcgcgcgccttaccggcccaatcccatcggtctttcgtccgtgcgcttggaaggcattgaaatgcgcggcgagcaagggccggtgttattggtttccggtgtggatatggtggacggtacgccggtttacgacattaagccctatttgcgcgcggacgcgcatccggatgcgcgcgaagggttttccgggcccgtgcgcgcccatgcgctgcgggtggagtttccgccggaactgctcgcgcgcattccggaagcattgcgcgccggcctcttggaagcgttgcgccaggatccccggccttcctatcaggaagatccttcgcgcctgtacggtgtaccgttcgcggggcaggacgtgcgctttaccgtggaaggggatgtgctcaccgtgcgcgaaattggcgcggtgcccgggccgcaaatacaggaagggtgaaattgctatggacaaatgggatgaacggtttatgcagaccgcgcggctggtggctacgtgggccagttgttaccaggccgaccgcaaaattggcgcggtgatcgtgaaaaacaagcgcattatgactacgggatacaatggcgcgcccgcgggagtgaaaacctgccaggaacggggcgaatgcatgcgccgcatttggcacattcaatcgggcacgcgtcaggagttttgctatgccatccatgcggagcaaaacgccatcattcaggccgcgcggctgggcgtttccatcgatggcggcacgctgtattgcacgcaccaaccctgcgccgtgtgcgccaagatgatcgtgaacgcgggtatcgtgcgcgtggtgtatgagcatggatacccggacgagttcgccgtgcagatgatgaaagagggcggtgtggagctttgccggtttggggagatgacatagcgctcgcccgcgcgattgcgcaaaaggcgcagagcctgggcgggcgcgcgtattttgtgggcggctatgtgcgcgacgtggcgttgggcgtgcagagcaaggacgtggatttggaagtgtatggcctggcgcctgaagccttgttcgcgctgatgggcgagttcggggaagcgtatgaaaagggcgcggccttccgcgtttttgggctgaaacattcggagattgacgtggctatgccgcggcgggaaagccgcaccggcgcaggacatcgggattttgccgtggcagtggatccgtttttgccgccgcaggtggcggccagccggcgcgatttcaccattaacgccatgatgatggacgtgctcagcggcgagatcctggatttttttggcggacggcgcgatttgcaaaaccacatcatccggcacgtgagcgacgcgagctttgccgacgacgcgctgcgcgcctaccgcgccgcgcaattcgccgcgcggctggaagcgactgtcgcgtcggaaaccgtggcgctcatccggcagatggatgtaagcgctctttcgcgcgagcgcgtgttcgatgaaatgaaaaaagcgcttttgcgcgcggcgcggccgggcgattattttttctggttgcgcgcgtttggcctgttgcccgggccactgctcgccctggagcgcacgccgcaggatccgcgctttcatccagagggcgacgtcctcgcgcacaccttgcaggtgctcggccgcgccgccgcgctgcgcgatcgcgccgcctttccgctctatttcatgcttgccgcgctttgccatgatatgggcaagcctgccgtcaccgcggtgcgggacgggcgcatcgtcgcttaccggcacgaagaagagggcgcacccatcgcgcgcgcgtttctggaaacgctcacggacgaaagcgcgctgctgcgctatgtggaaaatatggtgctattgcatatgcgtcccaaccggctcgcgcaggatcgctcgcgcccaaaatccacgcggcgcatgttcgatgcggccgtttgcccggaagacttgattttgctctccatggcggatgcgggcaacgcggaacatgagccgtttctgcgcgagcggctggaggattatcgggctatactgcgcctgcccatggtcacggggcgcgatttgctcgcggcgggcattcctgcagggccgcacatgtccgcgctcctggcccgcgcgcgcacgttgcattttgccggcatgcgccaggaactcgttttgcaaaccctgctacaggaataccggcagcgcgcccgctaagaaagcaagggactgtgaaaaaacttttgtcgttctttcacagcctcagagcattgataaagttgatattttatttgaaattgcaagattgtattttcaaatggcataatcttgcgatttttgcgtttctaatccctccgtcacggctgc

SEQ ID NO: 1328 - DNA, 32759 bp, Unknown
  16S sequences of unknown bacteria
aataaggggtgacaacggagcggaacccaaatgttagctggacttcctaaaacccatgtttgcaaaccggtaattttgattagctgtcagctaacaaaaatcggattgcgttagctggaaattgatcattttgaatggaattttgtgtcacgaacgtgatttgaaaataacaaaagcgttcgttgtcagctaatccagctaacattttcgaacgctttgaagcccgtcgccaagaggatttgaacctccgacccctcgcttaggaggcgagtgctctatccagctgagctatgacgacacatgccgcaaacccttgattttactgggtttctgggatttttcccttcggccatatataagattatcaactctatttcgagttgtcaatctacagattttttcgatttggtaacattagaacgttccccaatttggggaatgctttgttgtcaccattagcatttttcagaatagattcgaactgaaagttgtttttcattttttccctttggggaatgcctcggctttctcttaggaggcacttgttctatccattaaactaagggaacaaaacaggtctgctctgcgcgtttatccgcctcagaacagacctatcatactatatttttcgggaaattacaagtcaaaattcagttgaccctgcagccagatgttgcccttgaagcgacggccgatttccggtacaccaaggagatcttttgcattgacacagatatcaaaatacatgtcattgcattccagtgtcatctggtagacatattcatccgtaaccgtattttgcactttctgacagtattcaatgtttccaagaatctgatactgatcacattccattccataaggcatgaaaaatgtatctacaattgaaaatacgtcttctttgtaaacccggcgtgacaccatcgaatacagatccatatcctcaatggtcaggctctcaatcgcatccggatcaccgtttttcgccgcactcatcagctggctgcggtgcgcaacagatttcttttcaaaatccatattttccgcagacgctttttttgccaccgggaacaaaatttttccgccagatgacaaaccggtgaatgtcgtcgtgaccggaatccctttcaactgattcaggatctgttcctggcgatacctggccgcattctgcagataaaagatcaacgatacgccgacacgcccatcgtcacagattcctgcaaatgaatcaccgtttacacgcctttccacgctgacttcttctgaagtcgtaacacttctccctttataataaggaaaataatactgtcggtgaaacccgtcaccgtcaacatctccgcagagcttgattcccatatctggtgcaaactctttctccatctcgataaatgcagtgtcatcttctcttacagcttcccgatggtcaaactttttatatacatcctcaagcagcttttctacttcagattcttttgtaatgtttgcaaaaccgattgctcttaaataagaatgcatcttatctcccctttaaagccggtcttatctgattacttcctgtccgcccatatacggtcttaaagcttccggaatccgaacgcttccatcctcattgaggttattttcaaggaatgcaatcagcattctcggcggtgcaactactgtattattcagtgtatgcgcaagatatttctttccatcctcacctttcacacggatcttcagacgtcttgcctgcgcatctcctaagttagagcagcttcctacttcaaaatacttcttctgtctcggtgaccatgcctctacatccagagatttcactttcaggtctgccaggtcaccagagcagcactccagtgtacgtaccggaatatccagtgtacggaagaaatctacggtattctgccacaacttgtcaaaccacatcatgctgtcttccggtttgcagacaacaatcatttcctgcttttcaaactgatgaatgcggtatacacctctctcctcgatgccgtgcgcacctttttccttacggaagcacggagaatagctggtcagtgtcttcggaagctcttcctccgggatcagtgtgtcaataaacttaccgatcatagaatgctcacttgtaccgatcagatacagatcctcgccttcaatcttgtacatcatagcatccatctcagcaaagctcataacaccggttactacattgctgcggatcatgtacggcggaatgcagtacgtaaatcctctgccaatcatgaaatcacgcgcataggaaagcactgcagaatgaagtcttgcaatattgcccatcagataatagaaaccatttccggctactcttccggctgcatccatgtcgatgccatgaagcttctccatgatctctgtatgatacggaatctcaaaatccggaactaccggttcaccgtaacgcttgatctctacgttctcgctgtcatcctttccgattggaacagacggatcgatgatgtttggaataaccatcattctcttgcggatctcttcctctacctctttctcacgggcatccagctcagccatgcgctcagagttctgtgttacttccttcttcacagcctcagcctcttcttttttgccctgtgccatcagcacaccaatctgcttggaaatcttatttcggttcgcccgaagtgcctctacctcttttttgatatctctgttttcctgatcatatttcagaacctcatccaccagtacaagcttctcatcctgaaatttattccggatattctgctttacgatttccgggttttctctcacaaatttaatgtctaacatctcttttgcctccagactaattttttcttccctcagtttcaaaaactttctttatcatataccatttcatcattcaagtaaaggatttcatcccatgtcgctgaaataattcaccgcctggcgcagtgcttctttttcttcctgtccaagtacgatataagattctcccttcacgatttccttcacgtaggtatagcagccttcccttccatgaatcgcatttaatacaaagccagaattactttcatccagcattgccagtgcaaagctcagtctgcctcccacatccggaaatgcatcgtatttgacaatcccgatcttatttgctgtgcggctctggatttccttaatccttcggatctcgtccgtattgatctttgtcagttctgacagcttgtctacttcctgaaaacgctgtgcgaaagctttttcaagtgataccgcgtcttttccacgcataaaaatacgatagcgtttcataaaacgtgtcatcttcatggatacccgtaccatatataacagcacgaatatcataattcccatcatcgcaataacgataatgcccggatcaattccgagtgaatttaaaatattgctttccatttttgatcccctttttggtcttagctcatcctgttctcctcaaactccctcgccggtcatcgaacggcttccttttcttgtcaaagcagatatccgcagtctgccggcaagttctccactgtttattcctccgcgcacccccgcagaggactttcctgattcggttaaatgtttcacgtgaaacattttcactgcgcagtgctctcttctctcgggatcgactgaaacaattccatcaaacgctccagttcatcatccgaatagtaatcgatcacaatctttcctttatgatttgccttgtggttgattgataccttggtgccaaacaataccttcatcttttcttccagattttcataaataaatgcattttctggctgtggcttttcttttctattttctgtattctgcattgtcttcatcagtttttccacatcgcgtacactcagtttctgatcaaacacctgcatcgcaattttatattgctgttccttgtcttcgatggacaacagtgctctcgcatgtcctgtcgtgatcatttcatcgatcaccatctgctgtactctcggatcaagtttcagcaaccgaacagaattcgttactgctgtacggctcttagaaacacgttctgccacttcgtcctgtttcagtttaaactctgtcagaagccgcttataagccagcgcttcttcgataggatttaaatcctcccgctgaatattttcaatcagagaaatttcaacgatctgctgatctgtaaagtccttgatcacgacgggcacttctttcagtccggccatctttgcagcacgccatctgcgttcccctgcaataatttcataatagccgtctcttttctgtaccagaagtggttgcagcacgccatactgtttgatcgactcagacagttccagcagcgcatcttcatcaaattttttacgtggctgttcacggtttggctcgacctcactgatgcgcagttttatctcttctttttttactactgttttcacaaccgtttccggttttgccggcaccgtttttttctccacactctgttttggaatcaaagaatccaggccttttcccaaacccgatttttttatcgtcattcttcttcacctctgtgtattacttcctctgccagcagacgataaccttccgcacctgtcgatcttggatcatatttcgtaattggcattccatagcttggtgcctcggccagtcttacatttcttggaatgatggtcttataaatgcgctggttcaaattattctttacgttttcaaccacctgtaaagacaaatttgtccgcgcatcgtacatcgtaaacacaaccccctcaatctcaagttcaggattcaggcgatcttttacgagatcaatcgtatgcatcagctggcttaatccctccagagcataatactcacactggattggaacaagcacagtatcaccggcacacatagaattgattgtcaacgtatttaatgatggcgggcaatcaataatcacaaaatcataatctccttttatttcatccaatgcgtttttcagaagatattcctttccttctactccaaccagttcaatctccgctccggcaagatttacattggatggaagaattgaaagattttcaaaaatttccggttgcagacactcctggattgttttctctccaagaagcaattcatataccgtgttttctacttcatctttctctacgccaagaccacttgtagtatttccctgtgggtccatatcaattacaagcacctttttgccaagactcgcaagagaagcagacagattaatcgatgtcgtagtctttccgacaccacccttttggtttgcaacgacaatagttcttcccatttatccgtgtaactcccttcattcgtgtaaagtggatattcccaatccgctttcgctgcttgcaatgtttcacgtgaaacattttacgctatgtcatcaacggattcttgtccgttttgctgcttttcttatattaccattttcatttgtttccgtcaaagatttccggcttattttataagaaaaaacaggttcatttaggcaatttcaggaaatgtttcacgtgaaacataaaatgtgcctggtgagcggatagatttagcagcaggcggcgctatgcttttcgtttttataagcacatctttctgtattgcagaaatgaaacacatatttctatggtatttccatttcataatgtcccacactttttctttccctataataaatgctggtaactgttcagagccaacctccaaaatgctgcgcatttcgtcggtgtggcgtatccgccaaataaaatttcaaaaacaggcttaaaaacgtaagcgttttacgcctgttttatgaaattttgcttggctctgaacagttacaaatgctgataaatatccgtgattgcccagcctggcgatttgctaagaaaagctttctctcttcttatcgcaccggactttctcgataagttgaaagactgattaccgttattaaagattttttatcgagtcaagcaaggctcctgcgaggttgcgcggagcaataagcagtgggtggaggcttgcttgtatcataagtgagatcaactcactcatgatagaggttatgaaatatcataaggaaggagccgcttacggaatctcataaggagggtcccatttacggaatctcataaggagggtcccgtttacgggaggattccttatgagctaggatttcttatgggctaggatcccttatgagctgggatcccttatgatcctacaagcagcgaagcggattgcgaatatccgcgttgacccactttccagtttttcgatgaacacaggggaacaggtatatcgttgttcaaaattggctttttcagtttgtagattctcctgataagtgcgaaatcatttgttattgtttaagaatttctcttatcaaaatctttctttttttcttcatttccgggctattatatcgatgttttccgttatttttcgttttgtatcgatattttattctttgttttctattattttcgatttattctatttttttcgaagttatacttataagctttgcatttgtttttcaagtgttctttccaagttctttcttcatgatgtagtcacacctgcttaaataaaccaggcaaaactcttgttttacccgagtcaggcaagcccccgcttcaattgcgcggagcaataagcaatgggcagaggcttgcctgtatcaggagtggtacaagccactcctgataagttgtaaagcagctactcgcttaaatcagtttttatgtttcacgtgaaactttctatgtattaataataagttttatcaatatatctttcctccctgctcgcatagacttgtcagtgctttcagctgcttttaaccgggtcagccaagcctcctgcttcaattgtgcaaagaataaacagtggagagaacttgcttgtatcataacgagatcagctcactcataatagaggttataggaagatccagatcccgcttgcggaatctcataaggagggtcccgtttacagaatctcataaggatggtcccatttacgtgaggatcccttgtgagttgggattccttatgagttgtgattccttatgagttggaatcccttatgatcctgcaagtagcaaagcggatattcgcaatccgctttgggttgattcattcaaccagggcgagtaagtttccgttgttcaaccatgtttcacgtgaaacgctttccgtcagacaatcattgattcgtgcttattgtttctaagactgtttttacgaccccaggtagttcagcagcaaggcggactttcttctttctgaaaatagttttcatttttgatcacattttctcaataaagttcgaggttcaaatccggactgtatggcagcaaatacagacaggagatagcagtcttgttcaaaagttccgtcactattttggcgtgatgagaacgcatattatctatgattgcaacatcgtctttctcaagactcggcatcaattgtttttccatatattcgcgaaatcactgtgcagttcttccgccttgatgcgtagtatatatatcagactgcctttaagccggatggatagcaaaacagttgttccgtcaggcgtgtttaccgaggcagtatcaatggcacgtttttcatgtactgcatgtgcataattccgcgaatagcaaagctgattgcgaacatctaccttggttttagataaaggcagatactcataatctgttttcattttccgtatcagtctctcatccgcttttatatttttttgtatgttttttcgtatatttttaacgtttgcatcattttctttatgattactttttctctatttctatattttttctttttccgtctctattatatcgatttttttcgatatttttctttttatttttctcttcttacatgtcataagttttcatgttatattttgtaactgttcagagccaagcagattttcatgcaaaagtgtgaatcatgcttgcatgaatgaacacttttacatggaaatctatttggcggatacgccacaccgacgaaatgcgcagcattttggaggttggctctgaacagttactatattttttactttttgaacgcagataagcattccccctccccccgtttcaagtgcatggaacactaagcggtggattgaatacttatgtcagtgggttttgaaaactcccactgacaggccgcgaagcgactgcgttcacgaaatatcataaggggccgtttgccatttgttttctgatttcttcctgaacgaaaaaaacagcgcagataactcctcttgtttctgtgtgtagctcttttcttctctttgatttatcagaaagagttttttctgcgtcgcaaaaagacaggcatatatgtttcacgtgaaacatatatgcctgtttctctcggctcatatctgttcaaattaaaaaatctttttcttactgttctttttctttttgttgtatattctgcattggtttcatttcaacatatctgcatacttctttatcatttttttcattttgtgcatttcactcttgcatttattgcggtcagcattcattaacgccatgcacagctctgtctgactgtataaatttgcaagcattgtatggaactgcgcgatctgtttatgaaggttttcgttttcctgatcagcctgcaacaggcgattttttcgatcaagggcttccctgattttagctgccaggtcaaccggcggatctgttttttctgtactatgttgttcttctgccccagattctctatctgtttcttctttcgccatctgctcagctttggttttttcacttgctgctgtttcttccagaacatctggagcagattttttcatgctttctttttgtttttccacttctttcagattttcactgtcagcgatttctgtatgcacattttgtttttcttctgctgctgtcggtgtagcttctttcggacagtccgtctctttgctgagcatctccgtatccaggctttctgttgttatttcatatttattttcagcattttcctcctgttctggctcttctatccagattcctgatttcatgcttttctccggctcatccttctcctctttttcgttttcttctgccccattctctccctcttccgctttattattgtcattctttgaggcgaacgtcttctcatcctgtttttcttctgcctccaggctgtgcgtgtgtcttacctttccgtttgcgtcttcctgcttttctcctgtttcgttaaaaatctctcctgtccgtttcttctcttcttccggctctgtctttttctctgccttcttctctgctttttcgtctttcgtcaaagacgcttcctgtgcatctgtctcccgaagcagtcccttatattcttcctctttctttttcaactcaccaagctgtttttttacttcctcgatctctttttctattgcctgttgtttttcctgtgcctgtgccagtttttcaagtcctccggctgctgcgattctcggtgagaaaatattttgttccagatcattttctttctgcaggtttgcaatccattcctgccctgtctgatattcctgctgcagttttttcagtttttccacataacgtcccatttcttcctgatttacatccatcaggtttataatatattctttcagcattatatcacttcctctctttccaagtgctttttcttcctttaacaatcataccccacttgcaccgaaaaggaaagattttttattgtaacatttcagggaatggtttatactaaaaagaaaaacagcatctgtttaacagtttttatatccctgctgtagaaaggaatgatctcattatgaaaaaacgcaaatccttattaaaaacttccgtgttcgttcttggggcacttgaaatctttaataaagtaatcgattcttcatccattgtgaatactaacacaagaaccggcggcaaatattatcattggaaacacggcgatatcttctatcatatatatggcgaaaaggagaatccgccgcttcttctcatccacgacctgacagtcggttcttccagctatgaatggcatcatctcgccaaacagctgactgacacatatcgaatctatacgatcgatcttgtcggctgcggaaaatccgacaagccggggattacctataccaattatttttacgtgcagatgatcactgatttcgtaaccgaagtgattggtcaaaaaaccaatgttgctgcaaccggtctttccaattcctttctcctgctcgcaaatgcaatgaatcatgacctctttaatgaaatcatgatggtaagtccgacagatctgaccaccttaaagaaaacgccagatgatcgttcccgctttattgtccgcgctttcgagcttccgattataggaaaagcactgtattatgcattcaccaaccgcatgaatacggaatattatctgactgaaacctgtttctttgattcgtttcacatggaaccttccgttgtaaaagcttactatgatgccgcacatgccggaaacggcaacggaaaatatctgcttgcaagtcagtttggaaattatctgtatgcggatgtttcacgtgcattaaaagctgccgacaaccgaattgttcttgtcatcggcactcagaacaaaaaggcagacactctgatccgtgagtaccgggcaattcagccgcatcttgtaattgagccaatctccgaatctaaacttcttccacagcttgaaaatgaagaggagatgcttgagcttctctacacattctaaattattctgtcagatctgcccatagcgtatctgaaaaatgaaaaactcctgctccagaacgcaccttttcttcgtgcatcctgtcacaggagtttttctcttccctttttcttacttttctgctcttacttaacaaagcaaactcggcttctccatcttttactgcttctctttcttccccttttttccacctggcttcgttttttcggacagcggctcctttgacggcagccctgctttccgtggaaattttgccggcgtcggacgctcttttcgaatcaaaataaagcttctcggaatatcgctgcccggtaaaatcagctctttcttctcctcgattctgcctccgagaagcgagactgccgtgcccgcctccttcacttcttcatcgatctttgtagatttataagaaataaacaatccatcgatttttataaatgggatgcaatattcggaaagtgtcgatagattggctactgctcttgatacgcagaagtcaaactttcctcgatactcctcttttttcgcatagtcctccgctcttccatgaaccgcctgtgcgtctttcagctgcagcagagaaatcacctcatttaaaaactgtactcttttattcagtgagtccagcagaacgatcttaagatgcggatacacgatcttcagcggaattcccggaaaacctgctcccgtcccgacatcgatcacacttttcgctttcccgatatcatacacggctgccgctgccaggctgtccgcaaaatgcttctccacaaccgcttcatattccgtgatcgcagtcagattcatcacctgatttttctccacgagatattcataatactgcagaaactggattttctgctccttcgtcagtgtaataccaaagtcaaggaatctctgctccagaagcgacacatcatagcgttccagcaattcctctcccatactcatttgatcactcattattttctccctgttttctgtgcatgcctccggtcagatacacaagcagcacggaaacatccgcaggcgaaacgcctgccagtctggatgcctggccgatcgattccggacggtactgcttcagtttctgtctggcctccgtgcgcaggcttggtactgcgtcataatccatatctgccggaagctttttccgctccatctttttaaactgttctacctgcttttcctgacgctccagatatccgcggtacttgatattaatgtttacctcctcgccaacgtctgcctccagctccgggcgctgcggatctatttccgcaagcatctcatacgtcagttccggtctgcggatcagctctgccagcgttgccgaggtttttaatgcggtgcttccatgcgcttccaggcagtgttgtaccgcttcattcgctccaatatgcacctgctccacacgctttatttcttccgcaatttcccgctcttttttcagcagcttctgatatcgttcttcatcaatcagtccaacctcatagccttttttcgtcagacgcatatctgcattgtcctgccgcagcagcaaacggtactctgccctggaggtcatcatccgatacggttccctgttttccttcgtcaccagatcatcgatcagcacgccgatatacgcttcggaacgatccagaatcagcggttcttttccctggatcttccgcgctgcattgatcccggcgatcagtccctgtgccgccgcctcttcatagccggagcttccgttaaactggccggcactgaacaggccggagatatttttaaattccagggaaagcgacagcgctctcgcatcaatacagtcatactcaatcgcgtatgcgttcctcacgatctgcgcatgttccagtcccggtacagaacggtacatcgcgatctgcacatcctccggaagagagctcgacatacctccaatatacatttcatccgtgtggatgccctccggctcaataaatacctgatggcgttccttatccgcaaaccggacaaccttatcctcaatcgacggacagtagcgcgggccggtaccctcgatcattccggaatacagcggagaacgatccagattgctgcggatgatctcatgcgtcttcggattcgtgtaagtcagccaacaggaaacctgctccttctggatgctttccggatcggtcgtaaatgagaacggtacgatccgctcatcgcctttctgctcctccatctttgaaaaatcaatggactttttcgcgattcgcgccggggtacctgtcttaaagcgccgcagttccactttgtttgcctttagagaatccgtaagataatttgccgcctgcagtccgttcggccctgtatgcacgctcacatccccgtagatgcatcttgctttcagatacgtaccggtacagaggattgctgctttgcagtgatatacggcaccagagtacgttctgacaccggttaaagcgccgtcctccacgatcagctccgtcacttccatctgccggatcatcagattgtccgtccgctccagcacctggcgcatactgcgtgaataatcggatttgtccgcctgtgcgcgcagagaatggaccgccggtccttttgatttattcagcatcttcgactggataaaggttcgatcgatattttttcccatttcaccgccaagtgcatcgatctcgcgcaccagatggccttttgagctgcccccgatgttcggattgcacggcatcagcgcaatgctgtcaacgctcacggtaaacagagccgtctgcatcccgagccttgcacaggcaagcgccgcctcacagcctgcatgtccggctccgacaaccacgacatccacatactcttctactttactcatttctttcttcctctttctttttgctcatgctgctcacacatccgtttcacagaacccttccgtgtccttccgcctgcattgctccaggccatgcagacgaaattttcccgtcatatattccattattttcccatacagaaccggctgaaaatctcatttaccagatcctcaccgacggactcgcccaggattgcgcccagcgcctcatacgcgctcattaaatcaatcgagtagaaatcctcgggaagccccagagaaatgctctcaagaacctttaaaacgctttcacgggcatttacaaggtctgctttctgcctggcattcgtaatatacacctcatcattgaaagaaagctctccgcggtaaaacagctcccggattgtctgttccagaagttcaatcccgtttccttcccgcgccgataccgaaagaaccggatactgttcccccgttattttctttaaatcctccgccgtcactgctggcggaagatccgatttgttcaggatcagaacggcctttttgccgccaagggagtgcaggatctcccggtcattttcatccagttcctgcgaggaatctgccacgtacagaatcagatctgcctgctgtgctttttccttcgcacgctcaactccgatccgctccacaacatcctccgtctcccggattcctgccgtatcgatcatatttaaggtgagaccgttcaatgaaatgctctcctcgagcacatcacgcgtcgttcccgccacctccgtaacgatcgcccgttcttcgccgagcattgcgtttaaaagtgaagactttcctgcattcggcctgccgaggatcacagtctggattccttctttcatgatacggccattgtccgctgaatcaatcagatgggtaatttcctgctccagctcccgtgcctctttttccagacgctccggatacccctccagcgagatatgctccggatcatcaagcgctgactcgataaatgcgatctggtaaagaatccgttccctgattttctgtacagccgcctggactgcgccttttaactggctgacagagctttttaatgcatattcattttttgcctggatcacatcaattactgcctctgcctgagacagatcgatccggccgtttaaaaatgcgcgttttgtaaattcgcccggctctgccgggcgtgcgccgtttttcaaaaccgcctccagcacacggcgcacagcgtaaacaccgccatggcagttgatttccactgtatcttccgccgtgaagctctttggtccccgcatcagcatcacaagcacttcatcaaccacttcatcgccgtccacaatatatccataatggatcgtgtgcgatgcctgatctttcagatgcactctgccgcctttggaacggtaaacgcggtccgctactgtgaccgcgtccgctccgctgatccggataatcccgattcctgcgctcgatactgccgtcgagatcgccgctattgtatcattttccatgttgtatgccatgtttttctctccaattcaatcaaagcggatattcacaatccgcttcgctccttgcaggattcataagggttccagcccctaaggaatcctcccctgcttattgctctgcgcaacctctcaggggcttgcgtgactcggtaaaaaaagagtgctgcacaatctcctcaattatgcaacactctctcttacattgtcaacttataatgcttactcctgtggtgcttccgtctgggtttctgccggagctgtttcctgcggctgcgggaatgcttcgtgctctcttcttgtgcggtagctgccctccggacgcggtcttctctgacgatatccgctgcgctcctgtggtcttccctcactgcggcctttcttcggcgttacaacaacgcgtcggttcggctcgtcgccctcagaatgagtcgtaacatacggatcattctgaagtgcagaatggatgatccgtctctcatacggattcatcggctccaggaataccggtcttctcgtcttctttaccttcattgcaatgttttttgcaagattctccagcgtcgcttttctgcggctgcggtaatcctctgtatcaagcttgacgcgcacataagaagcctttcccttatttaccacaagggaggtcagatactgaagagaatcaagggtctgtcctcgcttaccgatcagaagtcccatatcctcgccttcgatctcaacagaaagcgtatcctccgcaaactctgcacggatctcgacgttcatctccatcacgcggaacatttctttcagaaaatcaactgctctgcgctttgcctcttccggatcagccggtacacgcggtgtcttcggctcggtctctgcctgctctggtgcagaagcagtttccgcctccggtttcttctcttttgaactttcccggaactcgcgtttttctcttgtaaactctttcttcggctctctgcgctcttctttctttggctcagctgccatctccggtgcagcctcttttttctgcggcgtttccgttctgacttccttcttaaactcttttttgaagtctttcttaaagtcattcttcgtttcttttctgacttcttctttgcggacttcttttttcggctctctctttgccttttccggcttgtcactgctgccgaagacttccttcatcagatcgtcatccgtgaattttttctttgcatcgatcactgctttttttccgccgattccgaaaaatccgcgtgatccctcgctgatgacggtatattcgatgttgtcgctgctcgttccaagctggatggaggcttctgtaactgcatcagcaaccgtttttgcttctacacgaatagaatccataaccctgtaatccccctatttcttcttcgcatgcttatcattgtactgctgtaccatctgggctttggaagcgaggcttcccggttttgccttcgttgtgctcttatagtactccgtcgcattctggatcttctgatccttttcctcctgcgtcagctccggctttgcaggtttttcgatcgcccgggtattcagctttgccgtattcgtgatcttctgaggcggaagcccctgtttctcacgcttcttattggctttctcaatgttctttttcatgatctcatcgagatccatcttgtcaatctgtttgttgacgatcagctgctggatagaacgtactaccgcaccggcaatccagtagatacccatacctaccggcagcgtaaagcagaatactgcagacatcagcggcatcataacgttcatcgtcttcatcgtgctggccattgtatctgcctgcgcgtttccacttgtcgcattgtcattctgcgtggacatcagctttgtattcagccactgtgtcagcgcggaaagaagcggaacaagaatcgccgcaatgatcagtgcaatggaaccggctgcaagcgcagtctggaaaatagacgccggtgaatcagcgatgttcaatccaaggaagtagttcatgcggtctacatccttctgcgtactcgtgatcaaagaggacagatccgggaactgctctaaaagcgcagaccagttatccggcttgaatttgtaaagtacatcgatcagcgtcagctgtgtcatgtcattgaatgtaactgcattcgtctttgcaatttccgccataaaatcctgcgctccgtttgttttaagcagcgcatctgccagcggaacaaaataattctttacggatgttacgtaagccggaatattccagattacgcggtacagtgcaaacaggatcggcatctggataaccatctgcagacagcttcccatcgggtttacaccgtatttctgatagacagcctgtgtctcttcgttcattttcatcatggctgcctgatcctgattcttacccttatactttttctgaatcgcctgaagctcaggattcatcttgctctgcagcctggaaaatttctgctgcttgatcgtgagcgggagcagcaacatgtagattacaatcgtaaataaaataatacacagaccgatgctctcaattccgatctgtgactggacccagaaaatcgcattcataatgtagccaagcagtgtagctaccggtccgataatgaatgttgaggtcttggtcaaaagcattttttaatttcctcctcatggaacgggatcgtatccgcctttcgaaaagggattgcatcgcaggatcctccatgcagccagaatgcttccttttactgctccatatttctggactgcctccagcccgtactgactgcaggtcggaaaataaggacaccttgtacttttcaacggcgagagatacttctgatagcatctaatcagaaagatcagtatctttttcatattcgacattcacttctttctttttctctccactttccaaaataccatggagccttccaagatgaagcagcgcgctctcaatttcaaagaagcttcgccctttcgcgcctggccttgctacgactacgatgtcaaggcctctcacaaataaatgttcattcaatcgataactttcccggatcagtcttgtaattctgtgtctgattacactgtttccgacttttttactgactgaaattccgatacggtttcctgcggtgtcctgcttccttatatacatgatcagatatttgttggcatacgatctgccccgtctgtacacccgctggaaatccccgtatttttttagagattctgaaaaaatcatacattcttccttttcagaaaagtgtaactgcccggaaaattccggacagttacaaaaaaggccacatatctgcggcctatgctgacaatacttttcttccttttgctcttctggcagctaaaacttttcttccgcctgctgtgctcattcttgcccggaatccgtgaaccttggatctggatctctttttcggctgaaatgtcatcttcatatttccggcacctcctttttactgaaccaaatctatttcagttggtatctttgtagttgtctatcatgtatatatttgaaaacatcgcctcaattatattcaaaaaacctcgattcgtcaagcaaatccttaaattttttgtatttcggattttatccaccacatcagcgattttctgcacagacctgtggataatcaggcttctttttatccacaaacttatcaacagaagtggataacttatccggttaacgtaatttatccacaatttgttgataacctgtggacaaaattttctttttctgtgtatatgcattttttcgacttttattttttctttattttctcccgctttttcctgtgtgcacagtttggatgaagttatccacatcctgcgtacatcccttcctgcactccgatcttatgtcaactctttttatgcttatccacaccgggctgaactttttttaatttttatccacagaattcgaccggttttgcacatctcattcaaaagtttccattgcgaaaattctctttttgggttaatattaccgtaggaaaaaatggttttttggagattatactatggacatactaaaagaaaaatgggatcagatcctgcagaccgtcaaggttgagcacgaattatccgacatttcgttcaaaacctggcttcagcctctgcagctgcatgagattaccgacaccaccgtcacaattctcgtcccgaacgagcagatggcgatcgattatatcagcaaaaaatatacgtttccgctcaaagttgccatcgccgagtgcaccggaaaagaatacaacatcgaatttatcctcccggagcaggctgctgcgcagcttgaagcgaaaaaaaaggtcgctgctgtcaacaatgtggacaacagcgttcttgccgaacgcgccggcctgaatccgaaatatacgtttgacacctttgtcgtcggaaacaacaacaaatttgcgcacgctgcctccctggcagtggcggaatctccgggaaaaatgtacaatccactcttcatccacggaggcgccggacttggaaaaacacatctgatgcactccatcgctcattttgtactcaaccagaatccggaaaaaaaggtgctctacgtcacaagtgagacctttacaaacgagctgatcgacgcgattcgaaacggaaacaacaccgccatgacgaaattccgtgagaaataccgtagcgtcgacgttcttcttatcgacgatattcaatttattataggaaaagaggcaacccaggaagaatttttccatacctttaatgatctccatggcaataaaaagcagatcatcatctcctccgataaaccgccgaaagatatcgtaacactggaagccagactccgttcccgtttcgaatggggcctgatcgcagacatttcgtctccggattttgagaccagaatggcgatccttcataaaaaggaagaaaatgatggctacaatattgataatgaagtcatcaaatatattgccatgcatatcaagtccaacattcgtgaacttgagggagcgctcaataaactcgtcgcactcagcaatctcgaaaaacgtgagattactgtcgagctggctgaggaagcattaaaagatattgtctctccggatgaaaaaaaggaagtaacacctgcactgatcgtcaatacggtagccgaacacttccacgtcagtgtagacgacattcgcagcaacaaacgaaacaacgaaattgtcgttccacgccagatcgcaatgtatctgtgcaacacgatgaccagcgtcggactcaaaaaaatcggcagcgagatcggcggacgcgatcattccaccgttttgcatggttctaaaaagatttccgacgaaatgaaaacttcggatgacatgaggaaaacaatcgaaatcctacagaaaaagatcagtccaggctgaaagttatccacaaagttatccacttatccacaggatatctcatgggaaatgctgtggacaggctgttcacgtctgttcacaacttttctgtttttttcaggcaaactgcggatttcgttacggggatgtgcataactgcgttgttatcctgcttgtatcacggcggcatacacacagttatttcggttgaatttatgcgtaaaaccagcccttccgggagttttacacatatccacaccccctaatgcgaatactgcggattttttttcttcttttatctatctattcggatcccaaaatctccacggtggattatcaccgtcagcttcaggatcctttaacagacaataatataaaacacatcaatagatccgcttccggaaaggagtacttatttatgaaaatcatctgtaaaaaatcggatctgcagaagagcatcagtattgtatcgaaggcagtgtcctcaaaaacaacgatgccgattctcgaaacaatcctgattaatgcatctgctgcagaaattcatttcaccgccaatgatatggaactcggtattgataccattgtggaaggaaccattcaggaaaaaggtatggttgcgcttgatgcaaaacttttttctgaaattgtccgaaaacttccggaaaatgacgttattattacttctgatacaaacaacagtacacagatcacctgtgaaaaagcaaaattttcgatcatgggacagagcggagaagattttccatacctgccttatgtagaaaaagattatcagatcacaatttcacagtttactttgaaagaagtgatccgtcagacgatcttttcaattgcggcaaatgacagcaacaaaatcatgacaggtgaattatttgatattaacggcagtgaaatgcgcgtcgtatccctggatggtcatcgaatttccattcgaaaaatccttctgaagtcagaatatgagccgaaaaaagtgatcgttccgggaaaaactctgacggaaatttcaaaaattctgaccggtggaacggaagatattgtagatatttattttacaaataaccatatcttgtttgaatttgaaactacggttgttgtttccagactgatcgagggaaattatttccgcgtggatcagatgctgaccaatgattatgagacgaaagtcacgatcaacaaaaaagaatttcttgattgtattgaccgtgctaccttgatggtaaaagagggagacaagcgtccgatcattctgaatattgcggaagatgtgatggaactgaagatttcttcgcagatcggatcgatggatgaattgatcgatatcgaactggaaggcaaaaatatcaagatcggcttcaatccgaagctgctgatcgatgcactccgtgttattgatgatgaaaaaatcgatatttactacatgaatccaaaggcgccgtgctttatccgggatgaggagcagagctatatctatctgatccttccggtaaactttattgataacgactgatgaaatacgtgtctgctgcagatttatgcatttccaggcgggcagatacggaaaatgtaaaagtgtccgccacggaaacacaagaaaaatgacattataataagaaacatgtcacttataaaagagtccgcagtacacggacggaaaacgcggcaggcagtaaagtgacagcaggtcaggagttcccgggaaattccaggtggcatgacgacagaaaacaatgcataattattcatttgaaatacaaaagacagaaagaaatgcatctgcaaaacggattgcagaaaatgaaaagcacgagatcacataaggacaggagaaaaaatggaaacagtagagattaaactcagggacgagtacatcaagctcgggcaggcgctcaaggcagctggaattgctgaatcgggcgtggatgcaaagtatcggatccaggacggcacggtacaggtaaatggaaagaccgaactgcagcgcgggaaaaaactttttgccggagatgtagtcgtatgtggaaatgttaccgtaaaagttgtagaatagatacggtacagaatcaggtaaaattttagaaagcgaacgtaaaacgcttgcaacagcgtagtagaatgagtagtgagagaacatgattgttgagtcggtaaagctggaccagttccgcaactataaatcactggagctggaatttgacagtggaacaaatctgttttatggggacaacgcacagggcaagacgaatgtcctggaggcggtgtacctgtgcgggacgacaagatcccaccgggcgggtaaggatcgggagatgatccggttcggccaggaagaggcccacatctgtatgcggatccgcaaaggcgacgtaccataccgcatcgatatgcacctgaaaaagaaccgttccaagggaattgcgatcaacggttcaccggtgcgaaaggcgagcgagctggtgggacttggaaattttgtctttttttcgccggaggatctgaatatcatcaagaacggaccggcggagcggaggcggttccttgatatggagctgtgtcagctggaccgcatttatttatatcagctgtcaaattataataagcttctggtgcagcgcaaccggcttctgaaggattatgcaggttatccggaagcggaagcgatgctggatatcatggatgagcagcttttgcagtatggaacggtgatcatcgaggcacgggagcggtttgttcgtgaacttggcgggatcatcggcaggatccacggaaatctttcgggcaaccgggaggtgctcgaggtgacgtatgagaaggatacacagatctcgcagtttgctgcgagattaaagcagaaccgggagcgcgatatccgttccaaaatgacgaactgcggtccccaccgcgacgatctctgttttgcgatccgcgaagtggacatccggcggttcggttcccagggacagcagaggacggcggcactgtctttgaagcttgcggagattgagatcgtaaagcagagcgtaaaggatacaccggtgctgctgcttgacgatgtgctttccgagcttgacagcagacggcagcggtatcttctggagagcattcatgacatccagacgatgattaccggtaccggagtcgatgattttgtagaaaataactttaaaataaaccggctgttccaggtaacagacggaacagtcagtcagaagaattaacaggaggtttttcatgagcgcagagtacggtgcagatcagatccagatactggaaggacttgaggcagttagaaaaaggcctggtatgtacattggaagcacctcgtcgagaggtctccatcacctggtttatgagatagtagataatgcagtggatgaggcactggcaggcttctgccacaatatcctcgtcacgatcaataagggggattcggtgaccgttgtggatgacggccgcggtattccggtcggaatcaataaaaaagcaggtcttccggcagtcgaggtcgtttttaccgtgctgcatgcgggcggaaaattcggcggcgggggatacaaagtatccggcggactgcacggtgtgggtgcatctgttgtaaacgcgctttctacatggctggaggttgagatctgccacgacggtaagatctatcagcagcggtatgagcgtggcaaggtgatggaaaaactgacggtgatcggtgagtgtgatccggaaaaaacaggaacaaaagtaacgttccagccggatccggagatctttgaggacaccgtttatgatttcgatgtgctcaagcagcggctgcgcgaaatggcattcctgacaaaaaatatccggatcgagctgcgggacgagcgggatgaggaaaacgtaagagagaaaattttccattacgagggcggcatcaaggaatttgtcacttacctgaacaaaggaaaaacgccgctttacgatgatattatttactgtgaaggaacaagagacggcgtttacgtcgaggtggcaatgcagcataacgattcctacacagagggaagctacagttttgtcaataacattacaacgccggagggcggtacccatctgaccggtttcaagaatgcactgacgaagacgtttaatgattatgcgcgggtgaacaagcttgtgaaggattcagatcagaacctgacaggagacgatatccgggaaggtctgacggcaatcgtgagcatcaagatcgaggagcctcagtttgagggccagacgaagcagaagctgggcaacagtgaggcaagaggcgcggtagagagcgtcgtgacggagcagctgactgtatttctggagcagcatccgcaggttgcaaagattatcgtggaaaaatcggtcatgtcacagcgcgcaagagaggcggcacgcaaagcacgtgagctgacaagaagaaaatcagccctggacggcctgtccttaccgggcaagctggcagactgttcggataaagatccgtcaaaatgtgaaatctacatcgtagagggagattccgcgggcggttctgcgaagacagcgagaagccgtgcgacgcaggcgatccttccgcttcgaggaaagatcctgaacgtggaaaaagcaagactggaccgtatttacggaaacgcggagatcaaggcaatgatcacggcatttggtacgggtattcatgaggattttgatatttcgaagctgcgctaccacaagatcatcatcatgacggatgccgatgtcgacggtgcgcatatcgcgacactgttgctgacctttttgtaccggtttatgccggaactgatcaggcagggctacgtttatctggcacagccgccgcttttcaaactggagaaaaacaagaaagtctggtatgcatacagcgacgaacagctacagcagatccttgatgaggtcggaagggatcagaacaacaagatccagcgttacaaaggacttggtgagatggatgcggagcagctctgggagacgaccatggatcctgcgaggcgcatcctgcgcaaggtgacgatggatgaggcgcagtcctcggaaatcgacctgacgtttacgacactgatgggcgaccaggtggagccgcggcgcgagtttatcgaagagaacgcgaaaaatgtaaagaatctggatgtataagttcacgagacaggaggtaaatccgtggaagatacaatatttgaccaggtccatgaggttgacctgaaaaaaacgatggaagagtcgtacatcgactatgcgatgagtgttatttcgcagcgtgcgcttccggatgtaagagacggactgaagccggtacagcgccgtgtgctttattccatgattgagctgaacaacgggccggacaagccgcacagaaaatgtgcgcgtattgtcggtgatacgatgggtaaatatcatccgcacggcgacagttccatttacggtgcactcgtaaatatggcgcaggaatggtcgacgcgttatccgcttgttgacggacatggaaattttggttccgtcgacggagacggcgcggctgcaatgcgttataccgaggcgagactgagcaaaatctcaatggagatgctggcggatatcggaaaagataccgtggacttcgtaccaaactttgatgaaacagagaaggagccgaccgtactgccggcacgttttccgaaccttctggtaaacggaacgaatggaatcgccgtcggtatggcgacaaatattccgccgcacaatctgcgggaggtcatcggtgcggtcgttaaaatgatcgacaaccgcatcgatgagggcagagagacggatatggaggagattctggagatcatcaagggaccggatttcccgacgggagcacagatcctcggaagacgcggcattgaggaagcgtaccgcaccggcaagggtaagatccgggtgcgtgccgtgacaaatattgagtccatgccgaacggcaagagccggatcattgtgactgagattccgtatatggtaaataaagcacgtctgattgagaagatggctgatcttgtaagggacaagaaaatcgacggaattacgggaattacggatgaatcgaaccgcgagggcatgcggatcaacattgaactgcgcagggatgccaatgcaaatgtggtgctcaatcagctttacaagcacacacagctgcaggatacattcggtgtgatcatgctggcacttgtcaacaacgagccaaagacgctgaacctgaaagaaatgctgacgtactacatccgacaccaggaggatgttgtcaccagaagaacgaaatacgagcttaacaaggcggaggagcgtgctcacatcctgcagggactgctgatcgcgcttgacaatatcgatgaagtcatcaagatcatccgcggatctgcaaacacaccggctgcaaaggctggactgatcgagcgtttcggcttaagcgatgcgcaggcgcaggcaatcgtggacatgagactgcgtacactgaccggtctggaacgcgagaaaattgaggcagagtatcaggagctgctgaaaaagatcgaagagtatcgggcaatccttgcagatgagaacctgctgcttggtgtgatcaaaaaggaaattcagatcatcagcgacaagtacggcgatgaccgccgcacgagcatcgagcgcgacgtgtttgatctgacaaccgaggatctgatcccggatgagaacgtggtcatcacgatgacgaagcttggctacatcaagcgcatgacaccggacaacttcaagagccagaaccgaggcggcaagggcatcaagggaatgcagacgctggaggatgactacatagaagaattgctgatgacgagcacgcaccattatctgatgttctttacgaatcagggaagagtgtaccgtctgaagggatatgagattccggaggcgagccgtacggcgcgcggtaccgcgatcatcaacctgctccagctgctgccgggcgagaagatcacggcgctgatcccgatccgggagtacaaggaaggccgtttcctgtttatggcaacaaagaaggggctggtaaagaaaacaccgatcacagatttcgcaaatgtgagaaaaactggtctggctgccattactctccgtgacgacgatgaattgatcgaggtcaaatttacaaacaataaaaaggacatcctgcttgtgacgaaatacggacagtgtatccgtttccatgagacggatgtgcgcaagaccggccgttcttcgatgggtgtgatcggaatgaatctgtcagacggtgacgaagtcgtagccatgcagatgaatacgcagggagaatacctgctgatcgcatcggagtacggcatgggtaagctgactgaaatgtctgagtttacggcgcagaaccgcggcggcaagggaatcaagtgctataagatcctggaaaagacaggaaatgtagtcggagccaaggctgtgcatgcggataatgacattatgatgatcagcacagaaggcatcatcattcagatggcatgcgaggatatttccgtgcttggccgtgtgacgagcggcgtgaagctgatgagccttgatccggagaaggatgtgaaggtagcaagcatcgcacgcgtaaaggattctgcgaagaagacggaagaggatacactgaaatcactggaagaggaactgaagaaagaggaatcataagacatgagggtacgaaggctgcttgccatatggactgcaaagcttgtgagtaccggctgtaagctggccggaaagcagggcgtgacgctggcgggaaagatcgcgctgaagatcgatccgaagatactgcacgaccttgccggacaggtgcgtgaaaagatttttgtggtctgcggcacaaacgggaagacaactacaaacaatctgctgtgctctgcaatcgagtcagaggggaaaaagctggtctgcaatcataccggctccaacatgctggatggtgtggcggcggcttttgtcctcgcagcgaaaaataacggaaagctggatgcggactacgcgagcatcgagatcgatgaggcctcgacggtgcgtgtgttcccgcattttaagcctgattacatggtgctgacgaacctgttccgtgaccagcttgatcgctacggtgagatcgacatcacgatgaagcttttagaccgcgcgatgaagatggctccgaagatgaaggtgatcgtgaatggggacgatgcactttctgcttatcttgcgatggaaagtggaaatgtgtatgtgacctatggcatcccgggtcaggtgtttgaccagaaggagaacggagagattcgcgagggacgcttctgcaaacggtgcggagaacggctttcctatgacttttaccattacagccagctgggcagctaccactgcccgaagtgcggctttgcaaggccggaggccgattttgcggcggaagcgatcgatatgacgcacggactgaaatttgaggttcgggaaaaacagggaagagtcacgccggtcgaagttaattatcagggcttttataatatttacaacattctggccgcatacagtgcggcacgtaccggtggactggaacttgcgcattttgaaaaggtgctgcaggaattcaatccgcagaacgggcggatggagcattttacgattggaactacagaggtggtgctgaatctggcgaaaaatccggcaggcttcaatcagaacatctcggcagtgatggaggataaaagggataaggatatcatcatcgtgatcaatgacaacgcgcaggatggtacagatatctcatggctgtgggatgtggattttgaccgttttgctgatccgtcgatccgttcgatcacggtcagcggcatccgctgccaggatatgcggctgcgcatgaagtatgtggatattccatgtcagctggaaaatgatgttgagacggcgatcaaaaaacgtgtgcaggacggctgcggttctctttatgtgctggtcaattacaccgcgctgttttcaacaagagcgatactggcaaagatgtgacagcgcgagagtgcacggaaaatgtttcctgagaggtatgagccacgatctgtcagaagatttctgaagaaggatggcgcagcggggcaggacaaagaattctggaggaatcaacatgaaactgaagattgggcatttgtatccggatctgctgaatctgtacggagaccggggcaacatccagtgcatgaaaaaaaggtgtgaatggcgcgggatcgaggcggaggtacaggaatttgaacttgacgatccggtggatttttccacgcttgatatcgtgctgctcggcggcggctcagaccgggagcagatgctggtctgcgagaagctgcgcgggataaaaaagagctttcgggattacgtggaggatggcggaagtgtgatcgcagtgtgcggcggctaccagctgctcggccattactacgatacggatgacggacggatcgagggactttcgctcgtggatctttacacggagcaggggagtccgcgcctgatctcgaatatcgtgatccaaaatgatgctcttaaagttccgatcgtcggatttgaaaaccatggcggacggacgtatatcaatggcaacaaaccgcttggaaaggtattgtacggatacggcaacaatgaaaaggacaaggcagagggcgtgctttacaaaaatgtgatcggcacgtatctgcacgggccgcttctgccgaagaacccccatgtctgcgacctgcttctggcaaatgcactggagcgaaagtatggcgtaaacgagctcgccccgctggatgacacacaggaactggaggcaaaccggtatatcgtggatcggtttgtatccgcatcagatagccggaaggactgaatatctgctttgaatggtattgcggtaaagttgagaatatttgacgttttgaaaaaaatgtcaaaggaaaccacttgacaaacagacagaaacgctgtaggttatatccgaactaacaaaataaatgcttttctcttattcagagtggtggaggtacataggacctgcgaagccacggcaaccccgtttatggaaggtgccaacctgagcgagtaaattcgaacaataaggggatttgatgagtgattattgagtccgcctttttgaggcggacttttttcagggaaaaagcatagcagaggaaaaagaaaggaaaaaatatggacaagagattatttacatccgaatccgtaacagaaggacatccggataaaatgtgcgaccagatttctgatgcgatcctggacgcgctgatggagcaggatccgatgagccgtgtagcctgcgagacagcaacgacgaccggtctggtactggttatgggcgagatcacgacgaaagcatatgtggacattcagaagatcgtccgcgatacgatccgtgagattggctacacaagaggaaaatatgggtttgatgcagatacctgcgcagtcattacagcgattgacgagcagtctaccgatatcgcaatgggtgttgataaggcgctggaagcaaaagagaaccagatgaatgacgaggagatcgaggcgatcggcgccggagatcagggtatgatgtttggttatgcaacaaatgagaccgaggagtatatgccgtatccgatcgcactggcacagaagcttgcacttcagctgaccaaggtgcgcaaggatggcacactgacttaccttcgtcctgatggaaagactcaggttacggtagagtacgatgagaatggcaagccggcaagactggacgctgtcgttctttccacacagcatgatccggaagtgacacaggagcagatccacgcagacatcaagaaatacgtgtttgatgagatccttccgcaggatatggtagatgagaacacgaagttctttgtaaatccgaccggacgtttcgttatcggcggaccgcacggagacagtggactgaccggacgtaagatcatcgtagatacttacggcggatacggaagacacggcggcggagcattctccggaaaggactgcacaaaggtagaccgttccgcagcatatgcagcgcgctacgtggcaaagaacatcgtcgcagcaggactggctgacaagtgcgagattcagctgtcttacgcaatcggcgtggcaagaccgacttctgtcatggcagatacatttggcacaggaaaagtatcggatgaaaagctgacggagatcgtccgcgacaattttgacctgcgtccggcaggaattatcaagatgctggatctgcgccgtccgatctataagcagacggcagcatacggacatttcggccgtcatgatctggatcttccgtgggagaagctggataaggtggaagagctgaagaagtatctgtaagaactggaatcgcgaatagagaaatgagcagggcggcatctgaggatgccgccttttttgatgtcaggacgttcagagcagcaacaccggtttacaaaatttttataaatatattgattgtttagaggaaatggcgtttcgagtgtgctatactcagagggataacatgatgggaacggaaggaaatgtgagatgaaattaaagacaagactgatcatcgccttttttgtgattctgtttgtgccttttctgatgtttgggattgcgtttttcgggttttcgaagtatcagatgcaggcgattgagcagagctacggtgtgccgatgtcatgggatacactgtcagatacgatgcaggtaatcggcaaatcgacggagaaagtatttaaagagctgaaatcgcaggcggagaaagatccggaccgttttctggatgaagcgtatctggaaaagatgaaccttgagatgggggagcttccggcgtatctgcttgtgcgcaaagataatgagctttattataatgggtcaggagaaaatgtctcaaagctgttctcggagcttccggcatttcgggaattcagcagttcttcagacggagggtcttatatcggcaaggatgtcaaggcgtttgtaaaacagctggatgtagaattttcagacggaagcgagggtagtgtttttattatttcatcaacgaaaaagattgtgacacagacgaagcatctgctgatggatctgctgatttcgatcgtggtcattctgttttttacggcagcccttctgacgatctggatttacactggaatcaacacgccgctgaaaaagcttt

SEQ ID NO: 1329 - DNA, 6256 bp, Unknown
  16S sequences of unknown bacteria
gctgcagcgccgcgccgcgaacgctgtcgccatcctccacggaaatcaggatcgaattggccaattcgtccacatacccgtgctgcagcaacgaaccaatcagggcattgacagccacattggcgtcagccccttcgagcttcagcccctccagaatctcctctccgtcacggttgagggcaacagcggaaatgacacgggatttagcgttcagcttcaattccacactggggtttacatccacggaaataatgctccgcaccagatgggactgcgtatactgcatgcctcccccggcgattatcagcgcaaggcacgcggcagccagccacggcgccatgcggcgcgtcctacggttttttaccgggcgttcctgttgtgtcatatcctccgttcctttctgcgcaccgcagcgggagagaacgtcgcccaccgcatccggcgcagcatgttcaatggcgctgtgcagatggcgtatcatttcctgttctgtcatagggcatcctctcctttccagtgcgtttttaattttttcagcgcgcggtgatatttggacaagaccgtgggcaaaggcatctgcagcagcgcggcgatttcccggtgcttccagccggtgacggcataaagaagaacgatctgccgctcctgttcggacaatgccgccacagcgctgtgcaacagcatccgctcttcgtggctcagtcccctgccctcatcaggcagagccatccactcttcttcggtgaggtcgccgacacgctgctgcctgcgcagccgcatcagtgccagattgcgggcgatagtcattatccaggccaacgcctttccttcgctgcggtaagccggggccttttcccagatctggacaaacgtatcctgggtcacgtcctcagcctccgtcgggtttttcaaataggaaagcgccaatgcatagactgccgcccgggcacggccatacagctctgccaaggcgtcccgatctcccccggccacgccctgcagcagcctatccaaggcgttctcttccaaccgctgccgggattcggttgtgatcacatccaaaatcagcatgtttccgccgctcctgtcataaagggaatgcacgaaaggaacgatttattgcattctctctgccaaaattttcgtctgcacctcacggtttcaccgcagacacgtttctgtaccccattccttgctgtaacgcacatcgcacgcataatgccttgtttccaccaaaggctctgcgattctccggaagccgtatttctcataaaacttctgtgcagcaaccatattttccaacgtttccagataacaccgacaatagtgcttcctggcataagccaacgctgttttcatcagggcatgggccgcgccggtacccctggcctcaggcaggcaatacatcttctgcagctcacacacgccggcgacactgtctatccggccgatccccacgccgccgatcacttcgccccggacattctcagccacccaatactggcttccttcttcgttataaacctccgaaaaacggcccaaatccgggtcagcccaagcggtgcccgcatgatcggccccgaattcaaccagacacgttcgaatgatgtattcgatgcgccggttgtcttccggtttcagttcccgaatctgataatccatacgaacttttcccggataccgttcagcgaagaaaatggcccagctgcacaccgtaggcatgcagctccgcttcctgcgcctccgacagatactgaggtgttcccagcattcgcgtctggatcagaatctgtgcgcagcgctccagcgtttccatgcgggtaaaagcctgccacagatcttttccccaggtcaacgccccatgattggccagcagcacggcattgttctctctcacatagggcaaaatactgtccgccaccgcctgtgtgcccgtcagcgcataaggcgccgtatacaccttccccagctgcagcgttaccggcggcagcaacggctccgtcaatcccacgccggcgctggccagcgccgtagcggcaatggagtgagcatgcaccgccgcctgtgccagggcattataccgatagacacatagatggagcttcagttcgctggaaggctttgccgttccttccagcacgttcccctctaaatcggtctttaccagatcatcctctgtgaggaagccttttgcgctgcccgatccggtggtccacaggtgcgctccgccgtccacacggcagctgatattgccgtcggtgcccgtgttcagcccttcctcatacagcaggcgtcccacacggataatttcctcacgcgcctgcgcatcggtgggatagctcatatctgtgccgcctcctttttacagaaaatatccctcagcgattccgtatacggcgcgcgggccacaccgtattccgtaacaatggcagaaatcagatcgttgtccgtcacatcaaaggccgggttccatgttttgaccccttccggcgccatccgcttttcataccacatccggcagatctcatcgccgctgcgctcttcgatcacaatatctgccccagtgggggtatgcaggtcaatggtggaagagggcgccaccacataaaacggcacgccgaaacgcttggccagcaccgccacgcccagcgtgccaattttattggccgcgtcgccgttggccgccacccgatcgcagcccacgaatactgcgtcaatcattccttttttcatcacggaggccgccatattatcgcagatcagcgtggtgtcgatgccagcagaggacagctcaaagctggtcagccgtgctccctgcagcagggggcgggtttcatcacaataaacatggaagccataaccccgtgcatggcccagatacatgggggccgtggcagtaccgtaacgcacagtggccaactggccggcgttgcagtgggtcaggaggccatcgccgggttttaccagggacaagccattctcccccagacggcggcacacatcaatatcctcctgccacatggccagacattccctgtgcagcgccgcccgaatttcctccgctccgcccgcggtctgatgcgctgtgcgctccatgcggcgcagcgcccaggaaaggttcaccgcggtggggcgggcagaattaaggtactctgccgccgcgtgcagccgttccagaaacgcgccgcgttcacctgctttgatctcccgggccgccaaatacagcccgatggccgccgccacaccgatggccggcgcaccacgcacccgcagggcctggatagcctcccagatctcgttctgtccggtcaaatgcaggagcttgatctcgcccggcagcagcgtctgatcgataattaccagtgctgcaccatcgtcactgagcgacacggtatcatattctaaaatggatttcatcgccattcccctttttgtcctttttacgatataaggatacggcatttcactgcttttgtcaaaggggatactcactctgcccgcagaaccgccgccgtacaggtatacccgttttttccttcatactcctgccgcatcggcgttaacagccccctgttgttcatagcaacaaatatacgcccgaaccaagccggtttttctcccgccccggttttcaccaatatagcaaagaccgccaagatgagtttggaatttttcttacgttttatttaagagaatagacacttccccgcccaaaatgctatactgcggaaaaagccgtacagaaaggagcgcatatatcatgtaccgcatttttatcgtggaggacgacgaagtgatcgcccgtgtgctgggggagcatctgcgtcaatggggctacaccacacagtgcgtgcaggattttgaacatgtgctcgccgaggtggatgcctttgccccgcaactgatcctgctggatatttccctgccttttttcaacgggttccactggtgcgccgaactgcgcaggcgctcctgcgtgcccattattttcctttcttccgcctcagatcaaatgaacgccgtgatggccatgcagctgggcggagacgatttcattgccaaacccttcgacctgaccgtactcacggcaaaaattcaagccctgctgcgccggagctacgatttttccgcacctgccaacctgcttccctgcggccaggcctttctgaacaccgatgaggaagccctgctgcagggggatatcaaaattccactgagccgcaacgagtaccgcattctgcgcctgctgctggaacaacacgggcacatcgtctcacgggatgcaatcatgacggccctgtgggaatcagacagcttcgtagatgaaaatacgctgagcgtcaacgtcaaccggctgcgcaggaagctggaaagcgccggcgtgcgcgacctgatccaaaccagaaagggcgtggggtatcttgtggaataaaacgtcgctgcgcagtttcctgcgccggcagaaaaaaagcatcgccctgcagctgggctgcctggcgctttttgctctggttttcttcctttaccgcatgccaatggacgctctgctttatgcgctgagtctgtgcgccgtgctgctggcactcgctctgtgcatttcttttgtccgctatctgcgcaagagccgtgcacttgccgcgcttcgttcctgtgtggaaacctcggctttctctcttcccgaaccggatgacgctctggaggcagactatcaggcccttctccaaaaaatctgcgcccatcgcacgcgtttagccgcagaaaatgaaaaccgctaccacgatctgacggattactttaccctttgggttcatcagattaaaacgcccatcgccgccatgcagcttctgctgcaggcagaacacggccagcgcagccgggaactgtcggcggagctgttcaaaatcgagcaatatgtgggaatggttttgacctatctgcacctgggcaacgatgacaccgactatttgttccgccgctgtcccctggacgaaatcgttcgcgcctgcgcacgcaaatacgccaaactgttcattctcaaaaagatctccctctcttttcagcccacgggcatgaccgtgttgacggatgaaaaatggctctctttcgtgatcgagcagcttctgtccaacgcgctgaaatacacgcatcccggcggctgcatccggattctcaaagacggcagctgcctggtgattgccgacaacggcatcggcatccgcagtgaggatctgccgcgcgtatttgaaaaaggattcaccggctgcaacggccgcaacgataaaaaatccaccgggatcgggctgtacctgtgcaaaaaaatcaccggccgcctgggccatgacctgaccatttcctcggttcccggaaccggcacccgggtttacctccatctctccggcggaccggccgttgcggaataaaggagaaaaagctggtgcagatgcaaaaaagcaagcacgcgctgggatcagcgcgtgcttgcctgcgtatccagccggacatcacatcaatgcagttctccaactgcgggaaggatatccagtgtaagtatatcgcccagcagccgcagcgtataaaaagtattttccacctgccaccgccaggattgtgtgcccgattcttcagacacaggcatttcctccatcgacacgccggtcgcatcactgatatagccttgccatgccgcgagctgttcctcgctcaccgcctgcgtgccatccgaaatccaaattgacacactgctgaccagattgtcggcatcacaggtagtatagatcgtcaccggtgcatcatacagttccgccgtataaatccggccaatataggtggattggtcttctgtccagttctcctctcctccgccgaacagatccttgacatcggcatccgcctgtccgatcagatccgccgcagcgctgagcgtttcctgtccgggtttatcctgttcctgcccggcacagcctgccagcagacccatactcaacaatccggcgcagagtataatccaatacttcttcatggaaattcctccttttacaaaacagaccaattggcttgtttttatgctaccccaaataaaatgctccgtcaaccccttccttgaagttgttccgtattgttgctatactgtaatcgaaatatgataaaagtgtaatcattgtaacaggagaaatcgtttatgaagcagagcgaaaaaaatcagaaaagccgagcgctgattcttacccatgctttcaccgaatttgccagccacggc

SEQ ID NO: 1330 - DNA, 1952 bp, Unknown
  16S sequences of unknown bacteria
gctttaaagccccgcctcacgcaccccgcggcgtgattttctcccgcttaaaaaccagccgccgcagggttgcggcggtacattttttgcccttttttaaaaattcctgaaaatcatttgaaagatcagctcaaaatggcgtttttcgatcagcagataggcgaaattaaaagaaaaatcgccgatgaccgctatccataacaggacgtttaaaaacaccgcggctttcttcggcaaacgggataccgctttgtagagcgggtgccataacgtagacatgaagagagtgatgagaaatccccaaatgagcgaaaaccacagacatacatatcccttatagttaaaggaaaaacggcggtagctccaaagccggacgcccagcgcgtcgaacgcgaacccgaacaccagctcgaacagcgtcgcaaacgcggcggtcaacagaaaatagagcacgtagcgcaaaaaaattttctgtccctttttcagggccgttctctcgacggcgtttgccaaaatacccctttgcggcgtgcccagcatcaaaaatgtcaggcacagcggcgtaccgtagatgacgcagaaaggcaaagtcaaaaatcctctattgtaaaaacgcgtaaagccggaggaacaaaaaaccacttccatacaccagccaagaaaggaaatggtaaaaaacatcagcgacaccgaggaaagctttttcctctccctaagcacctgttcggaaatatcgccctgatgattccgttctttttccgcaccgttttccgtctgttccataaattccccctttcctatacaatttccgcaatttatgggaatttatgtgaacttacgacaaaatcagtttgcgaaaagccaatagactttttcctccgccgcctcgcagcctaatttccgctgtaaactcagggagttaaaattatcctctatgatatgcgcataagggattcgtccctcaccgaggattttttcgatcataaaactttccagctccgcgccgtaaccgcgtcggcgatactcgggaaagacgagcagcagccccatgctcccttcgggatgtctgccgatgaatcccacgaacgcctctcctctatcctgtttcaaaaaagcgcagaaaattttacccgcggcgcacagtttttcgatattttcgggagattcgagatgatattcccgtttgataatctcgatctgttcccgtaagggaagccgaaattcaagaccgcattttctctcgacaacggatttttccgtatacgatacctgataacacgccgtttcgcctttgaggtgcagcgtttcgtaagcggcttcgcgagccgtttcgccgtgcaccaccaataatccgctcctctctttccactttttctcgtccaacgccttcaaaacggcgcaagcgctctccttttcctccgccgcgaacatatggataccgctcgacttttcatagagcagaacgccgttttccgccgcccataggatttgcgaggctcctttttgtacgcattcccacatatcgacgtaaagatttttatccctcgaaaaataggcgagggcgcgaaattcctttaccgcttctttttccatcgcctttacgaattcgtcctttccgttgcagtagctttcgaggtcggcgggaaacctagcggcgagggattctttcaaggcgccgtattcgtctgccttgtctttatgacggcggagataatcgcgcacagccaaatgccgcgaaacgtccgcctcgttcgcctcttcgaaaagatggaggtgatgcgtgcgcttctctttgcctttgcggaaatatctcctgcccgcgatgccgaattctcccatacattcgtaaccgagcgcctccaaagccgcgttttgctcctccgccttacgaatatcctttaccacgggcatgatgtctataatgggcttcgcggcaagccccgccacggcgg

SEQ ID NO: 1331 - DNA, 3993 bp, Unknown
  16S sequences of unknown bacteria
aggcgatatgatcggtattgatctcgatcgttcgggctacagaagtgttcatgtctcatcctttcttttatcatagcatattcagtcaaacatgcatacaagggcagaaatctctatgtgtcaccccactttgcgttattctgtccccttatttatttcatacggtcaagatctgaaatacactaaccaagatgaaaaaaagatgatctgtcaatcagggataaggggaaatcaggacgatcatccgagagctgcagatccattccgtcatcgttgggaaaaacttgatgatggcggaatccgcgtattgacagaaattctcggggggggggtatgatatttaaagtaaccatgatatgatagccgcaaagggatatggaggataaatcaatggaattagtgatcgaacatctggaaaagcactttgaagaaaaacaagtgctcaaggatatcagctttgtctttcccaaaggaaagatctatggcctgctgggacgaaacggcgctggcaagaccacgctgttcaattgcctgaatcaggatctgccggtggattccggccgtttctgtctgcgcgaggccggtacagagcgagagctgcagatggaggatgtgggctatgtgctttccacaccggccgtgccggaatttctgacggcccgcgaatttctgaagtttttcatcgagatcaatgaaaagcacattgcggatgtaaaaagcatcgatgaatactttgactacatcaacatggaaccggaagaccgcgaccggctgctgaaagacttttctcatggcatgaagaacaagatgcagatgctcatcaacatcattgccaggccgaatgtactgttgctggatgagccgctgacctctttggatgtggtcgttgccgaagagatgaagggcatcctgcgcgcattgaaggaagaccacatcctgatcttgtcgacccacatcatggaacttgcgcttgatctttgcgatgagatcgtgatcctcaatcacggcgtgctgcaggaagtttccgcggcgggactgaatgaggatgaattcagggaaaagatcctggatgccctgcgggaggaatgagcatgttttcagtatttgcgacctcatatcgtctgcggatcacttatcgggtcaattcgatcatttattcgctgaagcagctgccgctggtgcgccgcctgcttccttcggctttgtatcgcagccgcggcctgaaacgctttgcctgtgtcattgccatcctgatggagatcctgggcatgttcctgcaaaagggggcatatctgggcatcgtggtgctggcgccagtcacgcagctgctgccgcctgacacatggaccgccggtttcctgcacatcctgctgtttctgagcatcgccggcgcggtatccaataatcgcttgtttgatccgacgcgggataaatattatgccatcatcctgatgcgcatggatgcccggcgtttcaccgtcagcaactatatctatgagctgctcaagctcttcatcggctttgcggccttcctgggcgtctgcgcaggcctgggcatcctgccctggtggtgcgtcatcctctgcccgctgctgccttgtgcgctgaagtgcatatccggctggtattctttgcgccaatatgaaaaaaagcggatcatccgcaatgagaacagtccggtgaaagcagtctggggcacgatcaccttatgctgggcgctggcatttgcgccgctggcatggtcatggacgctgccggtgatcggcttctggctgtttgcggcgctgagccttttgctggcggccttcgcgcttgtctatatctgccggttccgcctgtatcgtccgatgtatcaggtgctgttgagtcaagggacctctgcggtccagctgaatttgaagaagatcacggatgagaattatcgcaaatccatcagcgccgatacggccatcaccagtcacaaaaaaggctatgcgtatttcaatgagctgtttgtgaagcggcatcagaagctgctgcttcgctatgccaagagaatgacgctgatcacgttggcgctggtcgctgccgctgcggctgccttggtcgcgtttccgcaagccagggaggtcgccaatgaactggtcctgatgttccttccttatttcatcttcctcatctattcattcaattccggaaagagcgtagtgcaggcgatgttccgcaactgtgaccgcagcatgctcacgtattcattttaccgtcgcccagatgtgatcctttctttgttcaagctgcgcctgcgcgacgtgatcctcatcaatctgatgccggcctcggtgcttgcgctgggcctgccgctgctcatctggctcagcggcggaaccgacaatatcctggtctatccgatcgtcctgctctgcatcatggcgacgagcgcgttcttttcgatccattatctgacttgttactatctgcttcagccttacaatgaagctactgaaacaaaaagcagcacctatggtgtcgtgatgggcatcacttacctggtgtgctttgcgttcatttatctgcggatggatccgatcgtctttggcggtgtcatgatcatcttttccgtgctgtatgcggtgatcgcgcgcatcctggtctatcggctggcgccttcgaccttccggctgcgccgctgaaacagcgcatcgtataccgcgcgggcaagcggggcggcggcgaatacgttccagaaaaacgccatcgggaaatttttcagcaccgtgccgatccagatgaccggcaggtcgatgaatgatcgctgggcgaggatgacattgaacaggatggaggcggtcaggctcatcgccgggcacatgaacgctacggtgccggcctgccgcatcagctgccggaaataaggcggatcatcctgtgcggtatgccgcaccatgaagcctgcgccgatcttgttgccgaacagttcggaaatgatgaagacgatgatgcccatataggatgcttcctttaaggcgtcgaggatgacctcgtaagagagggcgctgaatccgcccgccagctgcgtcacgccgctgttgatggccgtgttgtagatttccatgccgatggccatgaaataggacatcagcaggccgaagatgatctgttgaacagttgtctttggcatttgcattcctcctcaagcgcataaagggcgtatgaccacgatgtcatacgccctgctgatcagctacacgctgattaggttttatcacagttcgagcggtttgtcaaagctgatcatgatgtgctttgcctggcggatttgactttttttgacagaacgcttatacttgtggcggaaaacatacggggaggccacgttactggcctgagagtaagcaggagtgtttagacccattgaacctgtcgggtaatgccgtcgtagggatcatatttgtgatgaagggccgtatctgacgcaaatatgatacggtcttttttgctgggaagggagcatgtgcgatgaagaaacgacacaactggggactgccgctgttgacggcactggtcacgctgggcatctgggaaggcgccgtaaggctgtttgacatcagcctctatatccttccggcccccagcgatgtcctgatggccgtgatcgaaaactttcaggaactgatgtaccatgcgtccgtcacgctgagcgaagcgctgatcggactggggctgtcggccctgctggccatcatcctggcgatcctgatggatctgtcccgcaccttcaagcgctgcatctttccgcacctggtcgttacccagaccgtgccggtgatggtgctcgggccgctgttcgccatctggctgggcttcggcatggcacccaagatcctgatggtcatcttcatgtgcttctttccgatcgccatttccttcacggaggcgctcgcacagtgcgatgaggaacagatcagcctgctgaagagctttggggcatcgaccgttcagatctatcggatgggg

SEQ ID NO: 1332 - DNA, 24423 bp, Unknown
  16S sequences of unknown bacteria
tcaaatccaagatcgtctttcagttccttgaaaatattaacaagtgacggaggcggttctatgccctttcggacggaaaaacacattccgtgcgcctgccccggaccgtgatacggatcctgtccgagaatgactgcacggacagccgaatacggtgtcgctttcagagcattgaaaatatcgttcatcggaggatatatcgtccgtgaaaaatattcccgtttcagaaattgacgaagattcagatagtattcgcttttgaactcatctttgagtatctcgtcccaatcgtttccgatattaaccacgttttttttcctttccgcctctgtaaacggcgctgtaaatcaccgcaacggataccccgcccacgatgtttccgagcgtcacgggcaacagattgtgaataaagaagttcttccatgaaagcattccgaggttgaccacggatgccgcctgttcaagtccgagagaggactgcgcaaatattcccgcgggaatatagtacatattggcaatactgtgttcaaagccgcagattacaaagaccattatcgggaagaaaagtcccgcgattttgccgcctaccgaatcagccccgaagcttatccagaccgcaacgcatacaagaacattgcatagtatgccgagaacaaacgcctgtccgaaaccgagcgcacatttgtttgcggcggcggtaacggtcgtcagagcaacttttccgccgaacattccgaactgtccggaaagagacaaaagtgccgcggcaagcacgctgcccacatagttgccaacatatacgaacagccagtttttaagcatatgacggagttttattcttttgtcaagaagagcgaccgccataaggctgttgcccgtaaaaagttcgcttcccgcgcacagaaccattgtaagtcccgcagggaaaacgcagccgctgattatctttgccacacttgcgtttgatataagcgcggaggctgtattcgacgccgcacccgcaagcgcaatgaaaaaacccgcaagaaaaccgagtgctatcatacggggaatgccgagtttggattttaccacgccgacatccgaggtgaatgcggcaatttctgcgggagatttcatattttatacttccttgaatatttatttaatacattatagcataacacaaagcatttttcaataaggaaaaaatgataaaaatgtatcaaacatctttgcaaagcatacaatcaaacgaagaggtgggtatatgaacaaaggactgagtaaaaaactatttcgccgcacggtatgtgtgctgttgtgtgtaagtattatatgtctgctcgcgctgaaaaacacgacatttttcgcaaaagagccgaaacaggcaaccgtggttattttaatgtaccattccctgctcaaagaccccgcaagacaaggcaaatacgtcgtatctcccgaccttttcgaaaatgacctgcgttggctgaaagaaaacggttattcgtttgtcggaatgcaggacttgataaactttgtctattcgggaagttctctgcccgaaaaaagcgttgttataacgttcgacgacggttattacaacaactatctttacgcatatcccctgctcgaaaaatatgacgcaaaaatgctcatatccttcatcggaaaatatacggacttatataacgacgaaaagccgaacgcatattattcgcacataacgtgggatatgataaacgaaatgctttcaagcgggcgtgtggagataggcaatcatacatactcaatgcacacgaacggacagcgaaaaggttcaaaaaagatcagcggagaaacagacgaacattataccaagattttaattgaagacatcggaaaattacaagatgaaacttatgaacatacgggcatacatcccgccgtttatacatacccgttcggagcaatcagttcagcgtcgtttgacgtgctggcggatatgggatttcttgcaacgctgtcctgtgcggaaagggcaagcgtgataacgcagggagagccgaacagtctgcgctgtctcggacgttttctacgccctgcggcaatgtcaagtgcgaacttctttgaaaataagataaagatagagggattatacgaatgaaacttccgaaactgccaaagccgaaaaagatactgaaaatactaaaagggctgaaaccgaacggaatcgaagcactgatagcctgcgggcttgtggttgcaaccgccgttgccgtggctgttatcccaaagaacagaaatgataccgtgcaggcttcgagcgaaataaccgattgggggctcagtttttcaaacggaaagaacaaagtcccccgcggaaacgtttcgcaaaaggaacttgacaaatacggggcattttactgtgacgacagagatgaaaaggtcatatacctgacctttgacgcaggatatgaaaacggaaatgccggaaagatacttgacgttcttaaaaaagagcagattcccgccgcatttttccttgttggcaactatttcaaaacacagcccgaacttgtgcgcagaatggttgaagaggggcatatcgtaggcaatcacacaacaacgcaccccgatatgagcaagataaaagaacttgccgacttccgaaaggagcttgaacagaccgaaaatctttatcgggaaacaacgggcaaagatatgccgaagttttatcgtccgccgcagggaaaattcagcgtgtcaaaccttcaacaggcgcagatgctcggttacaccacggttttttggtcgctcgcctacgccgattgggacaatacaaaacagccgacacgagaatatgcgctcgaaaaactcaattcgcgaatacataacggcgcaatagttctgctgcatctgacatcgaaaaccaacgccgaaatacttgaagaacttatacaagggtggaaagcgcaaggatatacgttcaaaccgttaacagatctgaaaaaataacgcaaaaacgcggaggtaaatcctccgcgtttttgcgttatttattgtttttatgtaaataagcaagcgccaaaagaactgtctttgcgtccgttatcaagcctgcgtcaatgcgtcgtataacttcgtccaccgtaacgcgctcaaccgtgagaaactcaccgtcatcgagatgctgtgttcccgaaagtttgacctttgcaaaatacaggtgaattatttcctcgcaataagcagggctgacgggcatgggcataagataacaaatatcttcgcaaactgcgcctatttcctcttcacactcgcggacggcacatttttctcccgtttcaccgggatcgacttttcctgcggggaattcttccgtatatctgcctattccgtgcctgtactgacggacaagatatgtatacccctcgtcatctacgggcataacgcaagccgcctcgcaatgctcaacgacttcacgcagacatttgcgccctttttcctctatcgtgtcaacgcggacgccgatgatttttcccgaatattttttctcgctcgataaaacttttatatcttccataaccttagcctttcgtcagttaagttccgctatcgcggaatttgctcttccgcgcaacagttcggaagcgataaacaaaacaaatattcgaatacagcggtggagcaagtcttttgcttccgggttcggcgcgtcatagtcggctatggtctcggaaacggttttgtctatatcgcttcccggttcgagttctccgtattcgacacgttcggatgcgtccacaaaatattcgtaaaacaacgcatcggaaacgataccctcacgggaaccgtcaacgctgccgcagaccgtattcagcacggtggctatattctccatgctcgtcacgggacgcagcgcattgattatcagaatacgcgcaagatgatcgaccgaatactttttatgtacgggacgtttgacccagccgcggtgaacccaattctgcaatgtgggagtatcaagccccgttatatttctgacggtcatcagcataatgccgtcgtttttctcaaaaacatcctcaaaaagttcttttgcggagcgtccgtttttttcggtaacggttccggggaaatattgaagcatttcttcctccgaatgtatgttttttgtgtttactgttcagtaaatattgtagcacacattcggaggaaagtcaagtcaaaaacggttgtttttctttttccgttatttcaatatctcttcggggtcgatataggcgccgtcgcgtataaccgcaaaatgaagatgaactccgccgtcggattccgcaaccgccgagttccccgtcctcccgataagatctccgcagagaacgttctgtccccttataacggcaacttcgtcgtcaagggattgataaacggttcttgtgccgtcggcgtgttctacaacaacggtcttgcccataactccgtcggtataaacgtcctcgactattccgtcagccgccgcagttacgttcatcggtgtttcggttctgtaatcgacgccctgatgaagccgccaatctttcattatttcggagaatacgggaaccgaacccgaaaacggctgcgaaaccgtacattcgacgggagatttgaacagctgtgttttcgtaacgttctccgcggaagtcggttcgggttcgggcttgttcggagaaagcgttattctcggcgtgtcggagttattttgcaccaagttcatatcgtccgcagtttctctgccgcgaagtttgaaatatgcaatgcagacaacacccgcaagcaaaaccacaaccgcgatataaattcctctgcggcgcagaaaagaaaaaaacgcaccgcttttttttctgtaaaaatcagacatattttcctccgttttgttttattcgagaaaagttttcccctacggagtttttttattcagtctgttaaaaagagacagaaatatatggcaaatatgcacaatactgtcacacataattcgtacatattttaccgagtcggtattgacaaaaaataaacaatgtgatagaataaagacataaataatatgaaagaagtggacatttccatgctgtacattattgataccgccaatgttgaccaaatcagaagatgcaacgagttcttccccatcgcgggcgttaccacgaacccgaccatcatttccaaagaaaaaagagattttgttgaacttatcaaagagataagatccataatcggacccgacaaaatgctccatgttcagacaacgcaggagaagtgcagtgatataatcgcggaagcggaagcacttcgcgacattgcgggcgacaatttttatgtaaaaattcccataggtcccgaaggacttaaagcaacgatggctcttgcaaagagaggcataaatgttaccgttaccgcaatctttacacagcagcaggctatgcttgcggcaagcgcgggcgcaaaattcgttgctccttatgtcaacagacttgataacctcctcagcgacggtattcacgttgttgaagagatcgaagaaatgttcagaacaaaccatgttgagacaaaagttcttgcggcaagtttcaagaccatcgagcaggttcataagatagctatggtcggcggcgacgcagtcacaatcaaccccgaacttttcgatcaccttatctatcacccgctcacccagtacgcgatagacgatttcaactgcgattggaagagcgtttacggagacaagaagattctcgatttcatcaacgaatacgagggcaaacaataatttacagacaaaatatcacggcgcagtcggtttcgactgcgccgtatttttattctgtttttaattcaaaagcaactcagcggttgctcaaagccgcaccgtaagccgttgcgtattccgaaaattcgggaacatggaaatgaacgtcatgcagatcttcaacctgtttgcacagttctcttatattcggaaatttcgaaagatttcctataagcactatatctttaagcccgacggtctgcgcggcaaatacgctcatcatacccacggtctgaaaaaccatgttcacaagtcccgccgcgatatcttcttttgtggaaaagtccgtaacctttccgaagttggcggctgtgacttttgacggcatatatccgtcttccgtcttcgaaagttcgccgacatagaggtcaactttgtcaaggtcacctttcagcgccatttccacaatgctttcataattacgaacatcaagaagttttgagccgagaccgagcaaagtaccgccgccgacgcccgtaccgcccatgtggcggttaacgccgttgcccgcttcgacaaacgcagtgcccgttcccatacttacgattatggcatggtcaagccccgacatggcaagtcctccgagacctatggacgtgaactcgttgactttatcggtgggtataccgtaaagtccttcacgaatatacgttgagccgacgccagtgacctttatcttatctatatcttcaagcgtcaatccctcttcgctcagatacttgccgaaagcgccgtaaaccgaagtcagcgggtcggtcgcttttacctgcatgggagcaagcattttaccgttgctgacgcaaacgatttttgtggtgcttccgccgacatctatgccgattacgttcatcagaatcagccttcctttttacgaatatttataagacgcagtataatggggctgcaaaccatattgacgccgagttcaatcaggaaattgataccgacaaaagacaaaatgatataagaacctacattgggactgcctgccgcttccgcacaagatgtgatagtgtctataaagaacagtttgcaaccgagcagaaatacacctgtgtttacaatgggagcaacaatggcagagcagaaaacaccgaaatagccgttgacttttgatgcgagtttatatacaagccccgccgcaagtcccgcaagcgttccctttgcaagaacggttatgatggttccgggaatattaacggtcaaaaacgccgcagcatctccggaaagaagcacggtaatgccgaatgcaaagccgagccaagaacttgttacgggtccgcacagcgccgcgcctataactatggggaaaagcgaaagtgtaatggaaaaaggaaggaacggtcttgaaacaagagcaactatctgcaaaacgaccgtgattgcggtcagaatagcgaccatcgtcagattcttggtaaaactttttccgtttttatttgtgtttgccataatatttcttcctcataaatgtgtttatttgagaaaattgaatatcattcgtatttctattatcttttcctgaattatcgtttttcttgcaaaaaaagactgtctcacgcgtttaggcatgagacagataaccttttcgacttgattacgcgttgaactgagcggcaagcttcgcttttttgttggcagcggtattcttgtgcatgataccctttgcagccgctttatcaatgatcttgtatgcttcgttgagagaagccgcgtcctttgcctcaatgccggcgttaagttttttaagattcgttctcatcgcagacttgaaaaccttgttctgcatattcttagagttggtaaccttaactcttttttttgcggatttaatgttaggcatgaatgtcacctcctgaaaaaaacacttttgtactgacttattatatcagaatattgcttaaattgcaatacaaaaaataaaatttccgttttttttcactatttcgctatgacaagtttttggtcgccgtttttcacccaaccgagtttgcgcattgccaagtctatcgagacggtcagaacagcaggaagaactatgcatataagcagaagtcccagccaatcaaaccatgttgcggaatagcccgtggagacccaaccctgccatacgccgataggccccaccataccgcaggtgcccatacccgaggaaatcgcgggaccgttcatttccattttgaaaaccattgtggaaatgggacctgttatcgcggaggcaagcgtcggagctatccatatacggggatttttcattatgttgcctatctgcaacatacttgttccgagtccctgcgcgacaagtcctcctaccttgttttcgcggaaacttgcgcacgcaaagccgaccatctgcgcacagcagcccgcaacagcagcaccgcccgcaagtcccgtaagaccgatcgaagcgcatattgccgcgctgctgacgggcagcgtaagaagtatacccacgataacggaaacgatgatacccataacaaacgggtgctgtgtagtcgcccacattataagtttgccgaattcattcgcaaagctgcctatcgggggcgcaatgaatatggcaagcagtccgccgacaagaaccgtaacggcgggcgtgaggattatatctatctttgtctttcccgcaagtagatttgcgagaactgcggctacgagagcgataacaaaaactgcaagaggtccgcccgctccgcctttgacgtttgctgcatatccgacagcagccattgagaatataacgagcggctgacatttaagggaatatgctatggcgaccgccattgcggggcctgccattgcggaagcaaaaccgccgatgtcgttaagtatgctccaaccggtaagtgttcccagagtattgattatcgttcctatcagaagcgaggcaaaaagtccctgtgccatcgccgccatggggttgataaaatacttgttgaaaaagtttttcatactatctctccccttgttttccgcttgcgaaaaaacaatataaatattgtttttatgataacatatcgcacaaaaaaatgcaaccgttttggtataaaaatcacagaaaattgccaatacttgttatgaggtgattttaatgcagatacgcacggatatggcggcggaactcacaaaagaatgcggttctgaccaaacaagcggaataagacaaaacgaatacgaaaaaaacggagtaaaagtcagcgtcacggacattttatcgaacagcgcggaagaaaaaacgggaaaagaaaaaggtcggtatgtcacgatatctttcggtaaagacgattacgacgatacaagcgtggaaaacaccgtaaacgcggcgaaagaagaatttgaagagatattcggaaacagaaaatccacacttgtggtagggctcggcaaccccgcgcttacagcagatgcgataggtcctaaaacaacagaaaaacttgtggtcacacgccatctgaaaggtcatgaggggttcgattcgctcggtctcggagaagtctgccagataacgccgaacgtgttgggaaagacgggcatagagacctcggaacttgtaaaagccgttgtaagtgctgttcaccccgatgcgattgttgtcatcgacgcgcttgccgcccgcgaaaaatcaaggctgtgcaaaaacatacagttgagcaacacgggcattcgtccggggtcgggggtcggaaatcaccgtaacgcgcttgacaggcaaacgctcggtattcccgtattttcgataggcattccgacagtgattgacctgtctgacgaaaaaaacggcgggcttatagttaccccgaaagacattgaccttgccgttgaacgctgttctgacgtaatctcgggctttttgaacaaagtctttcacccgaacgctgaaaaagaaacgctttccgtgttcttaaactgctgaaaggcgcatatacttttctgaggtgttaaaaatgcggaagtttttcagcgttatgagaaatccgaaaataaatgttgcggcgaccgccgtctgtttttccgcgctgtcagcgcttctgcttgcgacgtcgggtatggatatagtcgcggacacgggaatgaagataaaagaactttcggcaaacgtttcggctgactataaaaagtatgaagggactgacgaaaatgcgaacaggttggacaggtacctctcggagaagacagatgaaaatgtcccgtggctcgaaggcggctatgttacggaggaagatgaaaaaaaaggcgcgtatccgatagtcgagagattttcaaaaggtgcggattacatggatcacgcagacggtatatatgtcataaacgaacatgatatagactttgacatctccgaacttctgaaaaaaacgccgcccgccataccgaaaaaaggcgttgatgaaccgcagatactgatagtccacactcataccacggaatgttaccattcgggaagcgcggacagttacgataaaagcgaaactttccgcacgcaggatgcggcggaaaacatgataaatataggcaatatcatcgaacaacggttgacttcggcgggctattccgtcatacactcaacaaagatacatgacctcgattacaatcattcttattcgagttcttatgcggatataaacacatataagcaaaaatatccgtcaataaaagtggttttggacgtacacagggactgtctgcttgcaagcgacgggacaagatataagacggtcacaacactgaacggagaaacgagcgcgcaactgatgtttctggtcggtgcgggaaatgcgacatatcggttccctacatggcaaaacaatttcgggctggcaatacatttgcaggacacggcgaacaaactgtacccgacactgatgagaccgatgatagtcagcaacagcagattcaaccaacatctgacggacggctcaatgctgcttgaagtcggttcggacgcaaacacaaaagaggaagcggagcgtgccgcagactattttgcggacgtcatgataacctattttgacggagaacaataatatacaacgtataaaagcggcttgccacggatatttgcgtgacaagccgcttctgcttggaacactaattttttctgcaagaaaacagagccgttccgacgcatatcccgacacagacgccgagacttgcaaacaacccgaagttatccgcaaaatacccgacgctttcaagcatcgtgtattgagaagttttatttgatttgacagaaaatacagaaacttcacgttcgtgaattcattgtttgtcagcttcgttttctatcggtttgagaagacaatgcacaacatatctgccggaagcgcggctgtactcgcaagtcgaaagcgtcagtattttgtcccccgcagcatattcaacgtcacaggaaaaatcggaacgggctttcattttgttaaaatacgccgtcatatcatcgtcgcggtcaaactcacggctgtaactttccttatcggtgtccgtggttttgtaagcggagaaaacttcgagacggtagttcacgtcctttgtaaacagatatatgtacgggtgttcctcataatatccgttcttcgaataattgagcaggcacgcgaacatggtcccgtttttcatattatgtccgaatatgaacgaacgggcgtccgaaaggtcttttgaatttgctgcgtcaagaaagagtgtgccgctgttgttgtatctgccgtctatcaggtgacgcagatactgctcattgttttttcctttgacaacgggataattgaggggtgtaccatcgcaatatatccatgcaaaaatatctttgttctgctttgcgagttcgtcaaagtctatgtcaacggtcacttccgacttattgtcatcggaagcgggaacctcgatttttttaacgacgagatcagcaacggcttgaaacgcgtccttgctttcattgtattcattctgaatgattatgatattatacacgcaaaatccgataatgccgagaagcacagccataatgagaacaaaaactatccgcagaccttttccgctcttttttacagttttgtctttcatactttatctcccgtatcaatctttgcgaagcgaacgcaagagagcaatttcttttgcgtagccgtcaagttcgttcggcgtttcaagacagaatacacagtttcggagcgcggggtgatttattattctttcaaacgctttttcgcctatatgaccgagccctatcttttcgtgtctgtccttatggctctcaaagccgaatttggagtcgttcagatgtacggctttcaggcggtcaagtccgacgatgcggtcaaactcttcaagaacgccgtcaaggtcgttgactatatcatatccgccgtcgtaaacatggcaggtatcaaggcaaacaccgagcaattcgggatgtttaacgccgtctgtgatacgtttcaattcctcgaattttccgcctatctcactgcccttgcccgccatcgtttcaagcagaaccgtggtcttctgttcaggaaaaagaacttcgtccaaaaggtcgcagataagttttataccaacgtccacgccttgtccgacatggcttcccggatgaaagttataataattacccggaactttttccattcgcttcaaatcgtccgcaaatgtaatacgggcgaactcgcgtattttttcgtccgcggagcacgggttgagcgtatacggcgaatgcgcaactatcttccctatcgaatattccgaacaaagacgatgaaattcggcgatgtcctcgtccgaaatatcttttgcctttccgccgcgcggattgcgggtaaagaactgaaacgtgtttgcgtttatcgaatgagcggtctttgccattgcggaaaacccacccgaactcgaaagatgacagcctatataaaaatcggtcatattattctccgtctttttccacttcgccgtggacgattattttaccctcggaatcgagaagatttttcatcgctttctttgttctgacctcgctgacgatatttgtcacgccgacaaccatcatcagtatgcccgaaagaacgaaaactgcgtttttaaacagttcgggaacgacggcaacgattatacccgccgcgataagaagaacggaaataacgacttcgaaccatcccgaatgctttttcaggcgaagaagatcaatgccctgctgaaagcggactataccgaaaacggctatgccgaagccgataaccatgcggataatgcccacaaactcagccgctctgaaacagattataactcccgcacacagcgcaacaagtccgaaaacaagtccgaagccgttgcccacaggcgttttgatataaattatcacggaaataagcgcatacataaaaagcgcacccgcgataacgtaacttatggcaacttccctgataatgttcggattgacggtaaacaaaaagccgaatgccacaaacgcaagagaggcgataagcatgggcttattcagagatctgaaaaaatctttcatattcaaactcctttgtcagttatcttttattgatattatatttattatataccattttttcatttttttcaataccccgcacaagaaaaaacgaccctccgccaaaacagcgaagagtcgttcacaggaaaataaggaaatatgaaaaaaacaaacaagcaattttatctgtcgaaacctccgccgccgggacgtccgccgttcggtctgtctccgccgttgggagcgccgccgccgtagataaggcttgtcaaagtaaatgtttcggaaaaatctcccgcagaaacggtatatgtacctccctgcttcattgcgggacaacttataacaacggttgaatacgctttttcgggttcgtattcggcaagtactgtgccgttttcatccgtcaatgtaactttatctgacgcattgcggttgccaacggaaataagcgccgagccctgtgttgaagatgttccgaagttctgcgccatgccgcttgaaccaacggcaataacagtacctccgcttataattccgctgccgtcaaaatcaagcgcgccgtcaccgtttgaagtgggaccgctgacaaaaagattgccgcctgagactttgagagaaccgtttgaattgacgccgtcaccgtccgcattgacgtaaaacgttccgcccgtaattttgatataagaactgcttgacgcagacccgaaagcatcgccgccgcgaggacctccgaagccgctgttgtcattgccgcctgcggcgtttatgccgtcgtcggaagcggtcaggtcaagcgttcctccgtttatttcaacggtcaacccctcaacgccctcataacttttcaaaacagtcagttcaccgccgtttataacggttgcgttatcggcatgaacgccgtcgtcgggcaaagttatgtcaaccgtttttgccgcattttgcgtgccgtctgttttatccgaaacagcgccgcacgcaccgagcaatagggcgaccgataaaaacagcggaagaacatatccgatttttctcattttacaactccccgctttcggtctgctgttttgaaacgctgatttcaaggttaccgtttctgacacgaagtttgtctatcatttctttgacagatgcgtcttttttcattttgatatcgtaagtcaaccgaaaaagactgcccatattcgtggttttaactcccacaagttcgtatttgtccgtatatgaagaaagtatatcatcaaaaaccgactcgtaatcgagatcctcgggaatggttatcctcatggttttatactgtttcaaccgtttatccgttccgaatccgaaacgggaataaagcatggttataccgctcattacgaccgcaaacagcagcgtatacgcaatgtagcccatgcccgatataagtcccgccgccattgcgataaaaatggcacctatctcttttgccgtgcccggcgcggaacgaaaacgtacaaggctgaacgcgcccgcaaccgcaacacctgcgccgatattgccgttgaccatcattataacgacgcatacaactgcgggaagaagcgccagagtcgcaataaaactttttgtgtaacgagttctgtaagtatacgcaagcgccgtaattatgcctgcggcaagcgcgacggcgacgcaaatcaaaaaatcgcgaaccgaaacaacggttgtcagttccgaatcgaaaagtcctttgaatatatcagcaaacattttttatttctcttttttcggggaatatcatagtcctgtacgccgtgccgtatttcgagaacgacgttttgtaaatttcgttttcggaaagaagagatgtcatccaaagcggaatgcccgaatgtgtcttcaattccataagtacaagcccgttgccgagcagtttttcgccgccgacatcttttttcagagataaatccgtcgttcttgccgatatgttttcatcgaatgtgacgcggaaatcgcttccgtcaaccgcaaaaaacgcttcgcggtcataggatacgaatgcggacggaacaagcgaaccgtaaaagcgacgaaaatactctatttcggaaattatctgcgtttgttcttgcggcaattgtccgtcattgagccactttgcggctgtgttttcagaaagaacggttctgcgtttgtatacgacagagttatattttttcttcaactcaacaaacaccttttcgtcgtcggattcgacacgcttataacttctgacgcgaagtttttccttgtatacgggtttttcgttcgaacggcggataaggcgggagtccgctgtgtcgtaataaatgtttcttataacagaccgaccgtatttgtcgggcgccatatatttttccataccgttttttatgagttctttttgtttttccgttatgatatactttatctcatagcgttcaaatacggttcctcttcccattttacgagagttcctttcgttttattgattttattatacaaggtcttcttaaagcgaacttaaagagcgtaaaaaaactttcacgctctttaagtttcattttaaatgtataaaaatcattccgctttatgcgaatgtttcgagataagcgtccgctatcgcgttccaaagaacgggaccgacaagtccgtcgggagcaaatccgtattcgctttgaaacgcagaaacggcgcgttttgtttttgagccgaaatagcccgttacttccgttgcgggaatattcgggtcgaactgcgaaattctgacaaggtattcctgcaacaaccgaacataaggtccctcaaagccctcacgtaaaaaagtacccggaaaaagtgcggcttccccgctctggaacgtcggcggcgcggcggcgattatatcgttatatgcgtcgcgcaaagcgtttcttgttgccctgccgactatgccgtcctcggtcaagcccgaataacgctgaaacgcaagcaccgcattttccgttgcggagccgaaataaccgtcgatacttatattcgggatataatcgttataaagtcctatcgtcgaaagatagtattgcagaacttttacttcaagtccgctgtccccctcgcgcaaagtgtcggaaaacggcgtgaggacgtcattcagcgtcacgccctcggaatctatatccgcaaggcgtttgactgccgccgctgtgtaagcgattctgtaccatgtggattttccgacatacccgacgggttctattgagaatatccgctgaaacgcaagcaccgcctgctccgtttcaggtccgaatatgccgtcaggattttggattcgaggaatttcgggatagtttaccgctattcggttcaaccgtgtctgaacggcgtaaacgtcgttgccgagatctccgagacgtaacggcgaacccggataggacgggatatttacctttacgggagcattccgaactatctcgatatcgtctccgtaataatattgaagcatttcatacggtgtgtaacccctgtttgcaagcgttaccgtgccccattgagaaagtcctctgcaagtgacggtcgttccgttgcaatactgtgcaaaaagagggtcaatatttccctgtcggcgaatgtagtcattaaatatatcgtcaactatgtcgctgatgttgccgaatatctccctgtctttgaaaaaagcctgatcgtactgcgtgttgcttgtgatgtcgaaattatacccctgacttctgtaccattccgtatatattctgttcaacgtgaatgtaacgatagcgtagatatttgctcggagagccgcctcgggccaagtgggatagagttcgcttgaagcaacgttttttatgtagtcgataaagtcaaccgtcacgttctgcgcatttgacgacggagagccgagatgaacgacgaccgtctgcggaacataaggtgtcaaagatgccatatccgtcgcctcctttaaagcgggaatcccggggtatcggtcgtggtttttccgccgcccgcagcgggagccagcgaaacaggctgtatggaaagaatgccctcaaacacgggaacttcggttatgttcacctcgtcgtaacagggaaattcgacatcaatattgtatctgtaatacggtctgacattgccgccgggggtctgcgaaaggtcgcggctcggcgcggggacggacacaacaggcgtattgcccgaaatatccgtttcgtattcggcataaaagtctattccgttttccccgcttgaaatcgtgactttgcagcccggcagaggaactgcctgctgtgcggtcgagacggcgaccttgataaagccagtacccgttccctgtgcctgcggaggtctgtcgtcgcgttccgtttgagttgaagccgaacctctcgaacgcatattgtccccgcttccgttttccgacggcggaatgtcttcgatattcggcaacgggctcatgggaagcgtcggttcatcggcaagaggagaattttcgggaggaatattctcttcttcaagatgaactatctcttcgcgttgttcgcctgccgcggcttcgttttccgacaactcggaaacgtttgtttcatttccgatacggtgttcggaaactctgtctctttcaaactccgacggttcaatgcttcttgtattgcccgaatacgaaagcacggtcggtgcgtgagcacggtaataattcatcagttcattttcgtatttttccgacagtcgcttaaaatcatctttttcctgcgccataaatctacctccgaaaaacattttctctgaaacatactatgcaaaagggcaaaaaaatagcacaccgcaaaatgatatgcaccccaaaagtcagacacttatggaggtgcatatcaaaacggtgtgcgtttctttacacaatattattttcgtctcgggcgggtgcgcttattatctttgaaatcgctcaatttatcgcccgattctttcataaacttcgatatcatatcatcaaaagactgcggttcagggggccttttttccctcacaaacgcaggtgcaggaacggaacttctcggacacggctgttctttttttgccgtgtcgtccgctttttttatggaaagatttattctctttttgtcatcaatactgataactttgacacgaacttcctgccctaccgcaagaacctcgttaatgtctttgacaaacccggacgaaacctcggaaatgtgaacaagcccgctttctccgttttcaagtctgacgaacgcgccgaaaggcattatcttcgtcacttttccgacagcaatatctccgaccgcaactgccatatagggtttttcctccgaattccgacggttttttccgtcacttccttattatttccccgaatcgggagagacatagactttctcgtcacccttgccgtaaccgaggtctttttccgcaatatcctgcttaaaatccgcctcgttcgtggggtcgagaatttctttcatctcatcatttttcatattttgctctttgatcgcgttttcaacatccgcatttgatttttcgcttgcggaattagttgccatcatcgtaacaacgccgataacgagcgcaacaacgacgacaataagaaccgctctgacaacaaataccgatttcaacatcttttttacctcttatcggaaaaaaactatgttttcttttttttctttttaataaatcgttttataaggcttcccaacgtcagatactcgcaaagccagccgataaagaccgtcagcaacacgaataatctgatctcaccgtcacaaaaaacaaacgtaaacacaaaaaaggcaacggcggaaagcaaaaaatatacggaatccgaaaaaaacaaaagaagcgaagacggaggcttgaacaaccgcaaagcggaaagccccgtataaaccgctccgagaacgactccgaaaatcagggaataaagaaacagcagcaactgaaaagaattgtcaaaccccatcagccgaagaccttttcgcgaaaagatttttttcctctcgccctgcccgtatacgcaacactcgaaaaagaacccgttgcgctgacctcccctgtctcggaagaaaggtccgttacggtcatgcctttgcccctgacgcaaagatgacctaggcaggtatcaagttctatcctctcttcgttgaacgacgttatttcggtaacaccgctcaccgtcagtttttctctgttttcaagaacaacagaacttgcaatactttcttccgtcatacgcattcacctcgttaaaaggtatgacgcagacgaaagttttatgcgtttttctcatcaacaacacggtacatcgacgcggcgtccgatttcaatgcgtgttccgcaaccgaaacgacttcgacgctgacggtcttgttgccgaaagttatttcaatcacgtctccctctttaacatcgcaagcgggttttgcggtttttccgttgaccttgactcttgcaccgtccgaagcctcttttgcgacggtgcgccgtttgatgaggcgggagactttgagaaacttatccaatctcataagcaataccgataaaaagacagtttcctatgcacccaatgcggtgggtgcataggaattatcatacgttaataattgattactttacgctgtctttaagaacttttcctgctttgaatacgggaactttgcaagcgggaattttgatggtcgtttcggggttctggggatttcttccctctctctcggctctttcacgaacttcgaagcatccgaagcctactatctggaccttttcaccctttttaagagaatcggtgatgatgtcgagagttgcttcaactacctcagccgcttctttttttgcgataccgcacttttcagcaacggcagcaatcaaaccattcttgttcataacaaaaatctcctttgatatattaaaaattttttgtttcaaaaaatccctttatggttaatattttacactaaatctccgcatttttcaaggctttttctattttttcttcacaacttgcttgatttcgttcattgtgaccaattttaagatgaataatagtgcaatatacacaactgcccctgccgcaattgcgggaaaaagcgcgattttttgggatattccccacatatcaaacagtttaagagttccccatgccgcgccgaaacaggcaatgcccgcgaaaaacggtttgagcaaaatatctataaagttcggaacaaaaccgaggtacttcttgatatagatcaggttgatgatgaacatgaccgggtacgcgatgttcgtggcaacaggtgctccgtatattccgaggggttcaagaagaagaaatgtcagaatacttttgagaataacgccgacaacagttgaaacgaccgtctgatatgccttgcctatcgcttgaagcatataagttgttacgtttgtaaagccgacggcgacaagcgaaagcgaaagaatcgaaagcagttcgcccgcaagaggtgttgaccccgagaaaataagttgaatcgtcggctgcgaaacggcgctcagcccgagtgcacacgcaaacgcgattatagacgaatatttcagcgcaaggtttcccgtcctcttaacaagcacggaatctttttttgcaaacgccgccgaaatggacggaacaaggctgacgcctatcgttataatgaagaacgacggcagattgaatattgcggtagcctttgtcgaatatgcgccgtaagccgcctgtgcctcgacctcgggcataagcgtttttaggcggttgattatcacggtcgtatcgataagccccatcaactgcacggttatggaagaaagtgcaacgggcagcgctatcatcataaactctttcatcagagttttcggcggagttccctcgtccgccatgaattgagcgaccgttattctgtaatctttgtttctgaatatatagcgcaggaacatataaaggcacgaaccgaaagcgccgagagaaacgcccgctatcgcgcccgcaacgattatgtgtgcgggatagccgtttttctgcaaatatgccgcgataccgacgcccgcaacaagttttatcatcgcatcgacaaagttcgacacggaagtcggtttcatattattataaccttggaaaaatcctcggtaaaccgaaacgacgctgatgaaaaataccgacggcattatcagaagcatacaataatacgaatcgtcattgttgataaactgcgctatcggtcttgcaaatatcattccgagcgccgtaaccgcggctccgaacgcaacaaagatgaccgtaacgtattttatcagttgttttacgtctttatatttcccgagcgcaagagctttggagaccattgccgaaatggctatgggaatgcccgacgtcgcaagcgaaagcaggaacgtataaacggaatacgcggcgctgaaatggctcatcgcggcgtcgttttggtcaacaagtcccgttactccgacgcggaagacaagtcccgatatcttaacaagcaagcccgagaacgagagcataagagcgcctaaaaggaagccctctctttttcccgatttccccatatcacacgcctctcttttcaagaaaccgttttatcagtttaacagaatttgcaacggcaaattcaagaaaatcgccgaagctgccgaaggcggagtcgtccccgttgtccgaaacggctcgaacgacgccgaaaggaatgccgttgagcagacacgtctgacctatcgcggcactttccatttcaacgacggaagcaccgaattctttgcggatacgccgcgccgtcgcggttgagctgacgaactgatcgccggttgccacgataccctgcgtaacggttatcccgtcgatttcttttgcgcagtcaaaaagtttttcgcgaatcccgtcgtcgcatttcatcagcggagtttcgaagttgcacacctgcccttttgcgtagccgcgtttttcacaattgaagtcatgctgaacgacggatgtcgcaacaacgacgtcgcccggcttcagagacgggtctattccaccgccgacgccgaggttgataaccgcgtccggtttataaagaagaatgaccgattgcgcgcacaccgcggcgttgaccttaccctcgtagctgacagcgcagataatttcattttccttatatttgcccgaatatatatccgatccgccgatctttttcttttcggttttatcaagaatatctataacagcttcgatttcagaactcattgcgcttataattgcgattctcatttttgtttcccccataaatgcttttgctattataccataaatatatataaattgcaagcccgaaaatatgatatataattaagatgatgattttctgccgcttttttgatgtttttgatgtttcgatattgctttatccacgtttccgatacggactgccagcagcggtcggcttttttgcaaattttttccgtatatattgaaatactctctttgatgtgttaaaattatctgtaaaggaacagtcgttccgaaaagaaaaaaacggaggcatcgaagaatgacaacatttactcccgcagacatacttttacccgcagacggacttgaatacatgaaatgggcggttgtcgcctgcgaccagtatacgtccgacgaaaactattggaagaagacgaaaagacttgtcggagacgcgccctctaccctttcgatgactctgcccgaaatatatctttcaaaaaagggaaaagaaaaaagaatagcggaagttaacgcaaaaatgaaagaaaatctcgaaacgggcaaattcaaaacaattgtcaactgttttatttatcttgaacggacactttccgacggaaccgtgagaaaaggacttataggaaaactcgacctcgaagattattcctttgaaaagggagcaaaaacacttgtccgcgcgacggaaggaacggttctcgaacgcattccgccgagagttgagataagaaaaaacgcgccgatagagtttccgcacgtcatgatacttatcgacgaccccgaaagaacggttatagaaccgctttcgcaaaaacggtcggatttcgcacctctttatgactttgaccttatgaacagaagcggtcacgtcaagggttggatagttcgcaccgacgccgcgcaaaacgcgatgaaagcgcttgacaaactcggaagcaagacggttttcaacaaaaaatacggtttcaaaagccgcaagccgctcgtattcgcggtaggcgacggcaaccattctctggcaacggcaaaaacgtgctggaacgagataaagaaaacgcttacgcccgaagaagcggcggtacatcccgcaagatatgcgcttgtcgaagtggtgaacctgcacgacgattcgctgaaattcgagcccattcacagagttgttttcggcgcggacgctgcaaaaatgacggttgcttttgcaggattttttaaagatatttccatagcgccgaagccgccgaaagacatagcgggcagacaagttttcgtaatgctttcaaacggcaacaaacagtatgtttccgtcaccgacgaaaaatcaaatctcactgtcggctcgctgcaagcattccttgacgagtatctgaaaaaagaaacgggaatcgtcgattacattcacggtgacgaagaggtcgaaagactctgcaaaaatcccgaaaacataggatttctgcttccgactcccgcaaaagacgaactgttcaaaacagtcgtgcttgacggtgcgcttccgagaaagactttttccatgggacacgcgcaggacaaaagattctatctcgaaggaagaaaaatcagataaaagtctccgcaagctcgatggatcaacagagcattttacggagctatatcttggacagccctatgaacgggacgcaaatgactttgcgtatgagaaggtgaaggagcttttaggagattccccggagcttcaggagctccatgcattctggacaccgaaaaagccgatagcagatcaggtgtatgaagaactgtaccgacagattgatgatatgataggagaagcaagttgtgaagcatacgcagggggataatccgatgattgagctgcgagccatcagtgaagataacttcagagaatgc

SEQ ID NO: 1333 - DNA, 3824 bp, Unknown
  16S sequences of unknown bacteria
cgtcctccgccggcgcggcggtcgcctgcggctgcgctgcctccccatcggcgagggccagcggccgggaggcgatctgcgccacggcgcggtccacgcgctgcacgggcgcgacgttgcggatgctcaccgcgctcggcagccgcaggggcacgagcaggcagagcagcaccggcagccacagcgcatagctcagccgcgggggcaggcggcggccgagcagggcgcgcagcaggagcaccagcagcgccatcagggagcccgtgagcgtcagggtccaaatcgcttccatccgctcaccctccccgcttcctgtggttctccagctcccgcacgaggtcgtcgatctcctccggcgtgagcgtctcctgctccacgagcgagtggatgagcagcgcgctcctgccgccaaagaccttgcgcagcacggactgcgtctcctggcgcacggcctccccgcggggcaggcgcgcgcggtactgcatggggctcgtccccgcgacgacctccgcgctgcccttccggcacatgcgcttgagcagggagatcacggtgtgcttgctccacccggtttcctccgcgagcgcgcgcgtgatctccggcatggtccaagttcctccctgccagagcagctccatgatcttccactcgctgtcggtgacggtcttcctctcctccacggcaaaatcccccttttcatgaataacttgtctaccacaggataccacgcggtaacaagcttgtcaacgccaaaacgcaaaactgcccgctccgcgaatttcgccgcggagcgggcaggaaaaggggactttacttcttgttgcggcgcaggaaggccggcacgtcgttgttgtagttgcggcgcgcagcgggctgcgcgggcgcgtcggggatgtcgtcctcgtcgccgaagacgcgctggttgcgcatggggcggacgggctgctgcgcctggtagtcgtcaaaggcggagggctgggcctgcgtttccagctcctcggcggcgggctcctgcgcgggctcctcgtaggaggtgttcaggtcgcgcaggcggctctggcgcggggcctgggcgctgcgctcgtcgcggacccagacggggatgcgctcggtgacgccgtcgttctgctgggccgcgggggcggtgcgctgcggctgggcggcgggctgggccgccgcgccggacttgggcaggttgtactccgcgccctcaaaaccggtggcgatgacggtgatgcggacctcgtcgtcgaaggtctcgtcgatgcccgcgccgaagatgatgttcgcgtcggcgtcggcggcctgggcgatgagggaggcggcctcgttgacctccaggatgccgatggtgttgccgccggtgatgttgatgagcacggccttggcgccgtcgatgctggtctcaagcaaggggctggagatggcctgcttcgcggcctcgaccatgcggttctcgcccttgcccaggccgatgcccatgtgggccatgccgcgggactgcatgatggtgcgcacgtcggcaaagtccaggttgatcagcgccggcacggcgatcaggtccgagatgccctggatgccctggcggagcacgtcgtccgccatgcggaaggcgtcgggcagcgaggtgttcttgccaacgatctgcaggagcttgtcgttggggatgacaacgagggtatcgacctgggccttgagctccatgatgcccttttcggcgttgagcatgcgctgacggccctcaaacaggaagggcttggtcacaacgccgatggtgaggatgcccagctcgcgcgcgagctgcgcgacgacgggcgccgcgcccgtgcccgtgccgccgcccatgccggcggtgatgaagaccaggtcgctgcccttgagcatcttggagatctcgtccttgctctcgtcggccgcggccttgccgatctcgggctttgcgcccgcgcccagacccttggtcagcttttcgccgatctggatcttgttttccgccttggactgcgagagtgcctggcggtcggtgttgatggcgacaaattccacgccgcgcaggccgtactccaccatgcggttgacggcgttattgcctgcgccgccgcagccgacgaccttgatgcacgcgccggccacaacttcctgttcaaattccagcactgaaaatccccctatccgttcaactaaatcaaatgggaaaaactgcttgtccaggcgtcactttgtgaagaacgccttgaagaatccgccgatcttgccgccgctttcctggggcttgatctccatctggctcacggactcgtagacgagctcgagcaggccgatcgccgaggaatacgcgggcgaattgagcttgacggccggcggcgtgggcgcgcggaacgtgcgctccacgacggaggagatggtctcccgcccgccgcgcatgaggatgaggccgccgccggtgatgtagaaggtcgaccgcggcgagaggagggaggcgtcctcctcgatggcgtcgtgcaccatgtccgacagctccgcaacgcgcggctcgatgacggccagcacgttttcccggtggaaggagacggtctgcccctccgggtccttgacggagagctggtcctggccgatgccgaaggtgtacttgcgcttgagctcctcggccatgtccatcgtgatgcccagctccatcgccaggtccgccgcaaggtggccgccgcccatgggcagaaccttgtagcggatgagcgcatcgccctggatgaagaggacctccgtcgtcaggtacccgacgtccaccaggaccgcgaccttgtcccgctcctccgggggaacgagcaaaagcgcctcgcccagggccggcgaaaggtagccgctgatgtggatgtcctgctgctccatgcgggcctgcatgtcctccaggaacgtcgggtccgcaacgacaaaggaggccatgcagcggatgacctgccccttgagcccggccggctccatggtgcggcggtcgtccaccgtgaaccacgccgggctcctgtggatgatgaccccctcgcgctggttcttgtagtccagtgcaaggttcatgacgtcgtccacgtcctcgggcgtgatgcgccgctcgctctccaggtccagcacgacctcgttttgctccaaatgaatgaaatcgccgggcacgccgacatagatttcctttatttctcttccggacgacagctccgcttcgcgcacggacttcataatggcctgctccacctcttcgtccgaggcgttccagtggccgtcgctgtatccgtcatagggcacgacgccgaagcccagcagctgcgccggaccggagccgttcccttcacccaccaaagtcacgatcttggaggttccaaattcaatggctgctgccatgctcttcacctgtgtactacctcccaacccgtgcaggattcttgtctgcacaacttacccattctatttcttattatacttcaaactttccgccttgaaaaggtctgctttctctcccgcaggtaaaatcccctgacattttctgactctttacaagttggaaacatatggaagcgcgctcagccggcctcctccggcgcatccggctcctcagaaggcggcggcgtctgctggggctcgtccgacggcgcggcgctggactccggctcgctgccggcgtccggcgtggcgccggcatccggttcactgctgccggcatccggctcgctgccggcgtccggcgtggcgccggcatccggctcgctgccggcgtccggcgtggcgccggcatccggctcgccgccggcgtccggttccgtgccgccgtccggggcggg

SEQ ID NO: 1334 - DNA, 5051 bp, Unknown
  16S sequences of unknown bacteria
cccctgccgatggcatgagcgggatctctgcgatactggcgtccatcctttatcagacgctgaactatgcgatcacggtgttcttcgtgtcgcgcagccggcggctgctggatgcggtgctgatcggctttggctggctgctggcgctgttcctgctgcagcagagcttcctgtcgttcttcaatgaccgcagccagttcttcatccaggcagacgcttacaatatcaccaatatgcagctgcagacggcgctttccttcgtcagtctgctgagcctgggcgggatgtactttcggggcaataccggcctgctcatgacggcgtcatggctgtggtggatcctgcttgccatcgcggcgttttattggtcgaggcgctcgttcgagcagctgaagtgtgagacatgcggctcgccttcgcgctcatacgccgtctatcctttcctgctgctggtggtcacgatgtccctgctcaatctgatctcgctgaacgagtggacgctgttcttgatcgtgatgatcttcctgctctatatgtccgtctacttcctgtataaacgcaggatccgcttcactttccatatggtggcaggctttgcgctgctggcggccatggaggcggccgtctctgctgtcttcgtctatacgaacggactgggcatcgtacaggaatctccgcgatccggctttatccagatggagctgtatgccccggtggattcggtgctgagcgaggaaaaccagcagaagctggccgaagtgaacacgcgctatggaaaggagctgcaggaaaatgaagtgatctctgagttcatcgtcacgtttacgccggaaagcgtctcttatgaacgggtgcgccagctgcagcagcagatgatggaggatgccggcagtcaggaagacggggtcagcgattattatctgaacatgtcattgtctttcatcaaccggatcggtctggaaagcgagttcagctatgacattgattcgcaggagaactacgaccgctacatgggcgagctgtttgatctgctgctggatccgcaggcagatgccggtgtggagatcggctattatgacacaggcggagacttttacgccgtttatgacacgataagcgatgaagaggaggtgcagtgatgttttcgatcaagacacagagcaggatcccgatcttcgaacagctgaagaaacagatcctggaatatatcagcgccggagtcctgcatggagatgaccagcttcccagcgtgcgcatgctggcatcttctctgggcatcaacccgaatacggtagccaaagcttatcaggagctggaagaaaaacgaatcatctacaaggtacagggaaagggctgcttcatccgttctgatcacatcgaggtgcttgtccgggaagagaagctggcacagttcgatgactgtgtccgcgacatgaagcgtcattccatcgatgcggaagatctggaaggcaggatcagacgcatttacagagaggaggagccacatgcttaatatacgatgtgtgtcaaagaaattgggggacaatcaggtcctggatcaggtgaatctggagctgaaggcgggcagcgtcttcggactggtcggtccgaacggagccggcaagagcacgctgctgcggatgatcgccggcgtttaccgagaggacagcgggggcatcacctggaacaacgagccggtgttcgatcatcccgccgtcaagcaggagatcctgttcatcagcgatgagccgttttacttttacaacgcctccatccgcgacatgaagcagttctatcagcgctgttatccttcattcaacgaggatgcctatgcgcattatctagaacagttcggactggatgagaaacggccgatgtcccagttctccaaaggcatgaagcgtcaggcgttcatcatcttcgccctggccatccgccccaagctgctgcttctggatgagatctttgacggcctggatccgatgatgcggctgatgttccagcgtgcgcttgcccagtgcgtgcaggaaaatcagatgaccgtgatcatctccagccacaacatccgcgagctggaggatatctgcgatgccttcggcatcctcgatgagcgccacatgatcaccagtggagatatcgagagcgtgaagggcaatgtgcatgccatccagctggcgtttgccaaagaggtcgaccgttcgctgttcagccatctggatgtcctcagcatccgggtagagtcccgctttgtcaaagtggtggtcaagggcaatgtggaaaagatcgtcaactatctgcgttccttgaatccggtgatcctggaagtacaagacgtcagcctggaggaagtgttcctctacgagatggaacagaaaggatatggtgtgtatgagcagtagcttttcctggttttgctggcagatgcgcagggaccgcagcctgttgatcctgtatgcggccgtgctgatctgtctgttcccgctgctttcactggcgctgcaggaccttggaaacacgccgttcatgttcatcgaactggtgttcgtgccgatggcctgcatgttcatcctgagcttctgtctgcctgctcatctgttttctcatctgtggaacaaaagggagctggatatgtacagcagcatcccgctcaagcgcagcgcgatgttttgcatccgctatgccgcggggctgtgctggctgcttgttccgatcacggtgatcatcgcgctggaatgcctcgtgctgttcctgatgcatatgccgccatatgacatgctgcatatgctgcaatcgacggcggagctcatggtgctgagcgtcctcgtgtattctcttaatgtgtggatcgcgatccattgccgaaaccgcagcgatgccctcgtgatgagcatcgcttacctgctcgttcctctcatcgtcgtgctggggctgtatacgatcatctcaagcagcatctatgatgtctcggtcggttattcctcgagcatgcagatgagcctgttgacggacaatgagctggtgcgctggctggtgaatctgatctgtgcgccgatctcctatgggatgatctgcgcagaaggattcggcagcgcgatcggcagcttggaaggcgtgatctgtcttccgcagtatatctggatcgtgtggctgatggaaagcgtgctgctgatcgtctggtcgcatcgggcatacatcaccatgccgggcgaggagagcggtcagcgtacgacgtacgccctgatgtatccgctcatgacgcatctgctgacgctcggtctgtttctgtatgcggtcgatacggacgatgccgccttcgggaagatgctgttcgtcgccgctgccttcttcttcctgctgctcagcttcatcgcgcagcgccaggtgcggatccggctgcggcagctgatcgcgctgcccatttgcgcgttcctgcttcaggtctcatccgttcagacctctggcttcggcctgatccaagagcttgtcccggcagatgccgagcgttaccggctcatcatcaccatggatcagtatgaggaaggacagaccgtgaccctgacgacgacatggatcagcgccggaaaagatgatgcgctcatcgaagtgatgcgcgatttccaggaacaggtcatcgatgacgccaaggataattccgatgagggcatcgaggaatcgccgcagaccctggacatccagttcgattatgcgagcgccagcggcggcggaaaccgagagtatttcctctttgatccggatggcagcctgctgcggaaatacagcgcgagcatcgcgcagttttccgaggaagaacacctgacgacagaaaccgtttcacagagctatgtcggatcgtgatctcatggtataatggggcaggaggtacgcccgatgaaaaaaatcagtattttgcttgccggtgcgctgctgctgtgcggatgtcagcgtgcgctcattcagccggacagcgtaaaggccatatatgtgcaggctgatttcgagaccgaacgcacaccggtgtcaggatcgctgcaggatgatctgctggaagtgctgtcttcgctgtcctttgcttctgccgaagaggaagagacgccggagggcgtccgcatcgatgtggaagaggaagacggcacgctgtccttctattgcggcgatgatgccatgatcggcgtgcgcggcccggatgagggatccgtccgcatcgcacaggacgaagaggctgccgaaacgctgcgcgatctgctgcaggaatgcaatgaagcctatttccgctctgagctcaccgctgctgtctcaagccgggacgaagaagcggtcgtcgtgactgccgcggaggattccggggagatcaaagccggggcgagcgtgcggttcacgctggatgcgcatgtgcaagagcatctcgatgaagagctgcaggaaggcgcagagatcctcatcgtctatgatccggacagctatgacgcacagacacagcagatcggcaaagtattggtgatcacagatgccgaaaaagaaaacgcttcccatggctgcagctatggagaagcctcagattgctgatcagatcgatgtaagatcgaagtgaagatgcccgcgggcatctttttctatgcgcgggaaaatcagggaagacgatgggatagaccgcattttcttaaccagaaattgatgttatttttacttcgatcatacacagatgaccatttttttcaaattgttaaaccattgtaagttcggttgattttgtcttctggaagattagaataaacgatgtgaaaacaggagggaattcattgtgatgaagaaaaagacagccgcaaaagtcggcctcgcgtcacttgctgtgatgctgggcggcggaacgatcctcatgaacacccaggcatatacgccggttcatgcggaaacgcagaacgaaaacgatgtagagaccaaagcaggagagaccgtacagaagtcagtgatcctgatggtcggatcagatgagacaagcaggaacctgacttggtatgcgaatgtcgatacggcaggcagcgtgcagtgggcaa

SEQ ID NO: 1335 - DNA, 3216 bp, Unknown
  16S sequences of unknown bacteria
tacttttcggtgttttgcgggtcaataagtcatgctttttcatgcaagcatgaaacgcatgatcttttgacccttgtatcatcattttatgcagggcgggcgttctgtatgcaggctgcagacccgccgccagagcagctcctgtctgtggctgctatacagaactgtagcatattcttcacagaattgtcaaaatttttttgaaaatgctattgacaaaagagagagggagtattatattaactgcataaggtgttagcactcataagtcgagagtgctaacaagaccagaaaaagctggttaccttataagatcagaaaggaggagttcagatgcagcttgatgacagaaagtggacgattttaaaagcaatcgttaagacctatctggagacaggcgagccggttggctcaaggacaatttccaagtatgccgacctgaatctgagttccgctacgatcagaaatgagatgtcagatctggaggagatgggatatattctccagccgcacacttcggcagggcggattccttccgatgccggttatcgcttgtatgtggaccgtatgatggaggagaaggaccgcgaggtcaccgagatgaaagagctcgtgatccagcggcaggataagatggagcttctgctgaagcagatggtaaaggtgctggcagccaatacaaactatgcagcgatgatatccggaccgcagtaccatcggacgaagctgaagttcatacagctctcgattgtcagtgatacacagattctggcgacggtggtggcagaggggaatgtggtgaagaacaagcttcttgagattcagcacggcctcgatcagaagacggtactggagatgaatatcctgctgaacagtgcactgaacgggcttacgattgaggaaatcaatcttgcgacgatcgcaaagctcaaggagcaggccgggatacacagcgagctggtgaaccgggtgctggatgccgtggcggagtccatacaggcatctcaggatgagttggagatctatacgagcggcacgacgaatattttcaaatatccggagctgagcagctcggaaaaggccagtgagctgatcagtacgtttgaggataaaaaggaactggctgatatcatcagtcaggacggcgccgagcagaccggaatacaggtttacatcggcggggagtccccggtaggcgtgatgcaggactgcagtgtcgtgacagcgacctatgagttgggggaaggcatgtatggcaagatcggagtcgtcgggccgaagcggatggattacgaaaaggtagtcggtacgctgaagaccctgatggcgcagctcgatgaaatatttaagaaaaaatagcgcggtgcgacatgcactgccgggaaaggtggaacgatccggtggaagaaaacagaaacgaagaggttctgcaggacgcggatgagacaacggccgcgcaggagcaggagccggagatcacagatgaagctgtgaaggaggagacggcacaggctgcggatgccgatacggcagaggaagccgcggatgcgtcagacgcatctgagacagacgaagctccgaaaaagggctttttcaaaaagaaaaaagacaagaaggatacacagatagaggagcttaccgatcgggtacagcgccagatggcggagttcgataacttccgcaagcgcaccgagaaggaaaaagcagccatgttcgaggtgggagccaaaagcgtggtagaaaagattctgccgacggtggacaattttgagcggggactcgcaagcgtatccgaagagcagaaggaagagccgttcgtacagggaatggaaaaggtataccgccagctgatcgcgagtcttgaggcgatcggggtaaaacagattgaggcggtaggacaggagttcaatccgaattttcacaatgcagtgatgcatgtggatgatgaggaagccggtgacaacatcatcgtggaggaattccagaaaggctacatgtaccgtgacaccgtcgtaagacacagcatggtaaaggtagcaaactaaactggcaacaacgttttcagatagattacagatgagccggatgatccggtgcataagcaggaggaatgaattatgagtaaaattattggtatcgaccttggtacaacaaacagctgcgtagcagttatggaaggtggcaaagctaccgttgttacaaacacagaaggctccagaacgacaccgtctgtcgttgcattcactaaaaatggtgagcgtctggtcggcgagccggcaaagcgtcaggcagttacgaatgcagaccgtacgatctcttctatcaagagacatatgggcagtgattacagagtcgagatcgacggaaagaaatattctccgcaggagatctccgcaatgattctgcagaagctgaaagcagatgcagagaattacctaggtgaaaaggtaacagaagcagttatcactgttccggcatacttcaatgacgcacagcgtcaggctaccaaggatgccggtaagatcgcaggccttgatgtaaagcgtattatcaacgagccgaccgcagcagcacttgcatacggccttgacaacgataaagagcagaagatcatggtatatgaccttggcggtggtacatttgatgtatccatcattgagatcggtgacggtgtcatcgaggtactggctacgaacggcgacaaccgtctgggcggcgatgacttcgataagcggattaccgattacatgatcgaggacttcaagtccaaggaaggcattgatctttcgaacgataagatggcactgcagagattaagagaagcggcagagaaggcaaagaaggagctttcttcctccactacgacgaatatcaaccttccgtttatcacagcaaacgagactggcccgaagcactttgagatggatctgaccagagcgaaattcgatgagctgactcatgatctggtagagagaacggctgctccggtacagaacgcattgagagatgcgggactgaatgcatcagacctgtccaaggtactgcttgtcggcggttccacacgtatgctgtctgtacaggagaaggtaaaacagctgaccggccatgagccgagcaagacactgaacccggatgagtgcgtggcacttggtgcttctatccagggtggtaagcttgcaggagatgcaggcgcaggcgatatccttcttctggatg

SEQ ID NO: 1336 - DNA, 32759 bp, Unknown
  16S sequences of unknown bacteria
tctttcgcgaaaggcttgagggagtaaggccttacgctcgtcactcggagaggttgggtcaacaccaattccggcgcagagatgggaaacgccaaaatctgtggaatagcgcaagtttttagtttttgattttatagttttgcttcgtccacgttcagccaccgattggactatatagacaaattttttatctcgtccgccgctccataataaatacagccttttttaagttttcggcgcttatttcaaatcaacaaacttaatatgcgccctcgcccccctatgagccaaacaaacgcccagtctgcctaaggacttattcattttaaaatcttctcgcgcggactgacagcaagcgccgcaatatgcgccgttatctcatattatattaaactttaaaaagccctatactttcccgtatcggaattgccacagtactctcgaaaaaaaatctgcatttttctcacccaaaaaattcaattccgagacataaaaaatatctttcacggtgaagcaaaaaatcccccgtcgataactgccgaaatttttgataaaaaaagtttataaataaacgcatatcttatccatctgagagcaaacaaaccgcgtatggcaaattgcccaatataaaacgtattgtccaatcgcatcgcgccctgttaaaaaactacacccagagccttgtatttaagcatttccgtccttatattttctataagttccccataccactgcactccgacatctttcgcaaaatttctttcgcaggatagcaggttgcaaggagaaattataacttttatattatgtatgcctgcctttgccgcgattataaaaacctcctccaccgcgtcgtcgccaatcggtatgcagccgacagttccgcttctgccatgtatcattatatctccgccgagttcctctggtttgcggccgtccgcaagcgcctttttaacgtcgaaatcgccggggtaggaaacttttagggagagatggaatgtgctgttcggattcaaatattctatcccataaattccctcggggatttgcctgtctccgctcttcaacttcggccccaatttaccgctaaaaccggtaaacggataatctttcaaatgctcaaatttttccttaccacccgcgcggccgtaaacagacaatatcctcttgctcttgtcggcgaaaaacaggacttctttcgggaatccacgccgggcgataaaatcgctttccttagtgttggaaagaagtctcggttcgtattttgcaacagcctcctccacgctttgcccgcctaaaaagcgcgcgcgaaaaaaatccaaggcgtttttcgcatagtcggcgttgtagaaattcacgacagccgccgcaataattcccaaaaaaaacaccggtacaaaaacccattttacaatttttaaatgtctcataatataaagccttccgcccttccctaaaaattatgctcttttaagagtcgctataaagcataataaaaagcgaatcgaaacaatgcaatttatttttgcggcctccgccgagacccccgttttttatgcccgttttccccgcgcgccgccttgctttgcccgcgctgtgcgcgcgaatctattgcgccgcgcgggcgcaaaaaaagcggagctttcaggctccgccctttgtgaaaatcttgcctggctcttacgccctctttctgcggagagcgaagaacaggacggccgcgccgagaaccgcggcgaccgccgcgggttcgggaatctgcccgaacgtcaccgaaagggttccgtcgttccacgaaaattccgcgattgcgttcaggaggttgaccgccgcgaagtcggcattggcgtcgtcgagattgaagccgtcgagagatcccgcggagattagctcgaaagtgtcgccgatgtagacggcgccgttgagcccgtcaaaatttatttcaatttgcccgtcggcatttttcgagaacactcccgcaatggaaatcttgtaaccgttttcgagggcggccatatcgaagagcaggccgccggaattccactgcgcggaatttattacggtgctgttgttggcggctccgaaatatccgccgttgaggtagagcgttcccgtggtggccttggcggaggcgaggacgaatttgccgccgttgagggttaggttattgatggcgccgtccttcagatttattgtctgcttgccggtcgcggaatcggccatggctatatcaaacaacttttctgaagttatgctgccggtccaagagtagtcgccggaattggtgaaagtgatggcggtatctttacgaaggaatatttcattgtttgaagtgtccgcacccgacaatccgccgattgtggtattgttattttctatctcccatttcccgatgttgccattctgatttatcattgataccgcgccttttacggtgagcgaattgagccccgtccagagtgcgttggaactagagccgtttgcatagtagtttatgtctccctcaatgcggagatttcccttgtaatttatgtcgttgtcggggataaagcttataaaatacgcgttcgatgcggagttcccgagggtgaggtcgttgcgtatcgtgagcgtcgagccggtttttatttttatgtagcttccccaccattgggcagacgtggttttccaggtaaagttgtcgaaagtcgcgttgccgtcgatatttaggaagaagtgtccgtgaccgccggaagatccggccggggcgttctggttgaggattatgtttacgtcgcctgcggtgaatccgtcggaaatagttgaagttatctcggtggtcgtaacggcgtcgatagtgaggtcgttgccggcgacttccgagactgtcggagaccactttgatgtgtccgaccaattccagcccgtgtcggtcaatgccttgttttcgcccgtgatgagcgacaggttctccgcgtttgcggcaatcgcggaggcggcggttacaagtgaatatattagtgtgcggcaataagagattttcatgaaattatcttttagttcgatttctgtaaaaattggtctaaacttgggggtgtaatatgtcaagtatttttttgacggaaaaatctgaaacagtttttggattatccgattccgcgagctttttgcacgccggagcgccatctgccgcgggggtattgctgtccattttccccgttgtcgcgccgaaagcattatcctcgccgcggaaattatcctcccatacctcagcatcgttatgaagggaattgccgatattaagtccacaattccccacttccagaatcctattttatcggccgccgacaaatacctccacgcaacgtctataagaaaaaatacgcacgccgcaaaatcggcaagcctgaatatttttacagcttcagagtcctccacaaatatatgcggatacgcaagctccgccgccacaacggccgtccaaaacaatatgaacgcgtcccacccgccccctggcggaggtatgcgttttttaaacgatttatccatagtattaaatgccgtttttttccgacaaaaattaacgcgcaaagtttttgaaaaactgcacaaaaaaaactccgctttgcggagtttttcaagctttgctaatatcttaaaatatatccgtttaggagcaggtttttaagctccctctcggttatccatatcggcttctcggacaaccccgcgattagatattcgtccgtatccttgttaaagcccataatgagcgactgagagtacattgttccgcgcgcgtttattcttttcttttcaagctttctgagagccttagaccaatcatcgggcgattttgccgcctttctttccgccagccggtttgtgaaatcgccttcatataggtccgaaaccgcaagccagcataggattggaacgccgtcttcaagcctctggcggaagttgttggcagtatatcccactttttgaagccccatattttttgacgacaaatatttattcgcgccggatatcaatccgtcaatcggtacgctgcttttgcggttgccttttttgtctattgctcccgacgacttcgccatggagtcgttcagcttgtcaaagtcaagctcattgtccacatacgaaatgaaaacgagcattgttgttccgattacattcaaatccttagtcttggatttgtcgggcagctccgggagcttagaaataaaaatatctccaaaatcgtttttagtaacgcgcgttttaaactcggccttcatgtccgttttgctctgtgcggcggaagatccggccgcatagaggcaagatattgaaaaaaacgccgaaagcagccccactgtaaaaattttcaaattcataatcattctccttctttgtctataaaaaatattttttatctaaaagtcaatcaaactttatgtttattttttcgcgttcttctccctctccattgccttttgcgccgcgtaggcgtccgcgcgcttgacaacgcctgccagttccccaccgagctcttcgcgttttgaaagctcttttgcaagccttgcgactgcgacaagatattcaccgtcttccgatagccccgcaaggcgttcgagcgaaccgcgcgcggccgcccgcgattgctgcgagagcggaattagatatgcgcatatttcaaacgcaagccccctatcggaaaccttggaatatatgtcgcgcgagagcgcgtctcttgcgagttgctcggaagccgacgtatttttgtccgccgcggcaagctgcgcaagcttccataacagcgcggcgtccggcattttcccgacatattttgaggcgtagtcaaacgccgcgcgcgccccgccctttttcgaaatggaatttaccattctaattacggaatattgcgacaactcgtcgatttcacccgcgtctatattttccatctgcttttttaaatctgtcttgaaaggcttaaacatcgggtcgccgacaaacacgccctgccagctcaagaatggcatcgccgcagtcgccgcctcgcccgcgctcattccccgtgcaagggcaaggacataaacgtgcggatagtgcgttccgccgaggtatggctcgtacacgttgccgaaagttgcggaggcgccctccgccgtaaaggcgggcgtccaagagttgcggtcgcgcatatttgcggcgctaaacgagaatatgtgcagggcgcttgcacctgccggaaacttgaagtttttgtcggcaaaatatccggccggattaaaggcgtaccaaccgaagtaaaatgcgggggcgtccattctgtccgcgaatccgaaaagccgcggctccgtgttctccgaaacgtcaaaccccgccgcggacaaaattttaccggctgccgaaagccacttgtcgcccgtcttttcgcgcttagattcgtctatgtaaacccttccgcgcacgccttttttttcggcttcaagcgcgtttctaacggaggcctcaacgtccgcgcgcgaaactccgtcgagcctcgctacggggattgttccagttatcgatggcgtcattgcccatgagtaattgttaaaaagcggattcttcacaaatccggcaaacgactttgaagacacgaaccttcccgatatttcagaatcaacgcttgcggcgtcgctaaacgatttgggagggttgggcgcgggggagttcggcgacgggttcaccccccacggaacgccccggcagagcacgagaaaccctatgtcgtgtgatacatacgaatagatttcgcggccggacggctccctgcccccgagtttcaccgccttcaacgctccccgctttgcgagctccgcgacgagcgggttctcgattttttcaaagtattccgcctttgagatcttgccggctttcggcatcggcagcccgacgatattccccttgggaattccgcgcgccgatgcgtaaaaatcggctatcgcgagagaatcggggtcgtccgaatttgcgacaacataaacctttgacggcaaaacttccgcgcgcgcgcagagcgcgaaaagggcggcggacaaaaaaaagaaaacggcgcgtttcatggtttgcattttgcccgaggccgccgccgtttacaagcggcaaaaaacccatggcccaaaaatttcgccatttttatttttcgccgcggttcttccgaaacccctccgcgcgaaaaggcaaaaaacgctccggcgcaaaccggagcgtttttaataaaaaccaatctatataaaactaaacccgaacgcattattttcttttccgacgcgcggcaagcgcgagcgcgagcgcgccaaataccgccgcaatcgccgcgggctccgggacggcggccagcacgagcttgcctattccggcagcttcgtcccactcgtaagtccacacgccctgcaacagattgccctcgccgtcgtaggctgtcaacttcacatacgtttcatacgctgaaaggcagagcctgtcgtcttcgacaaataaatacggatcctcaaacaaaacagcgtccgcgcggtagtcgtaaaatataatttcagcattttgcacggcgtggttgtcgtcttttgtgctcagagttttgattgtaagcgtcgcgccgtcggcaaccgaaagttcgagaaccgcgtttccgttaaattccaactcaccacttatcgaattgtcggcgaacgcgtttatcctgaaattgcttcctctattatcatcaaacgaaagcctcggcaatccgcttagcgcattttcgccgagaagattgagcgtgaatgtcccgctttgaacgcgcaataacgaggaaaccactcttccgccggaatgcaaattccacacgccgccgtcggcggtttgcaaatcctgcgaagattcgaaagtcccgccgtcgcgaacggcgagatttttcacgcaaaaatacgaattgttctgcgtctccgacattaccgaaaccatgccgccgtttacgttaagagtgtcgatatagcctatcattccccagcgcgaatggtacgtccccccaaaggagaaagatcccgacttgccgacatttacggttccgttgaaatctaaaatccgatcccaatagttgtcgtcggacggcggattttgccccattatatagagggagccggcctcagtatccgagcctatgttgatcgttcccgaccccgttagaatcttgttgttgtagccctcgtacccccagtagacttgcgcaagatcgccggcgatgttccatacgcccgacggcccgatttccagcttccaccaccagtccgcataaatgtgttcgttcgatgaagtggtaaattccccgtccagcggggatgtcggacgctccgccatcagcgggacggctgcggagagcgacaaaaacgccgcggcgagaggaaaagttgggaaggaaaagaagcgtttaattttcataataattttggaaaataggcggaagggttaacaatgtcaagtttttgcgcaacttttatcaactttccccaatccgacattcgccggattttttaccctctgtgtacatttccgtctccgctttaacggcaaccccgcgtatccgccgccgaaaacccgccgttcccactcccttttcttccgcggacgataaaaattccgaacaaaaatatcggcattccctgatcttgccgccgagccgctccgcccgcgcgccgcaacgccggagatttctccgtccgcctcgccatttcccgcaaaaaaaacgctccggcgcaaaccggagcgtttttaatgaaaaccaatctatataaacctaaacccgaatgtactattttcttctccgccgcgcggcaaacgcaagcgcgagcgcgcccaacaccgccgcaaccgccgcgggctccggaacggcgttcagcacaagcctgccggtctcgccgttccagtcgtaaaaccattcgccctgcaaaaggttgccctcgccgtcgtaggctatcaaatccacaaacgtaccgatagagggtatgtagagcctgttgtcctcaatgttcatatcggaaaagccgaacaagacggaatccgcgctgtaatcgtaaaatacgaaagtcacttccgtcagagactgggcgttgctcttgcttgtaagattttcaatttttagcgtcgcgccatccgcaacgcaaagcccgagagtagcgttgctgtttaattcaagcgtttcaatcgagttgtttgccgaaacgtttattctgaaattagttccggtattctcgtcaaacgaaagcctcggcaatccgcttagcgcattttcgccgagaagattgagcgtgaatgtcccgctttgaacgcgcaataacgaggaaaccactccttcggcggaatgcaaattccacgttccgccgctcgcggttgtaagactgagcgcggattcgagcatcccgccgtcgcggactgtgagattttttatgctgaaatatgaattgttcgccgtttccgacatcacgtaaaccgtgccgccgtttatattcagcgtgcctattgaaaatatcgagccgtaatgcgaattgtacgaacctcccaatgtaaactggccgttgcgggcgacatttattgtccccgcaaaattaaaccagttttcgtacacctcctccgcgaccggattcgaacccataatatagagggatccgccctgcgtgtcggatccaagatttatagtgccatcgccagtgagaaaattgcggtgccaaccttcgtaattccaattgacctgcgccatttcgcctacgatattccatactccggtcgagttgattacatgctgcgtccagttctggccggtggagtaaacggtttcactggtggaagtggtgaattcgtcattcagcggaaacgtcgggagctccgcaaaaacgggcgcggaacacgctaaaagcgccgcggcggtaaaaagagaatttatcggggagaaaattatttttttcatagtgacaatttggagtagcagaggggttaagtatgtcaaaattttttttgttagaattctattagcccatttaaaaatttcttgtaattttcatcaacatacgctatttcgtttccaaggcgcaaaatttcccgacgcgccttgaatttacccgttcccagccccgcattttccccaaacgccgcaaccgctccataccgaacttcgccggcggaccgaattttattcaatttcccgaacatttgccccccctgccgacgcagacggaatgcaaagaaccgctataacccgagagcttttccgataaacgccgacgctcccgtatcgccgcgcagggcgcagggtttggcgcgctcggcggcgaatgcggcgggcgcgctttcacccccgcgcccgcttcaatttttagcgcaaaattcgcgcattatccgcagcgcctccaagacgcgcgggctcgggatcgtcgcgatgtcgcggtgtatgaaacaaattttggagccttttaccgccggcgtcgatgcccacgcggggtcggacttaaaccgccgcataatctcgctttcgtcggcggaagatgaaacctccgcaaaaattatttctggcgcggcggatactataaattcgcgggacaataccggccacggcgcgcccgcagcgtctgcgcaattttttagcccgcacgcgtcgagcagtccgccgacaaaagagcccctgcccgccgccatattgccgaacataaacagggccttcctgccgcgccctgtctgtctgccgcgctcgtcgcggatttccgcatcaaaatcgcgcgctattttttccgccgccgcatctttaaaaaaaacttttccgagcagcaaaatatccttcgcaacattatccaatccctcagtattcagaaaaaatggccgcacgccgaccgactccaacctgcgcgcaatcgcccttcccgtcgggctgagcggcaagaggaatatctccggcgcagcctttgcaatcttctcgtagtcgggattgagaagcccgccgagctttggcttaagttttgcgtcctcaggataagtgcaatagtttgagttgcccaaaagaaaatcctgcgcgccgattgcatagacttcttgcgatatgtttggaacgacagtcgccgcagtggggggagcgtcaaagtcaaaagtccttcccgacgcgtccgcaacctcccgcgcggccgcgcaatatgaaaagagcgccgcgcacaaaaccatgaaaaataacttcatttcttatcgcgcttcaacatggcgtcctcaatagacaaccccgtgcattctcccattgcgctaaacagcctgtacattgcgaaaaataaaaccaccatagtgggcagcactatcacagggaaggaaagcgccgtcattttccctacctcctcgttaaacgcctcagttcccgtggggcttttaaatatgtacgccgcaagcgcaaaattcaaaaccgagctcagcaggaaagacgccgccacccaccaagtcgcctttttaagcgcttcgtcaaatttttcgcgcgtgccccgctcgtcgagcgcggcctcaatttttgggagatcgacgacgctttcgttgagcataatcatctttgcgagcgggcgccgcgtgaaaaccgtaatcaataccgccgctccgaggacaagcggcacaagcccctccttcacaataatccactcgcgcgacatcttcataagccctattccgcctgtgagaattacgctcagcactccgataaccgaaaaaatattgaatttgcgcctgctcgccaagtcccaaatgccgtaggcaatcggaaatgccagcgcaaaaacaaaaacctgggcgtccacattttcccccgttattccgagactttcaaagagtttgccgcccttgattagaagaaagctcggcaggataatgttaaatcccagattcagccacgggttttccggcttgttctctttttttgaatccattattttttaaccctcaaaagtagcatatcaatgttttcgccgagtttttcaagattgagtttagcctcggatattctgtgaatgtcgcgttcgcgcactattacataaaccggtttttcggacttccttgcaaagtccccaaactcctttgcggaatcgaagaattttgggtcgtacgcgtcacttccgcgcatgtatccgaaggattgttcgtcaggaggatttcccacgagcagcacagtcctgccgagccacaccggcaaatcctgaaaataattgtagtcgaatactatcgcgacctcggaagatggggattccgcaagaatcctctctgccagaggccttgcgctcgggcgctgggcaaaccgccccacgggattgaaaaagagcagaaatatcgccgacaacgcaaaagcccaaacaaagaatttcctatcgtcgccgccgcggagaacggctatcataattgcggcggaaacaaccatataaaaagacagcgcgccaaacataatccacgccgtaatagtgtcgtcgattttgccttttgatatcaaaaccgcgcaagcgatgggagacgctatcgcgccgactacgggcagcaccgcaaaaagccatttagcggttttcgtaaagtcaattttccccgaccagttttttgaaagccactctccaaacaaaatcgcaaaagccggataaaccggaatgatatacggcacgagctttgagcgggaaatcgagaagaaaagcaccacaaacgctatccacacccagaagaaaatcagctccggattttcgcgccgcaaagcgcgccatccgtctgcgatagagcggcgcaccaccgccggcaagaatacaatccaaggtattaaaccgaccggaacgattacaaagaagaaccagaagggctgcgctcggttggaagtgtcggtatcaatgaacctcaatatatgctcatgtattatgtaataccagaagaacccctgtccttccggattttttgagacaattccctccgcgcccgagtatggcggattcgccgccgccgcaagaaaatgccacggcaatgctatcgccaagaaaaccgctacccccgccgaaatccagagaatatccgatttttttaggctttttaggaagtcgaaaggcccggttataagcgcatatataaaaattgttgcacccggtattagaacgcctataagcccctttgtcatgacagcaagcgcgcagaaggcgaaaaatccgagcgttagaattcccctacgcgccccactgcttttgagggcaattataaaacaaaacatggccgccgatatgaaaacggagactgccatatcgagcgtcacaatctgtccgagcgcgtaatagagcaggaaagtcgcaaggaaggcggcagacagtatccccgccctccttccgtacagggcgcgagccgcgcaatatgcggcgcaaattccgaataccgccatgagggagttagcgagccttgcggaaaacaggtttatgccaaaagctttcagcgaggccgcctgcatccaataaaacatcggaggcttgtaaaaatagggcatgtcgttcaggcgcggagtcaccatatccgaatgctccagcatttcgcggggtatttccgtatatctgccttcgtcggggctcgcgaggggccttgtgaacccgagagacatatacaatacgcatgagacgagaaatattacgagcaaatcccgccacgcagagacgtattctgtttttgcagtagaaaaattcatatttcggctgatattgcagtcgtgcgcaccatacacaagactaatttctaattagactatcgccgataaaaaatgttaaataaaaaagagaaaaaaaagtcttgccatacgaatccagccgtccagaatcttttggcattatttttacgcggaattcgcgcatcgttttgtaggcatattattccgacttagcgcttgcgggaattaaaattacaatttacgcaaaaagcaaaaaaaacatggcagaagaatcaaacaaaaagaaagtcacagaaatcggcttcatcgaaaccgaagcgctgaaccgttatgtcaccgaaacgggcaaaatacttccccgcaagtttacgggtcttacggctaaggaacagcgctacgtcaaaaagacaataaagcatgcccgcaacatgcttctgatgaagtaattttccctcgatgggaagagtctcgtcaacgcgggaagatttcaagcggccgccctcggacatactgaaggcggctgattttattgcgcgcggcggaatcggcggagtccccacagagactgtttacgggctcgccgccgacgccacaaatcccgatgcggtgcgaaaaatattcgccgcaaaaggcaggccgttcatagacccgttgattgtccatgtctgcgatatgcgcatggcgcgggaaatagccgtatttacacccgacgccgaaaagctcgccgaagccttctggcccgggccgcttacaatggttctcaaaaagaccccggcaattcccgacatagtgacggcgggaatggacactgtggcagtcagaatgccttcgcaccctattatgcgaaatcttataagagcttcaaaacccatagcggcgccgtccgccaacccgttcggatacgtaagccccaccactgccgagcacgtcgcgtctatgctcggagataaaatcgactttgtactcgacggcggaagctgcgcgtgcggagttgaatcaactatcgtgatgatgacttccgccccgaaaaagctgctcaggccggggcccattccaccggaggatatagagaaggttttaggggaaagtttggatatttccccgaaagtcaacgaggcgcacccacaagctcccggaatgttgaaatcgcattacagcccgaaatcgagattgtctctttttgattctccgggcgaaattccacagaattttcagggcaacataatatacctcgctcggcccgagtcgcctaaaaaaaacgaatattggctaagcgaagacggtgacctcaaagaagtcgccaaaaacttattcgccctcattagaaggctcgacaaagccggcctcgatatttactgccaaattccgccgcgctccggcataggcctggctatcgccgacaggctcgaccgcgcgagaaccaaaggctgatatcaagacgtttgccctatcgaaaagatttgcgcctacttgcgccaaatttgcgcggaatatttaaagcgggtattcaatttccaaaataaattgcgccacagtaaagcgcggggattttaattaagatacttggataaaaattcaccagcatgcctcggcatttttgttgaattatactgcattttcagtctatgctaaatgcatgagacttttgcctttgatttttgtatgctttattttttgcgcgcacgttttcggaggaactaccgtaaacgttagccccctcggagacgataaaactgcggacggctcatcgaaaaagccctttgcaacgctaaaagccgcaataaattttgcgctaaaactgcaaggcaacggagatatatcattaaaactctccgacggcacataccgcgtaagcgacactattttgttggatgggaaagactggaaaggccgcaaaatatcaatagaaggctccgaaaaaacaattttgagcggaagcgcggacatcgacgccacaaaactttcggaagttcgagaagcgtcgctgctatcaaagcttcccgctgagcgcaccgcaaaaatatattttttaaacttaaaacaacttggaatatcagattacggagagcttaaacagcgcggtttcggaaccccgcgcgacattccggaaatcgaggcattcttaaacggcaagagactgcggcttgccagatacccgaactccggattgatgaaaatcgggaaagttttggacgccggacaagtgaagtcaaaaaccaaccgcggtttcgacgagccttccgacgacacgcgcgtgcgcggggcgacatttgaatacaccgacgcccgccacgaaagatggattggcgccaacgacgcctacgcgtgcggaaacttttccgtaggctgggcagacgacgaaataaaaatcgaaaaaatcaatacaaatgacaagacggtcaaactttcctcgccgcacatatacggagttatgagctgcctgcccgaccccaagaatccaaagtttcggcaagacctgtccacgcgcggatattttgtaaaaaatctcatcgaagagctggacgaagacggagagttttttatagacagaaaaaacggaattttttacgtagccctcgactcccctccgtccggcacactgcaattctcgatgctctccggcccgattattgccataaaaaacgcggacggtttgaaaataaaaaatgtgcgctttggcccgtcgcgcggcatgggcgtattcgtaagccgctcgaagaatattaatattgattcgtgcgaattttcaaatttcggcaccgtggcgctgtctgtcgattcgggaactttcgcaaaaaatcctccgccggagctcgccaataaaaaccccgcattcaatttcagctcctcgataacgctctccaactgcaaaatccacgacaatgccttcggcggcgcatatatccgcgggggcgacaggcgctcgctatccccgtcgggaaatctcgttttcaactgcgaattttatagaaattcaagcgcgggtctcaaatataccccgtctctgtcgatttacgacgtcggcgcgcgcgtgtcaaattgcacgttccgcgacgacccattcaacacaatgcaatttggcggcaacgacctcattatagagaaaaacagatttgaaagaatctgcctaaacgtaagcgacatgggggtaatatacacgggccgaaacccgagccataaaggcaatgtaatccgcaaaaactttttttccgaatgcctcgccaaagacggcaaatgcactatacgcggcgtgtacatcgacgacggctccggcgggtacgacatacgcgaaaacatattctgccgaataaagtccgccgaccccgacgctacaaacgcgggaatagccgcaatctactaccacggcggccacgacaacactgcgtataaaaacgtatttatagactgcgccgtaggagtcgcccactctccgtgggaggacgaatggtggcttaaaaacataaactgcgccgcttggaggcacaacctgaaagacgaggttgatatagagtccgacatttaccagaaaaaatacccgcagcttaaaaactttttcaaaaacgacaggccgcgcgtaaactatctcacccaaaatttatatttccgcacatcggggccgctgaacggaaactttgtctataaatggaacgcttttttaaacccctccaaaagcgttccatgcgacaaaaagaattggacacccgaggacgtgctcgaatacttcggcgacaacggggttgtccgctcaattctttcgcagcgcatcggcgcaaattagtctgcggcaaactttacaccggcaatcccgacgactataagcgccgcaaagaaaatctgcatcggattggctgcctccgcgaataaaaaccgccccgcgaccattccgccaaccgtccctatgccagtccataccgcgtaagacattccaagcggaaggttgcgcgccgcaagcgacaaaaaaagcatgctaaaaaacagtgccgccaccattgaaaccgacggcgccaacctcgtaaatccttgggaatattttagcgcgacaacccaagcgacctcgaatgcgccggcgataagaagaaatatccagcttatatttgcgttcataaaaattcacgcttcttaaaaaggcaaacgaaagcgggggtcaataaaaaaaaagagcaactgctctttttcatttttcaatctgccccgcaaaaaaaacggcgcataaaattatgggatatttccgcccttcaaacctcccttacattcgggcgctcaatttgggcaatgcgctccataagcctatccactataatctgcgccctgtcggggcagtttttcccggggtcaatttcatgggggtagataggcttgccggcgcatatcattacgcgcgcccccccgccgaggcggccggaacgcggaagcacctcctcgaatccaaacgaacgtatcggcagtatcggaacccccgcttttatagcaagaagccccgcccccggcttgccctgcaaaagttcgccgttctcgctgcgagtgccctcaggaaaaatcacaactcctattccgttttttatcctcgccaatacgtcgcggaaagctccgagattcccggactgcccccgctttaccggtattgcgtttagatgtctgaaaatccacccgagcactttacccttcatgagggtgtcgcgcgcaacggcgcacaattcagtctcgtgaaaaaacgccatcgccatagggtcgagatagctgacatggtttgcaactattatgcacgggcatttggggacgttctcgtacccgtaaagctctatccttccgaatacgtcgcaaaaaattgcagacaagtgccaccacgatttgtaaacgagcttcgcggttttaaatttaaaatatctggcgcgcattacgattccaaaatgtacgacaaggtcagcttcacgacctcctccttggtcatgtgcgaagtgtctattctcacggcggattctggacagcgcaaaggagctgtctttctcgacttgtcgattgcgtcccgcagcccgacagagtcagatatgccctctttcgccctgcgcgccgcgcgcgtctgttcgtcggcgtcgaggaatatcctgacatttgcgtcggggaaaattacagtcccgatatcgcgtccctccataatcattccggacaatccgtgggagcgcgcgtagtccgccatagacctctggtagtttttcaagaaattgcgcacctcgggcattgcggcatactttgcgacagatgcgttcacgctttcagtccttatcaaggagtcctctacgagattgccgtcgagagttatgcgcgccgaattgccgcaaagcaccgtgcctatctttacgctctttaacctctcggcgacagcatctgcgtcggacgtgtctattccgtcggacatcaatgcgtacgcaacagtcctgtaatgcgagcccgtatctacatgcatgtatccgagaatcctcgaacactccttcgagacgctcgatttccccactgcggctcccccgtcaacagccacgacccttagcccttcagaatcggagcgcgcagtgtataaaacctcgaaaaattcaccccaagtcttggagacgcacccgggatcctctattattacccacggcttgccgtcgccgcggacgtcgcgcgaggcgagtatcgaaaaactcattgccattctgtggtcagcgtacgtttttacggttatcggattttgggcgatttccgcaaggcgctccggcggatagggagtgacgctaatggaatcgtccgtctccacaacggactcgcaaaactttctaagctcgttggcgcacgccgcgaccctgtcggtttcctgcgcacgggtatgggcaatgccctttatcgtaagcctgaagggcaagagcggagaaaccgccgccaaagttaggaaggtgtcggagatatcgttaaaatcaaactccatgctttcgggaaaaaccgtctgttcggcgtcctcgacaatgaggttaccgcctacggtttcggtcttgacaagtcccgcgtcggatagaagcctgcaaaaggcggaatccccctgaagcttgcactccgcaaagcccgatatttcgcaagccccgccgacaaccgcaggcaaaaccgcaaaatagctcgccgccgtggcgtctggctcgattttatatatcctctctccgcacgcgctgcgcggcctcaaaaatttataaactccgccctcaaaaaccgtttcgactccaaactgcgccattatcccgacagtcatatcgacgaacggtttcgagacggtcgagccttttagcgagacttccatcggggagtccgcaaatgcgcccaccatcagcagcgccgacagcatttggctcgaagcctttgcgtctatctcgacccttccgccctttaagccgcatgtgtgcattataaaaggcaaagcgtttttctcgcccaaaaattcaaattttgccccctgcgacttcaacgcctccacaagccccgccatcgggcgcgagcgcattgcatcgtcgcagtcgaacttgtaagagccgccttttctaagtgcggcgagagccgtcacaaagcgggcggccgttcccgcgttgccgacatgcaattcggcggaggagttcggagccgcccccatcggggattctatctctattgttttttcgaagcggtttaaatttacgacataccccaatttggaaaggcagtctgccatgatttcagtgtctctggaaaacagggctccttcaaggagcgtcttgccgcccgacagcgccgccagtatcatcgcacggtttgtaaggctcttggagcctggcggaagcacggacgacgcgcatttgaaatgaaacggttttactgctatttgagttgacataatttttagagcttgtccctaaacgattttgccttttttagaatttccgacacagcctgcatatcgcttgactctatcgcctttacgagccttccgaggcgctcggagaactcgccgagagcggagagtatctcggcgcggttgtcagttattatgctttcccaaatctgcggggaaccggaggccacgcgcgtggtatccctaaatccagggccggaatacggaaggagatttatgtcgaaatccgcggctgtgtcgcatatgagcgcggcggcgaggtgcgggagatggcttatgcgcgcaacaattgcatcgtgcagctgggtagaaaccacatacacccgcatgcccattgccctccaaagttcggaaactttttttgcggagtcttcatcggcgttagaaagcggcgtgacaaagcacgggcgcgaatcgaaaagcttttcgtcggcgaaatctatacctattttttcggagcccgccatggggtgggaacccacaaaatgcgccccgcaagaagcaatcggcttggagcacaattcgcatattttgccctttacgcttccgacatcggtgacgaccgcacccttttttaaattcggcgcgatttgcgccgctatgcccggtatattttccgtgggggtgcaaatgacgaccaagtcggcgtccgaaactgccttttcaggggaatcgaaaacttcgtcgaaaatttccggaagaatggagcatttttttctcgtggattcgctcctcgaccacgccgatattttttcgcacagcccgcgatttttcgcggcgaacgcgaaagacgcaccaagcaggcctgttccaagtatggcgactttgcgaaatttcatatttttttaaactaagcaagagcttgcggcgttcaacaaaataatgctttatttttcgcttgcccaactttccccaaagccaagatattttttgttttttcgcatttggcgggcgaaaggcagagattttcagtgcgctaaaaagctggcagaagctccgtttttggctttggcaaaaaataaaatttattccgcgcgctaaataagcaggttaaagcacagtcggcaacacccgccctccgcattccaagctgcctaaaaaatccctcccagaaaataaaattcctaaaaatagccaggcccgccgctcaaaaatcatattatccctcgctcagaatattctccaaagaaaaaactctaccgccacaaaatatcaaaaaaatcgacctattgcgcgcgaaaaaaatttataaaaataacccaacgcgcaatacatcccactaaaaaagagcctccgcaaaatctccgaaaaaaaatctgccgcgcccccaaaaggctccacggcgcaagcgcgcaaaaattacgcttcggaaaagcgccagtcaacgagcgtagcctgcggggttttgcggcggttccacctgttccagccaagctttaccgcaatgtctatcgacttgtccgccggcggcacgcgcccagccatgcgccacgcgactgcgttaatccacccgttgtcgccgagcggtatctggaatcggaaattcactccgccgaaaacttcgggcgccttgtgcagctttaccgatttcaacgcaaaaatcggctcgcggtttccctccccgaacggatggagtatttcgagctcgttcaacagctcgatgccaacgtctgacaaatcgagagttaggcttatgttaactttcggagaaaagtctatgtctttgccgtacttttttattatggcggcatttatgcgccttctaaattcgtcaacccctccgctctttaccgacactccgacagccataggatgccctccccagcttccgagcatatccgcgcactcggcaaggcatgcgaccaagtctatcccgtgcacgctacgccccgaaccttttataaatccggagtcctcctcgccgaacactatcaccggcctgtggaattcgcggctgagcttcccggcgattatgccgacaaccccggggtgccagcgcggatcgaaaacgactacgcatgggtcggaatcgtacccgttttcctcgacctgcttcatagcgtcctccaaaactccgcgctctatgtcttggcgctccttattgatgtcgttgagctcgcaggcggcgcggtagcatgtcgtaaaatcgtcgccgagcatcatttcaagaggcagcgaagcgtcggcgacgcggccgctcgcatttatgcggggcccgagcttaaaggatatgtcaacgggcgttatgtcgtctccgagggctatgccgcttgcctgtatcagtgcctgtatgcctgttcggcgggtggattttaggcgctttatgccgtttcgcgcgagtatcctattttcgtcgacgagcggcaccaagtcggcgactgtcccgagagcgacgaggtcgaggtaatcttttaaatttatttcccaagagcgcttgtcgctgcggttgcgcatctcctttatcagcccgtgcgcgagcttgaaaacgagtcctaccgtgcagagctgccgccagggcgcgccttcaaagtcgaacacgtgcggatttatcaaaatgtggttttgggctgtggcgtccttcgcctggtggtggtcaaccacaatcaaatctatcccgcgcgagtgtatgtaattaacggcctcctcagcgttagtaccgcaatctagggctatgagcaaatcagtctttccagatgacagcgccctttcgagcgccgcttcgctgagtccgtacccctcctccattctgcgcggaacaaaataagaagggttcagcccgaaaagcctcaaaatgctaacgagcagcgtcgtgcttgtaatcccgtcaacgtcgtagtcgccaaatacgaggatattttggcgtttttcaatggcctctattatccgcaatacggctttgcgcaaatttttaagtctgaaaggatcgtcgaggtttgcgagtttcgggcttaaaaacatcttcgcccgcagaggatcagtgtacccgcgctggagtatgagcgcgctaagtatggggcttacaccgaggtatgcccccatgtcagccgcaagctttttgtcgtaatctgcaaactcccagaccattttccccataatatatacacaaaaaagcgccgatttcaaccagaaagacaattttcgccgcacggcatctttaagataactgtcggcatggcaggctttccggctaagcgtcggcattcgcgcgcggttttaaacaagagaacgcgcttaatctttacagttttaagaaggagcgattttatcgggcttccaccctgccgccctccctgctccacgcgactgcgttaatccacaaaacatagcgaatattttaccacctaaaaggataatttttctttgcgcaatatccggggaataccggcatctgcaaaatactccgcaagttttagcattatgcgcaattatggcaaaagtatttttaatttaagcgaacgtagttttaattttttgccgcctgcaattttttccacacacaaacacaatctgcgcataaggataaaaatatcaaaaaagattccaagattagcggctcaaacgtgtgagcactaaaaaatttttaaaaaaaacttgaaaaaacggcagttaaaagtaagcctgtgaagacacaataacccccacgcgggcaattcggacaaacgcttttcgtcccgtcgcggttcgttatattttcaaactaaaaaaagcctcgataaaaaaggcagacgtaaaatgaatattcacgaataccaagcaaaagcactattcaaagaattcggcgttcccgtgcaagacggcgtggcggtcaaatccccctccgaatttgacgccgccatagcggctattcccggcgacaacatagtagtgaagtcgcagatacatgcaggcgggcgcggaaagggcgtgttcgccgacggcttcaagggaggcgtaaaattcgtccccaaatcggaagccgcggaagtagccaagaaaatgctcggcaacaccttgattacaaaacagaccggcccgcagggaagagtcgttggcactctgtacttcgccgaggcggtcgatatcgacaaagaatactacctctcaatcctcatggatagggactcagggaaagtcgcgattgtagcgtcgatagcaggcggcatggacattgaaaaagtcgccgctgaaacccccgaccaaataatgaaaatgctcgtcgatcccgatatcggcctgcaagctttccaaatcaggaggctcgcattcttctttggcttcggcgacaaggaaaaacagaaacagtttagagctctcttgggcggcctctacaagctcttctggcagaaagactgctccatggtggaagtaaacccgctcgtcctcacaaaagacggcaaaataacgtgcctcgacgcaaaagtttcattcgacgacaacggacttttccgccaccccgaacttgaagccctcagagacccgcacgaagaggatccgaaggaaatcgaagccggcaaatacgggctcaactacatcgccctcgacgggaacatcgcctgcatggtaaacggcgcggggctcgctatggcaactatggacatcataaaacactttggaggcaaccccgctaacttcctcgacgtcggcggcggcgcaaccgaagagtccataacacaggccttcaatattcttttaaaagacccgcacgttaagggaatcctcgtaaacatattcggcggaattatgcgctgcgacgtaatcgcggcgggcgtaatcgcggctgtcaaaaacgtagggctcacgcttccgctcgtcgtaaggctcgaaggcacaaatgtcgaactcggcagaaaaatgctttccgaaagcggcatcgccctcacaacggccgattcgctcgcggacgccgcggagaaaatcgtaaaaatcgtagccgaacaaaagtaaaccttaaatttctacaaaaatgagcatactcgttaataaagacacaagagtggtaattagcggcattacgggcaatacgggttctttccacacccgccaatgcatggaatacggctcaaaaatcgtcgcgggcgtcacccccggcaaaggcggaatgcttttcgaccaaaaggtcccggtattcaacaccataagggagtcggtagaaaaagagggcgcaaacgcttgcgcaatattcgtcccgccggcattcgcggcggactcgattctcgaggcaatcgacgccgaaattccactcataataacaattaccgagggcattccggtaaaagatatggcgatagtgaaatcgcgcctgatgcaaaagggctgcaaatctcgcttaataggccccaactgccccggtgtgataacccccggagaatgcaagataggcattatgcccggatacattcacaagcccggcacaataggcattgtaagccgctcaggcaccttgacctacgaagctgtttggcagacgacatgcctcggatacgggcaaagcacggtagtcggcatcggcggcgacccgattaacggcacgagccacctcgacgctgtaaagatgttcaacgaagaccccaacaccgaagccatcataatgattggcgaaatcggcggcgacggcgaacaaaaagcggccgcgtggctgaaagaaaactgcaagaaacctgtggctgcattcatagcgggccgcaccgccccgaaaggcagaagaatgggtcacgcaggcgcgatagtctccgggaactccggctctgcggacgacaaaattaaagccctgctcgaagccggcattgcagtgtccccgacgccttcggcgataggcgaaactctcataaagcactggggtaaataaaaacctgcaaaaaaacgaagtctattttctgactgttttttaaagtagaaaaatttatttccaaaacgaagaggcctccgcattgtgcggaggtcttttttttgcaaagcgcaatttgcgcttgataggataactttatccccatagagccgaacggaagattcgccaccgtttgatactatggatattcttgcgaaataggcattttcagccaattcactccaacaatgcttggtttggctcttttggcaaaagtcctgccgtcgattttttagttggcgagaaacattttcgtttcagtcgtaccaagctcattcttttgttcaagtcgcaatccgtttcttaaaaaccgtaaatattttttaaaatagcgcaaccgcagttttttttatggcgaccgtttttttgtgtggggttgtgatggtgtgtgtatgtgtgtgtggtgggggggaggggaattatccacataatataacgccgcatttgctcagtcttttacgcgcaaaaaacataaataaaatttatagccaatactagccgccagttccataatataagatttcccagaggtaaattttaaagtaaaatttacggttaatcggaattatattttacacttcaagatgataaaataatattttgattgcatatgtaatacatatatgttataacacataaaaggagacgacatatgcaaaagctgtttatatttacgtttgtcattttgatttgtgcatgcggcgcatttgccgaaacagacatcaaagacagaatagagtatttgaaacaaagaatagagtatgccgaagatgacataaaggaatggaagaaagagctaaagtctctccaatcgcgcggcgtattttctaaatacacctcaaagcgcggaaatattagagagagcgacgatgaggttcctgttaatctcaacgctgttttaatggtaaacaacgcaagcggcgcagcaactgcctttttggggaaaatagatgggaagacttacataatctccaatttgcacgttctcggagaaatgaaaaacgcaaaaataacaactatcgacggcaaggaagtgcgcctccccaaaacctgctttctccaaaaggggtttgacgtttttcttgcagagttggacgaagttccggagggcgtttccccgttagagatttccaagaatgtaatgacggacacaaatttgaaagatgatttagttgtaagcggcaacagccaaggcggaaatgtaatgcgcaatattgaaggcactctgcttgctgtaggtcccaaactgcttgaaaccgactgcaacttttacaagggcaatagcggcagtcccgttatacatagagacagcgggaaagtcgtaggagttgtttcttacattatgactatcgacgacgacctttcgacgagaataacgagaaaatccaaagcaaaaaatttcaatatgagattctttgcatataggctcgacaccatggacgacaagacggaaattccctatgagaccgtcatagagactatggacgttctaaataaggccgaaaacaagtttgagctgatagtcgatttcttggcaaacgataagaatccgcccgcgtcggaataccccgaacttgcgcgtgtggcaaaaagctacgaatcggcgattgacaacgcataccgcgtttccagcaactggtccgcaaaaaagagggtaaatgaagcaaagagaatgcttcttagcagaatcgagctccttgcggccgctgaaatcatgaagttgaaatccggaaagtacgacgatgttttcagcgaaaaatacgacggcattttaaagagctacgaaaacataaaaacctactgcaacaaaaaggcaaaagattttatatagcgcccgcaaaccatagaattatacgctaaaagcaaaaccaaagaaaattttaggccgccgcaaaaacagcggcttaattattgcaaaaaaccggtagcagacaacattgggcgatggaaataaagcggcaatttggctatccacctgcggattgcaaaaatccggcggcatatagcgtctggcaacgctcccatatgtgccgttcccaatactttggtagaaactaccctcgcctcccccgattgcaacggcaaaaaaacgcgcaaaaaattttttgcaaaaaaactcacaagaaaaaatgtagctttttgcattcaatagcaaagtctcccggagatttttttataaaattatttatgcaaaaacctgcccgccctccctaaaaaactgcaagaaataaaaaaaacgcctcagaaaaattcggaattaggcgggaaaaaaaggtagctaaaaatctcgatttatcaccaaaagttagcccgataaaatcagcgaatccagcgcaaaacctcttgcccaataaaaaaaacctaccgcgcaataaattcatataaataaaaaagggactgcgaaaccgcagcccctttttagtgagattaaacccgattagctcaagcgctccaagagagcttcgcgctcaattttcagagccttgggcagcatttcgtacaactcctcggagagcggctgtgccgataccgtggcgggatcgtacgacatcaattcttcgaaggtttccttcgagtagtcgagtccgtcccaatcgatgtcttcgtaagtcgggacaaagccgatagctgtctcgcgggccttcgcgcagccgttctggcggttgacaatccaagcgagaacgcgggcatttgcgccgaatccgggccacataaagttgccgtcgtcgtccttgcggaaccagttgacgtggtagaagcgcggggtctggctgaggtgtttgcccatctggacgaggtgtccgagatagtcggccatgttgtagccggcaaagggcagcatagccatcgggtcggaacggagctcgcctgccttgccttctgcggcagccgtgcgttcggaacccatcattgcgcccagatacacgccgtgtgtccagttgaaggattcgtaaacgagcggtatgcccttcggcctgcggccgcctattactatcgcggaaatcggaacgccttcaagcttgtcggcgttttcgtcgaggcaggggcagttcgccaacggagccgtaaagcggctgttggggtgcgctgcggtcgtcccgctttcgggagtccaatcgttgccgtgccagtcgatgaggtgcgccggaggttcttttgtcatgccttcccaccaaacgtctccgtcgtcggtcagtgcgacgtttgtgaatatcgagtccttcgagcaggagatcatcgcgttggggttggtcttcatgctggtgcccggagcaactccgaagaagccgttttcggggttgattgcatagtgtctgccgtcggcagcgggcttaatccaagcgatgtcgtcaccaacgcatgtaatcttccagcccttggcttgcaattctttcggggctatgagcattgcaaagttagttttgccgcatgcgctcgggaatgcgcccgtcacgtaggtctttctgccttgcgggtcggtgacgccgagaatgagcatgtgctcggccatccaaccttcgtccctgcccattacggaagctatgcgcaagctcaggcactttttgccgaggagggcgttgccgccgtatccggagccgatgctgatgatttcgcgcgtttccgggaagtgggtgatgtaagtgttttcggggttgcacggccagagaacgtcgtcttcgggcgagttaatcggcttgccgacggagtgcacgcagggaatgaatttgccgttttcgccgagaatgtcgaataccttgggcgaaacgcgcgccattatgcgcatattcactactacatagggggagtcggttatttcaacgccaatctgggagattggtccgcctatcgggcccatgctgaaaggaatgacgtacatcgtgcgccccttcatgcagccgctgaaaagttcgttgagtttttccttcatttcggcggggtccatccagttgttggtaggacctgcgtcagccttggtcttggagcaaatgaaggtgcgcgattccacgcgggctacgtcgcgcgggtcggaacggaaatagtagcttccggggcgtttctgctcgttgagcttgatgcacattccctttttgatcatctgatcaaagagtttatcggcttcctccttggagccgtcgcaccatacgacgctgtcgggcgtcgtgtgagctgcccagttgtcgacccaggctacgagagccttgttttttattgtcttgggatctatcattattatttttctccttgtttgttaaaaagggatttgtttataaaaattcgagttgtttttacggcggaaaatatttgattcaactcttttttttaaaaaaattagacatttttgtatcttttttaagattttagccgttttgaggcgtttttgggcggctttgtttggatatccagaacacaagcagcagcgcaacaataaagaatgcgtatccgaaagtttcgtgccaaaagaaataattttcctttcctgctatgggagctacgagaattatcgagactatcctcatcgaatttaaaacatatcctaggattccggaaataaatattatggacaacctctttacgactgacgcgtcctttctaaaaaacgacaaaactgccgacaacacaaggcacgaggatattatgccgaacccgttgcattccgtggccacgaggtacgacgcaccgtcaacattcatcgctatctggggctcctgcccccttatcaaaaacagctggacggtatcgttaaatttggaaagtacaaatgccgacaattttcccgcccagaccctcaatggaaggtcgaaaatttttatcgcaaacgaaagtatcgtaaaaatgtaaaaagctcccccgaccgcgagtacataccttttgcggtcaaagcacgcaaaccctatggagacgatgaatgccgacaccccgaaaagcgtaagcatcacattcgcaaacacgccgaatagtcccgcgcaaaagaacgccgcgtacgccacagcaagcgccgccagaacatttttattaaaacgcggcttgtgggggaaaatcccgtgctccatagccatcacaattcccgccacaaccaatattatgaaagcgtcccttagttgctggctgtcaacaaccgcctttccaagccagtatagagccggagagaatcccgcggcggctcctatccacgcgaggtattcgagccaacctccaccggaaggcgattcttcgggctgcgggttcgtattagaaatattgggcattttttataatagatttttataaaagaaaacgccgccgcgagcgcgttgcaacaaaaatttgtcttgcccgcaaatcggaatattataaattttataaacgattcccaagtttgaaatgaaaagaagaaaagcgataaaaatagccgcgacagccgcggcggccacaatgttttcaagcgcccgcgccgcctttaaagacagagcgccagaaaagaaagagtacagggccatcgcaaccgacagattctacgaaagcgcaagccccgacgacattttcccaaaaatttttgaggctggcaaaaaatcccagctatcaatccgcctcccaagctccgccgcacaaacggaaaatctgcgctttgtttgcgcgagcgaagacggctttgcgctcgatatgtcgccatacttccccgaatacagaaccctccccaacgacaatatccccggatacgccaagcagccgccggacttttcgtcgaaaactccgcctgttgcgtttgaattgcgcggggacttcgcgaaattcgataatattgttttcccgaaggaaggcagatacgtattttgcgcaaaagacaaaaaaaatgcgacactattgcgcgcctgggtttacgccttaaaacccgacctgttcgagcttcgcccgtacatcggcgacatacatatgcacacgacccattcggacggcagggattcaaacctcgaaatggcgctcgtcggactttcgcgcggattcgactttatggcggtctccgaccacgggcgaagaatcggctctacaagcctaatcgagaaattccgcggtgttccgacttctctcaaactctttccgggcgaggaagcgcacggctccctcctccacataaacaacttcgacagctccggcggaatagccgaatgggtgcgggaaaaccgcgccgacttcgacgcccgaaccgaaagaattttaaagacaataccggaatccctcgggcttggcaagctcgacaagctaactctcgcccaatccgaggccgtctttgaaaaaatacgcgagatgggcggcatgtcggttttcaaccacccctactggcgcagaaacggcgaacagctcaactgctccgacgccctgcgcgacgccctcatcagccgccagaaattcgacgcctacgaaattgtaaacggctcaataaactacgattccagcgacctttccgccgcgcggcacgccgaggccgcccaagacggatattttatgccgatagtaggctgctccgacgcacacaagtccgacgagctcggctgcggaattaccgtcgcctttgccaaatcgaaagagtccgccgacatccgcaaggcgataatgtcgctcaacacaatagctgccgatacttcgggaagctttgagaggccgaaaatgtacggaaaaatgcgccttgtaaagtacgcctccttcctctggaaaaatttctttccgctgcgcgaaaatctttgcgcgaagcaatccgccgccctccggaaatactttgaaagcggcgcttctgacgcaagcgtctcaaaagaattagaggcgagcatcgccgaactggaaaaattgtacgcaaaagtatgggcttagcccgccgtccgcgctctcaaatgcggaaatccggcaaatatagcaaaacttttttcgcgcaaaagcccgcctgtgcgccgaatcttttagactggtaaattggcaaagaatttttcgggcgaactcgtaaaagcgcgcttgcaagcattgcgttttttataagggcagcctttggctcagctatccatattattgcaaaaaagtccggattttgcgggttattattttttgcggcggatatgcgcactgcgccgaaaggctcaaattttttatggataaatcgcacacttcacacccgcagcaatttttacggaaacctcaaaaaaacagttgagcaaaagttatttttttaatttaaattatttatattaagattgttttgtaagatacatagacaaaaaaaggtagtaaaattccgtaatttttgcaaaaagtgttgacctcgatgaaatttggattatttgtggcgg

SEQ ID NO: 1337 - DNA, 10336 bp, Unknown
  16S sequences of unknown bacteria
agattttacctttaaaaattaggaaaaatgcccatgcccagtataagtttccattttcacgactatactgttattaacctatttttcccagaacaggaaggaggatacagatgagacaaaagcaggcagacgcgcctcccgataccaggaaacagcagttaatggaagatctgcgccgtaccaaatgtgcactggaccaggcctattccaattttgaaaatgtagtggatcctgacttgatagactgctccatctatgaactgaaagcagtgcagatgcgctaccgttttcttctgaaacaggcagaattactggaaaaagcgacttagagattcgttgacttctttttcttcctgtgctactcttaagacaatggttttttatgctataatttacgaaaacagaggataagcaaatggaaaagaaaaagttttatatgaccacagccattgcctatgcatccggaaaaccgcacatcggaaatacctatgaagttgtactggcagacagcattgcccgttataagagattcgagggttacgatgtatttttccagaccggaaccgatgagcatggccagaagatcgagttgaaagcagaagaagctggcgtcactccgaaggaattcgttgacaatgccgcagatcagattaaaaagatctgggatctgatggatacttcttatgacaaattcatccgcaccactgatgaagatcatgagaaacaggtacagaaaatcttcaaatatatgtacgacaagggagatatctacaaaggttcctatgaaggaatgtactgtactccctgtgagtccttctggaccccgtcccagctggtagatggcaaatgcccggactgcggacgtgaagtacagcctgcaaaggaggaggcttatttcttcaagatgagcaaatatgctgaccgtctgatcgagcatatcaatacgcatccggagttcattcagcctgtctccagaaagaatgagatgatgaacaatttccttctgccgggactgcaggatctgtgtgtatccagaacctccttcacctggggcattccggtcaccttcgatccgaagcatgttacttatgtatggctggatgcactgaccaactatatcaccggtatcggctatgactgtgatggagacagcactgagaacttcaagaagctgtggcctgcagatctgcatctgatcggtaaggatatcattcgtttccataccatctactggccgatcttcctcatgtctctggatctgccgcttccgaagcaggtattcggacatccgtggctgctgcagggcgacggcaagatgagtaagtccaaaggaaatgtactttacgctgatgaactggttgatttcttcggtgtagatgctgtccgttactttgtacttcatgagatgccgtttgaaaatgatggtgtgatcacctgggaactgatggtagagcgcctgaactccgagctggcaaataccctcggcaatctggtaaaccgtacagtttccatgtccaataaatatttcggtggtgtagtatccaacaccggtgtagaggaagatgtggatgctgacctgaaggcaaccgttcttggaactctcaccaagaccaccgagaagatggatcagctccgtgtggcagatgccctgacagagatcttcgcactgttcaaacgctgcaacaaatatattgatgagaccatgccttgggcactggccaaagatccggagaagaaagaccgtctggctactgttctctacaatctggtagagagtatcagctacggtgctgctcttctggagtcctttatgcctaccacttccaagaagattctggctcagctgaatgcaaaaccaagaaccatcgatcagatgactgaatttggtctctatgagtccggcaccagagtaacagagactccggagatcctgtttgcccgtctggatgtcaaagaggttctggcaaaagtagaagagcacaaagctgctcaggctgcagaggctgctcagaaggaaaatgtcattgatatcgaagcaaaagaagctgtatcctatgatgatttcgcaaaactgcagtttcaggtaggtgagatcctttcctgcgaagctgttccgaaagctgataagctgctctgctctcaggtgaagattggaagccaggtacgtcagatcgtatccggtatccgcagcacctacagcccggaggagatggttggcaagaaggttatggttcttgtaaacctgcagccgagaaagatccgcggactggtatctgaaggcatgcttctgtgcgcagaagatgctgacggcaagctttctctggttgctccggaaaaagagatgccagcaggcgctgagatctgctaattctataaaataaaaatgaagccttcgcacatatttttcagattcttgtcatatagttttctgatcatcactgtgcggaggctctttttatgaaaaacaggaaaaaacttctctttattttatttccacttctgatcctgctcatcttacttgggcggattcttttccacccctccttttccacctatacatcccggcttttccgtcaggaactggcacaggatacgatcaccctgcattataccttaagcgatccagaggcttatggttttaaaaatatgtccgcctcattaggcgattttacatatgcttcctttcagaaaaggattcaggatctgaaagaccagcaggtctctttgcagaattttctggatcaggatctaaatgaacaggatgccatgaccgccgaacttctggactggtggcttaccggtcagatagagatggaagatttctattattttcaggagccgctgggaccaacacttggtgtacaggcacagcttccggtactgctggcagaatttgcttttcggaaagaagccgatgttgatctttatctggatctgctaaaacaattgcccgattattttgcacagattatagattttgagcgtgaaaaagcctcccacggtatgttcttaaatggagaatccctggatcagatccttgcccagtgtaatgccatgctgacagtcgatgagcatcattttctaatcacatccttctctgaccggttgcgggactgctcttttgtaagcgacagccaccggactgcctacgaaatccgcaatcggcagattattaacgattgcgtagttcccgcctaccagtctctgattacttctctgggccaactacgttcaacacagaatcaggcactggggctttatcacactcccggtggtctctcctattttgagcacctgctgaaatacaccgtaggaacgaatcttacaatctcccagatcagccgcctgctggatgatcagatggagaccgactatgagacagtctatgcggcgattgaagaggggatcgatctgttggagtatgattctgtcgcaacggcagactctgatacggcgaactcaaatgcttctggcgacatggcttctgcacagactgcctccgacgcttccagcccgctctatatccttcttgaccttcaaaaaaagatcaatgaagatttcccaatgcctccagatacgaattttcaagttaagacagttccagactctctggcgccttacctaagtcccgccttttatctgaccccgccagtggatgccacccaggaaaataccatttacatcaatccttcacaaaatacggatgggatcacactgctcaccacactggctcatgaaggttatcctggccatctctatcagcatacctttgaacaactggattcctatgatccgatccgaagccttatctatgtaggcggttacacagaaggctggggattatacagtgaactctatgcctatgattttcttgatatgaacaagaccaaggcaaatgccctgagggcattatcatctctgaactatgccatctgcgcaagcctggatctgtccgtacacggcatgggctggaacgaggcacaatgcgtcagttaccttgcctccttcggaatcaccgataccacacagatccacaagctctacctgcagcttctggaagagccaggcaactatctgaaatattaccttggttacctggagatctgcaaactaaaagagagcgctctcgcactctcttctaactggtctttatatgattttcataactggttcctgactaccggaccggctccattttccattctcaccgaacacttagaggaccttgaaatatccccgaagcttctcaagcgcatgagccaggacttccatctcctgtccgtccagcccttccatgacggtcgaaaccattttttgatgaaacgccgcatgcttctcgtaggctgacaaccctttatctgtcagtgacagaagcaccactcgcttatcctgtgcactgcggacacgagacacataccctttttttaccaggttgttgatggctgtggtcagcgtaccaacggtcactgccatctcaccggctaccgtagacatatttttcggttctccaatcccaattgcatcaataatgtgcatgtcattgatggagatttccttaaatgtacctgtgatcagggctttctgctccacgtccagaatttcattaaataacatgaccaacaggtcgttcagcaaattttcctgattcacactcatctacgctcaccgtcctctttttcttgtcacagtatagcacaattcggacagtgccgcaatgattgcttgcaggtagaaaactcataaaagcccggagtatggcataaaaacaagcttattcacccttttatttcttggactctgccagatctttatctttgtatccgaacatccaggtcagtgcaaatgcaacacctgcggagatcaggaacatgatgatataattcaacggatcattcaggcacagcagcagtccgaagataccggtcacaccggtaccggttgcaccaagtcccacgatggaagcgtacagtgcaccgcacgcgccacctgccgcaccgcagatgaacggacggaagaaacgtaagttcacaccgaagatcgccggttctgtgattcccataaagcaggacattgcagacggtactgccatggatttgatcttgctgtttcttgtcttcagggcaacagccagtgctgcagctccctgtgcaatattggctgcagatgccagcggcagccagaaagtctttccgtaaagtccaagctgcgccacatcgatcaccgtatacatatggtggacacctgccacaacggttgcagagtaaagacctcccataataaagcttccaacgccaaacggaagtgtgatcaactgctgaacaccaccgataattgcattttcaactgttacgaataccggtccgatgatagagtaagtcagataaccagtcacaaatacgctgaccagcggagtaacgaacaggtcaaacatggccggtacaatcttgtgcagccgtttttcaatgaaacacataacaaatacggcaataataaccggaataacatgaccctgataacctaccagatcaatcttataaagtccaaaccacacactctgagtctgctttacaccttcggttgccacggtccacgcattctgaagatctggatggatcatcagcataccgattactgctcccagatactggtttccgccaaatacctttgctgcactgaatgcaatcagaatcggcaagaacacgtatgcagtatttccaaaaagattagcgaacacaaatatagagcttgatgtgtcaatatttacaaatccattgtttaccatgaaattcagtgcttccatgatacccataagaaatccgctggctacgatcgccggaatgatcggtacgaagatgtcgcccaacgtcttgatcgcctgcttataccagggctgttttgctgcagctgctgccgttgcttcctctttgcttgcaccggtcagaccggacaccgcaagaaattcatcatataccttgtttaccacacctgttcccagaatgatctgaacctgtcccgatgcactgaacacaccttttaccccatcaatatcttccactgcttttacatcacatttttcattgtctgccagcaccagacgaagtctggtggagcaatgtgctgcggaaacaatattttccttttttccgactttttcatagatctcttctgcaatctttctgtaatccatttccttctctccttttatctcttataacgctctatggctgtcctaagtcctgtttccccaaatacttctatgtggttttcctaacaggacaggaagtctcctgttacatgttctccatgtacttccacctgatagtttcccgtctccgggtaaaatctggttgaaaatacatctttgccgccatttaagaacacttctacacaagaagcatccacaatgatccttgcatctgtcacttcatcaagctcccgaccacggatcgtccggccgcagcccagctctttgtctgtaaattccatgcagaacagttttgcttccggatcataagacaactccagtccttttgacaggatcactttccatgctccctctttgggaagcaatgtcagttcatagcagtcggtctcacaatgtttctcataagatccttcaaaccgctctttctgtttccatattgttccaatctcgcgcactggattctgacacaacacaccgtcccgcacagacaattctcgtgggagagtcagcacatgctgccagccgtcttccacggaacgattggtatactgctcatccgcatctgccattcccatccagccgatcagaattcttcttccggtggaatccacaaaggtctgcggagcataaaaatcaaatccaccatcaatctcccgaaatgctcctggtactccatcagtccggaaatctccatgaataatgcctgctactgtctgatactgattgcggtatttccatccgtctgcttccagtccctgaggagaaatactcagaaccgtatatccgtccagttcatagagatccgggcattcccacatgaatccaaatgtttcttctgactgcaggcggtgaatgcatttccagtgttccttatcttccgaagaaaagaccagaaccacccctttgtcttccttcgttcttgcaccctgtaccatgtaataggtatcatcctgcttccacaccttcggatccctcacgtgacaggtcagatcccacggataatccgcattcgtcatcagaagcttcttggtctcaaaggtctttccatcccggctgaccgccagcactgtgttggattcccggccattgttaatataatcataagtgccttgaagcttcacatttcctgtgtaatacacatacatcacaccgtcttccacaagtgctgagcccgaataggcaccgtgacagtcataaggctgatccggctgaagaggtgcacccttatattcccaatgaaccagatccttgctggtgcataatccccagaattttaatccgccatgcacttcaaaaggcgacatctgaaaaaatgcataataggttccttcatactcacacaatccattgggatcattaagccatcctaccggcggcatcacatgaaaatgcgggatccaccgttgtatgtttttatgcttctgtttttcaactgcttcatctacaagtttttgtaatgttctgtgtaaagcattcatgcttgctgtactcctttcagatctgaactctgtctgcagatcagctccgcatgaagcggatgatcttccctcttctggtcattcggatgatccatccggtaaagcagcctttgtactgccagcgacgccatggtctcatttggctgcgcaatactggaaagggacggatacaaaacctcacataaataaatattatcgaatcctacaatccccacctgctccggaacccggatcttcatcttctgcagaattcccatcatctgcactgcccgccggtcattgtaggcaaagattccggtctttccggtggtcttcgcaaaatgttccttcaatgcggcttcgatcacctgtgaatccttagatgaaataatagtcaggtgctttctgaactctctgcactcatttgccattccatcaataaatcccagatatttatcatctgtggtatttccaaagaaaatatattcttcataaccctgttcatgcagatgtcgcgccacctgtgcgcctgcctcatcatgtgccacataaaaagaatcaattcctgttgcatgtcttgtgatcacaacggttgggatatccagacggctgaccatgcctctccattctgtcccattctcatctaccggaaccatgatcagtccgtccacccggtaacgcttcacaacatccagacactctttttctttctccagatcataatcagagctgaagagaatcagactgtaaccatcctttcttgcttcttctccgatgtattttaccaactccgcaaaaaaagagttggaaatgtcggtcacgatcacaccgatcaggcgggtcttgctccctaccaggctctgcgccattacatttggctgaaaatcatgctctcttgcacatgcaagaacacgttcccggatctctggatttactgctgtatttccatttaacacacgcgaaacggtgggttgggatacccctgtcagtctcgcgatctctgtcattgttatcatgctgcttctccctgtgaatggttgtaaatcgctttttgattgtttgctaaatggttgtgaatcatgcgtgaatacgtattcacaacttctgtgcttatagtaacatgtctatatttttcagtcaattagcacttattcataatattgactgtctgtttttgtgcagaatgcatcatcccattctcgccagcaccacactggcagcgatgcctgcaagagttgacagaagtgctcccgccagtgtccaacgggtctttgacactttggctgtcagaaagtatacactcatggtgtaaaacactgtctccgtgctgctcatcatgatcgatgcgatcagaccaatctgagaatcggttccgtattctttataaatgtccagtgccaatgatgtagcagccgaggaagaaaacaagcgcacgattgccagtggaaccagttccaccggaaaatggatccattgcgccggtactgtcagcagcctcgagatcagttccagaaatcccgatgcccgcagcattcccactgccaccatcaatcccacaagtgtgggcagaatcttcaataccgtatggattccctccgctgcaccctttacaaattcatcataaacaggaatctttgctgccagaccagtgacaagaatatagacgatcagaatcggaattataaaatcagaaatataataaaagagattcataaaaatcccctcggcaatggaatcattctattatatccaatgccgaagggatttataacggtttttctttattttccaagacaaatatcttcaatctcagccagccggtcaatataatagtcagctcctgactgatcataaccaaaccggtcatctcgcttgcagataacgacggtccctgcgctctcggctgcctgcagtccaaaggtagaatcttccaccacatagcagtctttcggctccacacccattttcttcatggtataaatataaatctccggatccggcttgctgtgtacaaactcttgaccactgacaataatgtcaaaataatctgtcagttccaatactccaagattctgcaaaatcttttccttcggagcggacgaggccattccaatatgaaatccactggctttgagtttcttcatcaggggataaatatcttcattcacgattgcccgcaggttaagcggatactctgcattgacctggtcacgacctttattatacgcttcataactcataacgaagtccggtacattttcctgaaacagttcgtacgtatcctttcgatttgatccgcagatctgaaaactcagttcatcagttatcgtaaacccgtttctctccataaatattttaatccgcttctgatactccggctcggaatcaatgataacgccgtccatatcaaatataatatgttttttcatggctgctccttgtcctctatacttttttactctgcttgcatgtctacttatcatccactataataacaaataataatatggcaggcaattatatgacttttataacggaggatatttttatgcacatcaaagaaaatgcaactggcatccagcacattggcatccctaccaaagatatggatgcaaccatattctcgttacttcagtgatgagttaggtgtgcaaattttttggtagaaaacaga

SEQ ID NO: 1338 - DNA, 23385 bp, Unknown
  16S sequences of unknown bacteria
agcacctcatatccataggtgttgatcctgaaacggcggaggctgatgcctgccggattgaacatgatattagcgcagaaacctatgaacggctgaaagaagcaatcgaatacattccggcagaaaacgcatgggtgcctattgaggcagacggctatctctacattaactgcctctgggtgtccggctccatgaagggacatggatactcaaatgatctgctggaggcatgtatccgtgatgctaaggcgcaggggaagaaaggtatttgcattctgtgtgcagagggtcggaagcgggaatttctcgctgacccgaaattccttacttataagggattccgtgtgtcagacatatccgactgcgggatcaatctcatgtatcttcccattgaaccgaccgcgcagatgccaaagttccgggaatgcgcgaagcatccggcgattgaggaaaccggttttgtcctctattacaccgaccagtgtccctacacctattattgggtgccaagagtgcaagaggtggcgaaggaacacggtattccgttcaaggttatccatattactgacaaagaatctgcacagaatgtacctgcgccagtcacgacctatgctctgtttcgggacggtcagtttctgacacagagtattcagtcagataaaaaatttctggcgctgagccgtccttttacataatttacttctgaatctctgcgagtgcttttttaaactgtactgaaaataaaacggatgtaaagagtacagcaataatatcagcgattggctctgccatatatacgcctgtggttgggttggataccatgtgaggcatgatataaataagcgggagcaataatacaaattttcggacaacagcaacaatgatggagttggctgctttgccaagggaggtaaatgtcatctggcatgcgatctggataccaaacaggaacagaccgcccaggtagattttcagcattggtgcagtaaagtcaacgagacttgcatcagcagtaaagatgcctacaaatatttcgggaacaagctgtacagctgcccagagtgatatggagtaggttaagcaggtagtcagcagtaaacggaatgttttctttaccctgtccgcatttttagctccgtaattataactggaaataggctgtgatccctgtgcgattccctgaagaggcagcatagcaaactgcatcacgctggttaaaatggtcatggctccgactgcaatatctccgccataacggagcagggatgaattaaagcaaaccgttacaacactttcgcttgcctgcataatgaaagtagcaagtccaagtgtaacgcaaggaataatgaccttggatttcagatgcatatattttttcctaagatgaagctgtgtttttttaccgcaaaggaaaaagattacccagattgtggaaaccgcctgtgacagaacggttgccagggctgcaccttttacacccatgtgaaaaccaaagatgaatataggatccaacgtaatattgcaaatagcaccgatcagaacggaaaccatagaagttgttgtgaagccctgtgcagtaataaaagcattcataccaagagtcagctgaacaaatagcgtaccgatcgcatagatatgcatataatcaactgcatagctgatcgtattttcacttgcaccaaaagccagtaatatatcttcactccagatcagtaagacagcagtcagaataaaggaaacagcaatctggagaacgaagcagttgcctaatatttgttctgctgactgattgtcccgttttcccatataaatagatgctcttggtgcaccaccggagctgaccagtgccgcaaaagcagaaacaatcatgatgattggcatacagactccgactccggtgagagccagactgccattgcctggtatatgaccgatatagatgcggtctacgatattataaagcatattgataagctgggcgattacggtcgggatagacagcttaagaagcaattttccgatcggttctgtcccaagaaaatctttgttatcctgcatggatagtacctccttttggtattttgtgttattcattcagcatctggcatgcattcactgccatagagtcaatgatttctttataaatatgtatctgttcctcagggatattccgggtaagcttctgattgaaattctgctgcatttccagtccggctttcagaattggctgcgccttttcggtgcaggagagtaaaacctttcgtctgtctccggtcacggatcctctctgcagataaccggcagttaccagtttatcgacatggacagacactaagttcttttttattttccgaaattcgcttatctgctgggcagtacataattcaggattgttgttgagaaacatcaaaatgtcaaaagatacctgtggaatgtcaaattcgtgaagaataggttcgcacattttgttgtaagcatttaatacatcatgaaaaaaagctacaaatgtcgatggagtcatagatacctctctcaaatagtatttttttgaactgtatcaaataatacgataaagaataaggaaagtcaagacaaataatgtgaaatgatggttgttgacgcagtgggacaggtgatttatactgaggacagataatcgtgctggtcacagaatatcgacatggttattagaaatgttttgcaggtgtttcatacgtataagaaagaacaggtgtatcatgaaaagaaaaatcataatggtagtgatgatagttgctgtgattctggcggcagttgcgattgtatcaattctggcacagacaccggcactgatctgatgaagaatcgttgcagagctgaaaatggctataatgccttgacaaaagcaaggaagatatataatcaatattagtgacaaatactattattaaaaatgattttgaaaaggaggaactcgtaatgaaatatgtatgtgacgtttgtggatgggaatatgatgaggagcaaggatatccggaaggcggcattgcaccaggtaccaaatgggaggatgttccggaagactttgagtgtcctctgtgctcagttggtaaagatcagttttcaaaagtagagtaaaatatctttgatgcctcgttgggaaaccaacggggtatttttgtctaaaataaatcaaaactagatggaaaggaatcaaattatggatgggaagaaaatggttgcagcagaggaaaagcatctcatacctttagataaagtcaatggatatgatgtacgtcctgggttttatgggattaacggagcaacggctctcagggaaggcgtaaattttacagtctgttctctggaagccacggccgtggagcttcttctatatcaccggggagaaaaggaaccttatgcaattctgcctttcccgaaacactaccggattggaagtgtgtattccatgattgtttttgatctggatatctgtgattttgagtatgcttatcgggtggacggtccttgcataccggaaaaaggtctgatttttgataaaacgaagccgcttctggatccttatgcaagagcggtcaccggtcagagcatatggggcgaacagcctaatcaggatcatgaatatcgggcgcgggtggtggtcaatgactttgactggggaaatcacgtggatccgatcagacccattcaggatctgatcatttatgaacttcatgtccgcggttttacgaaggatgcctcttctggagtcagtcatccgggaacctttgcaggaatcaaagaaaaaatcccgtatctgaaggaacttggaatcactgcggtagaactgatgcctgtctttgagtttgatgagaccatgggaaggcgtgaagtcaacggcaggacgcttctggattactggggatataatcctgtgagtttttttgcaccgaataccagttatactgcagacaaagagttcaatcgggaaggtgatgaactgaaaaacctgattcgtgaactgaatgccaatggcatagaggtgattctggatgttgtatttaatcacacagcagaaggaaataaaaaaggaccgttcttctcattcaaagggttcgataacagagtttattatatgctgacacctgaaggctggtattataatttcagtggttgtggtaatacactgaactgtaatcatccggtggtgcagcagatgatccttgaatgtctgcggtattggacgattgaataccatgtggatggttttcggtttgatctggccagtattctggggagaaatgaagacggttcgcctatgaatcagccacctcttttgaaaaatctggccggagatcctgttcttcgaaatgtgaagctgattgcggaggcctgggatgccggtggactttatcaggtgggcagttttcctgcttatacccgctgggcagagtggaatgggaaatacagggatgacatgagaagctttctgaaaggagactactggtttgcccaggcagcagcaaacagacttaccggctctttggatctgtataccggtcagtataaaggatatgattcttccattaatttcctcacctgtcatgatggcttttctctctgggatctgtattcttataatggaaaacataatgaagccaatggatggaacaattctgatggagcagatgataaccgaagctggaattgtggagtggaaggagagaccatggatcctgagatccgtaaactccgtctcagaatgatgaaaaatgcctgcatgactttgatgtgcagccgtgggacacccatgtttcttgcgggagatgaatttggagacacccgttttggcaacaataatccctattgtcaggataatgagatctcctggctggactggacacggctggatatgaaccaggagctttatcaatttttcagaaaaatgatctggttcagaagagaacatgcggtgattcggagcgatcagggattgtcagagaccggttttccagcagtcagtgttcatacggaccgaccgtgggaacgtgccattgaccaggatacaaaggctctggcagtctgctatgcaggcaagactgcacagggagaagaccttgtatatctggcactgaatgtgtattgggagaagcagaagtttgagctgccaaagcttccgccagagtatgagtggagatgttttgcagataccgcactggatggatcaggagaagaaaatttcagcgcagccatcaccgagtattggcttcatcccagatcttcagccgtatttgttggagttaagcgcagttgtttataactgctttatctgcaacatggttaatcaccagataatcagaatatttttatgatttgcaaacctgcatttttttggtatattagtggataaagggtttaaaggaagggttagatacatggaaaaaagaaatgcaaaagcgttattaccaattgcggtgtttgtagtcttatatttaggtctgggtatgttatttgaatatggcctggagattgagatgggattttataaaatccctgttgtcgttatatttttgatggcactatttgttgcatgtctgcagaaccggtcactcaaattgaatgacaaactaaaagtaatgggcgagggaatcagtgaccctaatattattacaatgatcattatatttatgctggcaggaatttttgtgggagtagtcggaagatcctctgccaacagtgtggcatattttatattgtcgctgattccacctcagtttgcagtgattgttctgtttgttgtgagctgctttgtctctctggccatgggaacatccgttggaacgatcacactgatcgttcccattggaatagcggtatccagagtttctggattttccacaccactttgtattgctacagtaatgggcggtgcaatgtttggagataatctgtctttcatatctgatacgacaattgccgcatgcaatggacaaggttgtaaaatgacagataaatttaaggagaatttcttcattgcactcccggcagcagttgccagtctggtcataatctgcatgttatctgtaaagaactacagtggtggctttgttcaggaagaatatcatctgatacagacgattccttatattctggtactggcaggaggaatcatcggtctgaatgtatttctggtactgatcacgggtattgtaagtggatccatcatcatgatagcaaccggaatgatagtgccaacagatctgcttggaaatatgggagatggtgcggcaggaatgtttgaaaccagtatggttgccttactggtagctgcaatctgtgccttgatcaaagaatatggtggatttgcagctctgttatactggataaaaaaggtattcaagggaagaaaaggcggacttcttggaatggggctgctggttggtctgatggatattgcaacagcaaataatacggttgcgatcgttatggccaatctgattgcgaaggaaatgtcaggaaattatggaatcagcaataagaaagcagcatctatcctggatacgttttcctgtgttttccagggaatccttccctatggagcacagatgctcgttgcgatctcagctgcaacaggacttggtgaaacgatcaatgcatttgatattttaccgttgctgttttatccttatatgttattgcttagttcgcttgtctttatttcttttgaaaaaaacgcatgatcacagatttttgatgagaaggaatggatgaatatggaacagaattcacagacgccgcataagcgccgtgtacggtataaggggaaatacccgaagaaatttgaagaaaaatataaggagctgcagcctgaaaaatatcaggatacgatccagcatgtgatccagaagggaaatactcctgcaggaatgcatatctctattatggtggatgagatcctggattttctgaagatccagccgggacagatcggatttgatgcgactcttggctatggcggtcatacgaaagccatgttgcagtgtctgcagggaaaagggcatatgtatgccacggatgtggacccggaagagtcggcaaagaccagaaaacgtctggaggagcagggattcggtgaggatatgctgacgatcaaacttcagaatttctgtaccattgatgagatcgcaaaagaggtaggcggatttgattttattctggcagatcttggcgtatcttctatgcagatcgacaacccgaagcgaggattttcttttaaggtggatggaccgctggatcttcgcctgaatcagcagaagggaatcagtgcagcagaacgtctggacactattggaagagaagaactggcaggaatgctctatgagaattctgacgagccatactgtgaggaactggcaaaagccattacggatgagatccgacggggacatcgtgtggatactaccacaaaacttcgggagatcattgaaaaaacgttggattttttgccggaaaaagagaaaaaagagactgtgaaaaagacctgtcagagagtatttcaggcattgcggatcgatgtgaaccaggaatttgaagtgttgtatgaatttatggagaagcttccaggtgcattgaagccggggggacgggctgctatcctgacttttcattcaggcgaggacaaactggtgaaagcggcgctcaaggaaggataccgtgcgggtatctatgaagagtactccaaagatgtggtacgcccgtccgcggaagaatgtgtgcggaatccacgggcccgttctacaaaaatgcgctgggcagtacgggcagaggagtaatttcagagagtgatcacccagtagatcaagccaaggatccaggaggtaaagactccatagaggatgacaggacctgcgatcgtaaagattttagaaccaataccgaagacctgtccttcttttttatattcaatggcagacgaagcgattccgtttgcaaagccggtgatggggaccagtgcaccagcgcctccccatttggcaatagaaggatagatattaaacccggttaacagaacactgagaaggaccagaagaattgagcaccaggtgctggcagtcttctggtccattcctatattcagacccgtattttgtagaaactgcccaagtacacagatcagtccgccggtcagaaaggcttttcccacttctttgggaagattgtgggtgggcgtgacttgcttgacatattcctgatattgttgtttctgttcttcattgatcttcatataaatattcctttcctgaattgtatagttgtgagtcggtgtatggatcctcatgctcagcaatgctcaagcactaccgcgtgtgcgatgccgggaatgctctgtccttcattgaagctgactttggacagcagtgcaccggtggggagaaacagtacccgtttccattctcctcggatcagtctgggcagaatatatgcagctaaagtggttgcagcacagccgcagccggaacctccggcatgagtatcctgtgtatctggatcgaaaatcagcattccacagtcttcatgaagatccccgagcagaattccgcagtcagacaggagatctttgagtatggtctgtccgatacttcccagatcgccggtgatgatccggtcatagtcagagacatctctgccggtgtcgatgaagtgctgacggatggtatcagctgcggcaggagccatggctgcacccatgtgcatggaatctttgataccataatccactacttttccggtggtaataccgctgatacagcagtgagcctgagcggcacaggggtgttcctcggcggcaatgataaaggcaccggaaccggtgaccgtccaggtagttgataagggacgttgtcctgcgtattccaggggaaagcgaaattctttttctgcactggcaaagtgactggaggtcagtgccatgacacaatcagcagcccctccggcaacggttatagaagccagtcccaggctttcaccacaggtggagcaggcgccatacagtccaaacagaggaatctgcaattccatgattccgtaggaagtggcgattccctgagccagcagatctccggcgaacaaatagcggatctgttcctcggtcatgcctgatttttccagaacttttctggcagtgcgaagctgcagttcactctcggcttcttcccaggtgtttttgccgaatttggggtcaggttcaatgcagtcaaagagatgacttaaaggaccgtccccttctttttgtccaacgatagaagcagcttccaggatacggggcggctgatcgtatgtgagtgtggcttttcctgtaatcgttatcatgtctgggttcctttccaataaaacaagatacagatattttttcagatcagaaggaaaaatattcgcacatatcaaaattatgtgaactttctgtaaacttttcaaaatcgcgtgcaaagtgtaaaaaagtgtgctatgctggataaggttttgggcaagtgataggtacatttgcatttttgtggagggacgtacatgagaaaaaaatcacatcttgcgttagcaggttttttgattcagggaatggatcatgaagtattgaaccgcagatggagatccttttattttggaaatattttaccggattgtaaaccatccttcgtgactgtgcgtcatgagtatgatggaacgttcgatatgatggctgagatgctccgggcactggtatcagaggaaggctactggtctattgatacggcaggttatatgatggatctgggacaggtgttccattatattgcggattattttacctatccacataattctcattatccgggaaatatcaaggatcactgccattatgagaatcatctgaagcatggtctgagggcatatatcagaagtggtgaggcagtgtttggcggagccggttataagagaagcttttcgacagttgacgagatgctggagtatattcaggaagcacatgaggaatatatgaagcagccgggcagtgtggaaaatgactgtaaatacattacaacggtctgctccagggtgctggcatccatgccgcagtttgcagaggttccagtgatggcatacgcaggctgatcgtgggagtgaataatactggcttgaaaattattttatagagaatatcattggcgtcatctgaagccaatacaggattgaatcgcagaaaaggtgcatccagtgagatgccgtattctgcgatttattttttaccagattttgtccgtatggtgtctggtcttttgtagagctgatgaggtataatgaatctattcattagaatcaatataataaaggggagcagatatggcattacagttgatccttggaaatgcgggagcaggaaaatcccactatatatttgaaaaaatcatacaggaatccatggaacatccgacaaagcaatatttgatcatcgtgccggagcagtttaccatgcagacgcagaaggatctggtcatgatgcatccgcgtcatggaatcatgaatatagatatcttaagcttcgagcgtctggcacaccgggtcttttcagaggtgggcggtgagcaccggaagattctggaagatacgggaaagagcctggtgcttcgaaagctggcggaggagaagaaggatgaactgaccctgctgggaggaagcctccgaaagctgggatacatttctgaggtaaagtcactgctgtcagagttcgtgcagtatcggatcgaaccggaagaccttacacagatcatggagcagaataagagtaatccccagttgtattttaagctgaaggatatgaaggtgatctatgaaagcttccgtcagtatctgaaggacacatatctgacagcagaggagctgttgaaagcgctggaggatacggtggagcagtcacggtcagttcggaacagtgtgatcgttctggatggctaccatggcttcacgcctatccagctgggactgatcggaagattgctgacgcttacggatgaattgtatgtgacgatgacactggatcacagggaagagccatttcagatggaggcggagcatcagctcttctatgctacgaaaaagacgattcaggatttgaaaaaagtagctgagcagacaggcgtggagattcgaaagcccatcatgcttggaaaagataaaatctggcggtataaggatgcaccggcactaagatttctggaggagcatatctaccggcacagcagacggttctggaacgaagaaaccgatgcagtcacattgtttgcagcgaggacaccccggtcagaagtggagtgtatcagcagagagatcctgaaattagtacgggatgagaagttccgttatcgggagatggcagtggtcactggagacctggatacttatggaccactgtttgaacagacctttgcacgattggggattccgggatttatggatgccaagcgggatgtgctgaagaatccgtttgtggagttcctgcgggcgctattgctggcagttcaggaggatttttcttatgaatctatgttccgtctgctgcgaagcggcatgacgccggtggataggagagagacagatctgctggaaaattatgtaatcgccagaggtatccgtggattctccggctggaaaagggaatggaaatatccattgaagcagatgacagaggaggaactggcagaagtcaatacgcttcgggaaaaggcactgtccggtctggaaccactgcgaaagagcctgaaggataaaaaggcagatgcggaagttatgaccagaagtatctatgaatatctgacggatctgtctgttcaggagcatctgcttcagtatgagcagcagtttgagcaggaaggaaatctgagtctggccaaagagtattcccagatctatggcatggtcatggatctgtttgacaagctggtcatgctgcttggagactgtcaggtctctctggaggagtatgctcagcttctggatgccggattttcagagatgaaggtgggactcattccggcaggtaccgatcaggtggttgtgggagatatggagcgaagccgtctgaaagacattaagatattgttctttgcaggagtcaatgaagggagtgtgcctcgtcagaaagacagcggcggccttctttctgaaatggaccgggagaccttgttatcacagaatgtggagctgtcacccacatcccggcaggagacctgtatccagaaatactatatgtacgtgaatctgacccggccttccatgagacttaaattatcctggagcctggcggatgagggtggtaatgcactgcggccgtcctatctgatccgttcagtgcaggaattgttcccacaggtggctgtggagacagaggcagagcaggagctgttggatcgtctggcttctccggaaggaaatttaagtgatgtgacggaggctttacaggcagccagagaaggaacctatgatgctcagcagaagatgctggccagatggtatgcggagcaggcggactggaatcagaagctggaccgcctgatggatgcagtcttttacagtcgaaaggaagaacctattggaaaggcagtggcgcggactctgtatggaacccttctggagggaagtgttaccagactggagcagtttgcagcctgttcgtatgcacatttcctgcagtatggtctgcgtctgaaggagcgggaggaatacggtcttcaggcagtggatatgggaaatgtctttcacgatgcacttaaatatttttcggataagatcgaggccagtgaatatgactggttccatgtaccagaggagaagcggactgcctggatggaagaggcactggagcatgcccttcagatctgcgcagaaaaaggtctgggggaggaagcgaccgatgcctataccatggagcgtatgaagcggatcgggcagcggacagcctgggcattgatggaacagcttcggaaaggtaattttgcgccggagaagacagaagtatcttttcgcaatctggagcagcttccgagtgtatcggtattgttgtcagaggatgaacgcatgagacttaagggacggatcgatcgtgtggatatctgcagagagcagggaaatgtatatgtccgagtcattgattataagagtggatcgacccggtttgatctgaccagtgtgtactatggcttgcagctgcagcttgcagtctatctcaatgcggcaatggatatggagagccgggagggtggagaagttcatccggcgggtatgttttattatcatattgaagatcctatgctggattatgaagaagaggaagataccgaacgacggatgctcaaagagctggcattcaacggactggtcaatgcagacctcgaggtggtgaagctgatggataaggaattgcatggttcctccgatattttaccgataaggcttaaaaaggatggaacttacacagcggcatcttccgtggcagaggaacaagagcttcttagactgtcccgtcatgtaaaccgaaagcttacagaatatggacagcggatcctggcaggagaggtcagtctggcaccttatgagctgcaggatgacaatgcctgcaggttctgtacatttcacagtgtctgcggatttgaccggcgcctggatggctgcgagaagcgcagactgacaccgttaaataaagatgagatctggagacggcttgaggaggaagaatcatgagtgttgtatggacagaagatcagagaaaagtcataaatatccgcaaccggaatcttctggtatcagccgcagccggttcgggcaagacagcagtgcttgtggaacgaattgtctccctgatcacagataaggagcacccggtggatgtggatcgactgctgatcaccacatttaccaaagcagcagccggggagatgaaggaacgaattggaaaggcactgagcgagcggctgaaggaggatcctcataatgaatggctgcagagacaggaatctctggtgcatcgggcacagatcactacgatccatggattctgtctgtatgtgatccgcaattactttcatacgattgatctggctcctaatttccgcattgcagatgaaggggagatgaagcttttaaagcaggacattgcccatcagatcgttgaggaataccatcggcagaaagatccggcattcatccgttttgcggacagctatggaaatggaaaccggggaaatggtctggaggatatgatccttaaattatatgaatatgccattgccagtcctcagccggagaagtggcttaggagctgcgcagatgcttatgatatgccggaggatggaggctggagtgattttgccgggcaggaagaactgcttgcggaacttcatacagcagcgggtgatctactgacggagattcagaaggcgagaaagcttgcacagcttcctgacggaccgcaggcttatgaggaagcattggcgcaggatgaacagcagcttacgtatctggtagaaagtgattctgtggagtgtttccagaccggactggaaggagtctcctatgtgcgacttcccagccggcgttccaaagcgatggcgggtgtggatgatgcgctcatagatcaggtcatggagcttcggagtgtcatgaaagacgggctcaaagatctgcagaagcagtattttgatattccatcagaggagcagtttgctcagcttcgtgcgacagcagaactggtacggatctatgtgcaggtaactctctcctttatggaacagctgacagcggaaaagcgaagaaaaaacattctggattttgcagatcaggagcatctggcattgaaaatactgacccgcgaggtggatgggaagctggttccgtctgagaccgcagatctgtttgcagattattttgcagaaattatggtagatgaataccaggattccaatctggtgcaggaggcgatcctggaaagtatcagtaaaagccgcagagggcgggataatcggtttatggtaggagatgtgaaacagagtatctaccggttccgtcaggcagagcctggactttttctggaaaaatacgcgcggtatggcacagaagatggtggtgtccgtgtggatcttcatcagaatttccgaagccgtaaagaggtgcttgatctggtcaatgtgatctttgaacggatcatgcgaaaagaagtgggcggcatcgaatacgatgaagaggcggctctgaaagcgggagctgcttatccagagacagagaccacaaagccagagctgctggtgcttacgaaggaggaatgggagaagctggagccggaatgctgctggacaaaggtggaggcggaagcacatctgatcgctggaaggatccgaaagctgatggaagagggacaggtcactgaggatgggaaactccgtccggtccggtatggagacattgtgatcctgcttcgtaccatgtcaggctggagcgagacctttgtgagagtgctgcaggaggaaggaatccctgcctgtgcgcagtccagagaaggatatttccagactgtggaagtggagacattgctggcgtatcttcgtattcttgataatccgacccaggagatcccgctggcagcttccatgcatggattgctgggtggattcacatccacggagctggcacagatccgggcaggggaagatcatccgggattctatgatgcttgcagagcctatgcagagaacggcgagcaggaggaactgcgtcagaagctgcagcgattttttgtccagatggagaactaccggcagcgggcaacctacacatcggttcatgatctgctgtgggagattctgacagagaccggatatctggatcagatccgggcactttcaggaggagaacaacgtcttgccaatgtggagatgttgctggcaaaagcaagagattatgagaagatcagttaccatggactctttcatttcgtaagatatattgagcgcatgaagaaatatcagatggatttcggtgaggctgccatgaccggtaagaacggtgaggcggttcagatcatgagtactcaccacagtaaaggtctggagtttccggtggtatttgcagcagggctcggaaagacctttaataagcaggatgcaagagaaaaagtagtctgccacaatcgctggggattaggacttgactatgtggatctggatcagcgtatgcgaagagcaactctggtcaagcggctgatccgcagacagaaccagcaggacagtcttggtgaagagctcaggatcctctatgtggcactgacccgtgcaaaagaaaagctgatcctgactggtatggtaccggaaaaggttctgggcgagaaagcagacgaacagctgtcttttacacagatcaccagtgcagacagttatttcaggtggataatcccggcactgtcagaggacacctgtggaaaacagtccctgatcgatgtgcagatggtctctcttgagactgtgatccgggaacagatccgacagaccatgacgagagaactgtccagaacagagctggagcagagccttctctatggtaaaaaggatgaagaactctataatcagatcaatgagcgactttcctggagttatccatggaagatgcgggagactgcccggcagaaatatagtgtgacggagctgaagaagctgcgtatacaggaagaatccgatgcagcggaggaattatatccggagacagacatggttccgttgattccgcagtttatccagaagacagaggaaaagacaggagcagccagaggtaccatctaccatacagtgatggagtggctcgattttgaacatctgatagaattacgaggagcacatgttccgaagatgaaggcagagctgcagacattggtggacgcaggaaaactatcagaggaggaacttcgtgcagtcaatcccatggatcttcttgatctggcagaaagcgacctttcggagcggatggcggaagctgcttccaggggcgagctcttccgggaacagccatttgtcatgggcttgccagccagtcaggtggatggaagtgactcggatgaaacgatcctgatccagggaattattgatgcatttttctatgaggatggacagattgttttgctggattacaagacagattatgtgcgtcgtgcatcagaattgcgggaaaaatatcatgcgcagctggaatactatgaacaggcattgagcatgatgaccgggaagaaagtgaaggaaaagctgatttattcgtttacgctgggtgaagtgatcgaggtgtaatacgagggagggaagctatatgaagcagacttatacatatgaggtaaatggatttcaaatccatgcagaatatgaggaaaaagacattgagacgatctttattccgcttttgcagaaatggaaggaaatgcagaaaaaagcgggaagacgaatccttgtatttttaagtgcacctcctggaaccggcaagacaacgctggtacagtttctggaatatctgtcagagcaggaagtcgatgcggagccgatacaggccatcggtctggatggatttcattatcatcagcagtatatcctgactcatgaagcttgtgtggagggtaggattgttcccatgaaggaggtcaaaggctgtccagagacctatgatctggaaaaactgcgtgccaagattcatgagctgcgtaagggtggtgagatatggtggccgatctacagcagagcgatccatgatgtggtggaagatgcggtcctggtcaaccggcagattatcgtgctggaggggaactggttgttgagcagtgaagatccgtggaaccagttggtgactctcagtgatgacagcgtgttcattggggcagatgaatcatttctgaaggacagactggtggatcgcaagatgaaaggcggattgtcactggaagaggcgacgaagttctgcgaacgaagtgattgcagaaatgtgcgacgactgatgcgggcacaccagattgcgaataccaatcttatgttgcaggcggatgggacatatagagtatgaataatccacacaatttgacaaaaccagtatttatgcgggtttgcggaattacaaaaggtcttttgataacaaattgataacggttacgcaagtgcgattattcttacggataagtggtttgcaggtcgaggaatgattttaaagcggtttgtgtgactgtgataaatccatattagaaacgcccttagctgtgggtagtaactcatggctaagggcgttttttgcgttcttgtcaatcggtttttagtttgtctttgaatgttttgactaaggcatcgcttaattccttagaggggacattcgcccactgctgcgtagtgtcaaacttcgggtaattgtaccgccactggttgtactcttccctgctgatttcttcggtggtgagttttgcagcctgttcctgccaagcggtgagcatttgtagtagttcttcagcggctttgcccttgtccttgctgattttcaaacagaccgctccgtctgtttcactgatggcaatccgagggtgtataaggcactccgcaatgagcttgccgctgttcttacggaattacagaggattgaagcgggcggcagcgttgacaatgagttattagatactattgaattgattgccgttatcctcggcggtctgaaaggagagggtgaagatggcgaataaaaaagaagtgaccgctcctgttgtatctgatagcgcagatacggagcagccacctaatgtaaacaataacagtatatccaataatccgccgaaaaacaatagcaaaatgcttaaaacggtttctatggcagaactttacgacacggtatatccaagcaagccgccgctgattgacagtctgctttatactggcatttatcttttcgcaggtgcgccgaagctcggcaagagctttctgatggcgcagatagcctaccatatcagcagggggattcctttatgggattaccctgcccgcaaagcggcggtgttgtatcttgcccttgaagatgattaccgtcgcctgcaggaaaacctgcttgcaggttgtatttttgttggcatagccgacaaaagtgcttttgcgttactttcgggaaagtaacaaagcctatcagccgaaaagagaggatgtgattttataagacggacgattagcgcaatggtggggaaaggctcagtcaaccataacagccgcaaattcaaggcagagaatgaggatggagaacgctcacacttcaatatagattattgcaatgagaatatcaaaaaggtatatcataaactctttgatgaagcgttacagcggtacaatgaaaaacaaacgaggtcagaccgccgtattgacaactattacgagaagatacggaactcaaagcaggaaaagccgttccatgagctgattttgcagattggcgataaggagaacatgagggcagggagtgagaatggcaaccttgccagacaggttttagacgaatattatcagcagtttcaaaaaagaaatcctaacctttatgtgttctctgctcatctgcatatggatgaagcaacaccgcatctgcacattgattttgttccatttacgacaggcagtaagcggggattagatacaagagtatcactcaaacaggcgttagccaagcgggggtttaagggcggcagtcgtggagatacagagtggagccagtgggtacagtccgaaaaaagaacagctttccgctgtcatggagcggcacggcattgagtgggagcataagggtacgcatgagaaacatttatctgtccttgactataaaaagcaggagcattaccttccgaaaaagaaaagcctataggaatatgggggcaaaggcatttgcagtatctcaaagagtataagcagtttgtttatcttaatctgctgacaagcggcaggttgaacgaataccttgcaagcgtggatgaacaggcagaggatatgttttctcggctggtaaaagaatatgccgacaggcagggagtaacagaacagctaaaggcagaaaatcagcttgaatgggtcgggaaaatgaataatattcgtagcagagcagtagagattatagattatagattatagatgtagaattgatttgtgtttaggaggacaaaacggcagatataatgttaaaagtagttgcgtgcgcacgcatattgcgttatgatactggcggttaggaggaatatatctatgaaactattaaaatggctttcagtaacagaccgattttacaaaatctatttggataaacagcttgccccctttggaatcaacaacagccaatatatgtttttgattaaaatctgtcgttcgcctggcattttacaggattctttaatggatatgttttatgttcatccgagcaatattgtacggacagttgcggcattagaaaagcagggaatgattatgcgttccccaaatgataaggataagcggacgtgtaagctgtatcctacggaacgtgcgctgtctgtaattgatgaggtacagacggtatgtgaaaagacagaagctcttttattgcaaggcttcagggaatctgataaaaacctctttattgatttgctgattcaggcaggtgaaaatattacagcggaactccgtatagaaagaaagggggatgaatttaatgactgagaatcctctaggatatgaaaaaatttcaaaactgttgaaagattttgccattcccagtattatggcgtctcttgtcggctcaatctacaatattgtggatcagatttttattggtcaaggggtcggttatctgggaaatgcagcaaccaatgttgcctacccgttttctaccatctgccttgccattgcactactggtcggaattggcagtgcttcccgtgtttccctctgtcttggacgtaaagagccgaaagctgccgccaaagcagcgggaaatggtattgttctgatgggaattttcggaattatttatttgctggttggagaaacttttctgtctttgctcctaaaggcatttggggcaacgacagatgtatttccatatgcaaagcagtatgccagcataacattgattggaatgccgtttctcattgtaacgaatggtatgagcaatttgattcgagcagatggaaaaccaaagtattcaatggtctgcatggttgtgggagctattatcaataccattcttgaccccatttttatttttgtttgcgattgggggattgccggcggagcttgggcaacagttattgggcaaattttttccttcatactcgcactccgttatctatggcgtttccaaacaatccattttgaaaaagagtcgtttttattggacatcaaagaaagcatgaaaatttgcagcatgggaatcagcagcagctcaaaccagattgcagttaccgtgattcaaatcattcagtacaattcgttgacttattacggcgcattaacaaaatatggaacagatattcccttagctgcttgcggaatcgttatgaaaacaaatgccataatccttgcgattgttgtaggaatctcgcagggaacacagccgattatcggcttcaactatggggcaaggcaataccatcgtgtacgggaggcttacctgcttgcggtaaaatggaaccttgttgtttccactattgctttcatcgcatttcaatttttcccgcaatctatcatttcgctattcggagatgggaacgagctgtattttgaatttgctgttttgttcatgcgtacctatcttttcatggtgttggtaaatggtgtgcagttgctttcttccagtttttttaccgcaataggaaaatcgttaaaaggtgctctgttggcattaacaaggcagacctttgtgttgattccgcttaccctgctgctcccgcttcgtttcggaattatgggagtattgcttgcgggacctgttgctgatttttcagcgtttatgctatctgttgtactggtgggtatagaattaaaaaaacaaaaaaatgacatgtaaacaacagccctatgtgaaaacattctttttccgccgttaagtaatcaagaagcaaaaacttaaaaaccgttgcgataaattttataaatttagtaggataatatttagaagtaaggattgagaaaaatatggaaactataaaatgggttctatgtcctatctgtggaaataaaacccgaacgataatgcaagaagataccgaattaaagaactttccactctactgtccgaagtgtaaacagcaaacacttgtgaatgtcaagcactttgttgtttcggttagcatagatagtgcaaattaagatggtatctgaatagaaaaatacaatatgctaaatattttacaaggcttgattttctaagcaaactcgcttataatttaagccatagcatatagctattatccacagctactgagcaaatgttatcaataccgataacaaaatgataacattagcttatataggcaggataatatggatatatcaaataatcaaaggatttacatactcggcagagcagagaataatttctaaataaaattagttaggaaaagttgagtttgaataaaaaagtcggtgtcattttagtgacatcgactttttactggaaaatcaccttaagctatacccgtttatagataataggatcatcgtagccaaaagtccgctttccattaacttccatactttcagatacttccaagcaactatcagaaaacttttcccaaagcttaaaggtcatgactggagaaaactggctgatactgccaccttcccagatcccgtccttttcatgatacagtgccggtgtaaattttggggatttttttagctcgctgtaatcaacatttttcatagaatcataagaaaatgtatttttatcatctcccggaatctcgtaggaagagagtagaatgccgtcctcattttctgtaatcaggaaaagatgcggagaagcatggcgttttccattggtttcatagtaactttcttcaacaataaatttgccattgaaatccgcagggatattttttattttgtcattgcagactgtatttacatgttctgcataaagatatgattttccagcttcctgcatcatatcaaactgttctttgttgtcaaaatgtcccgtcatcatattaataaagttatcaagtttcatcagattatttacctccaaattttaaattttttacttcgtcaaacctaattaaattagtctcttggcacagataaacgggaatctgtcgctttaatacccgtggtcaacatgttcccaattcccactgtcattcctaat

SEQ ID NO: 1339 - DNA, 22861 bp, Unknown
  16S sequences of unknown bacteria
ccgacatggagcgcagcccgcgacgacgcgtactcacaaaaggaacgccccggcggcgagccataccggctttgcaccccgcaaaatcaacgccccgccgccaggcgaccacaaatcaggcccgcaaaaaagagcccttccaactccggaaaggctctttttgttattctggtttatgcctgccactcatttacctggcaacgcagccagtcgcaccaggcatccacaccctcgcccgtccgggcgcagatgggaaaaatctccagcttcggattcctcatgcgggcgtactccgtcaccttgtccatatcaaagtcaaagtacggcagcacatccaccttattgatgatgagcgcgtcgcagacggtaaagatcagcggatatttcagaggcttatcatgtccctccgggaccgaaaggatcatggtgttcttcaccgcgccggtatcaaattccgccgggcaaacaagattgcccacattctccagcacaatgagatccaggtccttcgtcccgatctcccgcaggccctgctcggtcatcccggcatccaggtggcacatgccgccggtatgcagctggatggaccgtaccccggccccagccatagtgcgggcatccacatcgctgtcaatgtccgcctccatcacaccgatgcgcatttcctcccgcagccgctccaccgtccgcagcagggtggtggtcttgccgctgccggggctcgacatcaggttcagcagaaaggtcttatcccccttcagctccgcccgcaggcggtctgcctcccggtcgttattggcaaagatgctttccttcagctctatcgtcttaaattccattatatcgcctctatttcctttatgctgatctcattcccccgcagcagccaggtcttttcgctgccgcagtatgggcaggtgcgtccgtgccgcacagtgggataattctctccgcagccctcacagtgggtcacggcgggcagggtctctatcttcagcggcgcgccgcgcagcagctcggtgcggttcacggcccagtcccagcagctcaccagctcctgcggaatagccccgcttacctcacccagctccagcgtcacgctgcccacccgggtcagtccctgctcggcggccacctcttctatggttcgtatcgtatggaatacgatccccagctcatgcattatccgttcctcttttcggctttcttggcgcggcggatgcgtattttccgcttgatcatgtacggcaggatgcccttcatcttatcctccgccgagcgcatggtgctgcactccggcaggtcacggtgcaggtggatggcatcaaaggcacagcgggtggtgcagatgccgcagccgatgcacttattggggtccaccacgctggcgccgcagcccaggcagcgggcggtctcggccttcacctgttcctcggtaaaggccacccggccatccttaaaggtctttctcagcgtctcattgtagccgatgcgctggcggggagtattgtcatagcttgcctcctccagcagcaggttattcttatccagctctatgaattcccgcttgtcccggccgatggtcagggtggcatcctgcacccagcggtgcagagaaaccgcgccctgcttgccggccgcgatggcatcaatggcaaacttttgcccggtgtagacatcgccgcccacaaagatatccggctcggcggtctggtaggtcacggggtcggccttggcggtgccgttggggttcagttccacagcggtgccggtcagcaggcccttccagtccaccttctgcccgatgcagtacagcaccatatcacaggggacttcctcggtcgcattatcatcaaaggtcggggcaaagcggccctcggcattgcggacggaaaggcacttgcggaagcggataccgctgcacttgccgttttcggcaaggatctcggtctggccccagccggcatggatctcaatgccgtcctcctcgcactcggtgcggtcctccacacccattggcatggaatcatagtcctccaggcagtacagcgaaaccttctcggcgccgcagcgcagggccgtccgggccacatcggcaccaatattgccgccgccgatgaccactacccggccggaaagactcttcttcccttccaggttcatttcccgcatcagctcaataccggccttgacaccctcggcatcctcgccgggcacacccagcttgccgccgctttgcagtccaatggccacataaaagcccttgtagccctgctcccgcagttcggggatagtcacatccctgcctacctccacgccgcagtggaattccacccccagggcccgcagcacatcgatctcggcctcaatgacatccttctccagccggaattcgggaatgccgtgcatcagcataccgccgggctgtttttccttctcaaagacggtgggacggtagcccttttccgccaggtaataggcgcaggaaaggccggccgggccgccaccgataatagcgatcttctcctcaaactcgccatccaccttggggatgaccttttcgggaacaaagcgggtctcggcgttcaggtcctgctgggcaataaagcgcttcacctcatcaatggccaccgcctggtcgatggtgccgcgggtacaggcgtcctcgcaccgccggttgcagatgcggccgcagaccgccgggaaagggttatcccgcttgatgagctgcaaagcttccttgtacttgccctgggccgccagcttcaggtagccctgcaccgcgatgtgggcggggcaggcggtcttgcagggggcggtgccggtcttgtagcagttcacgcggttcttatcgcggtagtcgatcgcccacttttcggggccccactcatggtcgtcaggcagctcctgccgggggtaggtgatggggccgtccttggtgcacagcttttggcccagcttcactgcgccagcggggcagccctccacacagcggccgcaggccacacagttttcgctttccaccttggccacataggcgctgcgggacatattcggcgtattaaaaagctggctggtgcgcagggcgttgcagatattcacattgcagttgcagatagcaaagatcttctgctcgccgtcgatattggtgatctgatggacaaagccattctcctccgcccggcggaaaatatccagtgcttcctccttggtgatgtactcgccccgctgggtctccaccacatagtcggccatatcgcccaccgcgatgcaccagttttcggggtcgtcgccgcagccctcgcccagcttctggcggctggcgcggcaggagcacatgctcttggcatacttgccctcgtatttatccagccagtagctgatcttttccagcccaatggcctcattctcactttcgatggccttttccaccgggatgacatgcatcccgatgccggagccgccggggggcaccatgggggtgatcttttccagcggcaagaaggtcatccgctcaaagaatgccgcgacctcggggttctggtcgatctggctctttcgcatattcaggaactcggcgctgccgggcacaaacagcggcaggatccagcgtttttcgtggttcgggtttttgccgtccaggttctcccagttgtattccactatgcccagccacgccatttcggtcagcagcttttccagcggctcccgcttcattttggttagcttcatcagctgctcggtggtcttgggcttacgcacgcccattttcagcgcgacctccaccatctcatcggtcatcacgctggccaggccccagtattcggggtcatccgccgtggccttcagccctatgcggttggtaatcatgctgcccaacttgaggaggttctcgcgcgggtgctcatcacgggggatcttaaaagacagtttactctcatccagagggaaattggtgggtttgctgccgttgatatcgctcatattcgatctccttttttctgcggcgtgccgcgttttaggggaaatgggcgccatttagcccagcataattttattttaccagctccccgccgcgaatgctattgacccttctcccaaacctgtgctaaaataatttatggttctggtctgaccagtatatttcaggcttgcgcggagggctggcccggggcccgcagggcgccccggctccgccggggctgggcggcctgcggcgccgaccctgcgggcccctcccaccccacaaaccatccaaggagctgaagctatgccattccaagagatctcctccccctccctgcggaagcttttcgtccagcagttggagggcctcatcctctccggtgagttgcgccccggcgaccgcctgcccaccgagcgggagctggccgatgaaatgaagatcagcaaaacggtggtacacgagggcctgcgggagctgcaccagctgggctttttgcaggtcgaatcccgcaagggggttacggtggcggattacgcccaaaccggcagcctggagaccctcatggccatcatggattaccacggcggcctgccggataaaaagactgcctccagcattctggatctgcgctactacctggaagcccccgccctgcggcagttggcggcccaccacacccccggcgacctggccgccctgcgggccctgcagcaaaaggcggaggaggcttcgctttccggggtggggccgctggccgaagcgctgctgcgctaccaccggggggtcaccttcctcagcggcaataccatcacccccctcatcttcaatgcctttgcccggatcaatctggaattctggtccgactatgtccgtctggaaggcattgcccgcagcctgcacaccctttcccgcttcaccaagctcatcgaagccggggaaggcgatgccgccgctgagctgctgcggcaaggactggagcgcttccgggccgcgctctgccaatagtttctttttacgcctcgctcacacttggtacagcgtcatcctttttccccgtttttcggcgcgttaaaaatccgggccccggctcaggaaagcctccgcgcgccacctggccaaaagcctctgccctaaccgggagaggctccgcccctttttccgcaaatcccagcaagccgccggttacggaccgcaggccgcccgccgttccggcgggctggcggacctccggtccgcttcggcggcgcttcgcgccgccgggcctgcggcccgccctgcccctccgcaaggccctccaaaaaccacaaaaggagcctctccattcccggaaaggctcctcttattttgcttatttcagcttagttcagcttggcctcgtccaccatggccttcagctcggccagtgccttggggtcgcacttctcccagctgaattcagcatcatcccggccgaagtggccataggccgccgtcttggcaaagaccggtgcccgcagccccagctttttgatgatccccgccgggcgaaggtcatagttccgctcgatccagcgaaaaatctccgcctcagaaatggtgttggtaccagccgtttccacatagatggaaaccgggcgggccaccccgatggcgtagctcagctgaatttcgcagcggtgggcagcgcccgcctccactatggtcttggcaatatttcttgccatataggccgcggaacggtccaccttggtggcgtccttgccgctgaaggcgccgccgccgtgccgggcatagccgccgtaggtatccactatgatcttacggccggtcagtcccgtatcggccgccgggccgcccagtacaaagcgtccggtgggattaatataatacttggtctcggcatccagcatctcggcggggatgcagggcttgatgacccgctcgatcatatcctgacggagggtcaggggatcggcgtcctcatcatgctgggtggaaagcaccaccgtattgacccggacgggctttccgttttcgtattccactgtgacctgtgccttgccatccggccggagataggaaagctccccgtttttgcggacggccgccagccgccgggtgatgcggtgcgccagggtgatgggcaggggcatccgctccggggtctcatcacaggcaaagccgaacatcataccttggtcgccggcgcccaggccgtcggtatcaatggcttccttggcctccagcgccatgtctaccccctgggcgatatccgccgactgggtgtgcagcgagcagctgatctcacaggtatcagcatcaaagccatactccggtttggtataaccaatttcccggatgatctggcgtgcgatctcgatgtaatttaccgtggccgcggtcgttatttctcccataatgtgtaccgcaccgggctctgcggtggtttcgcaggcacagcgggaattgggatcgatagcgagcagggcgtccagtataccatcggagatttgatcgcagattttgtcgggatgaccttcggtcaccgactcggacgtgaacagtgttctcatgcgtctttcctccataattcggtttttcgcggcccatttacgggcagcagaatatcggcagtacttgccgtatacttagggacttccccattctacacgatagtccacccggattcaagcatttttccaaatttcccggtagcaatttgtgctttttgtccaaaaagcggaaagcgattgggggaatgagaaaaagagcctttttattcaattttcaaggtgctggtgggaggcgggttcccgctgagacagacccccaaattgcccgatgaggtctgctgaaaagggataaagttagaccggcgcccctgtttgaccggtggggccgaaaggctctcgatttgtttggtcggggagagaaccgacacgaaaagaatttttgccggtgagaaaaagtcctttcactaatacggcaaaatcgtcccttttttgcagtccaaaggttaatatttcacttttatttacgaaaggtttacaatatagggaaatactgggcaagatttatatagaatatgggtttattagggcaatagttactgggaatataagtttattttgaagatagtttgtggtcgcctaacggcgggactgagtcaccggagggtgacggctggtacgcctgcccggcggggggttacttttctgtgatgaaaagtaggcaaaagaattttatttagggcgagtttgtagtcgcctaaaggcgtcgcggagtcaccagagggtgacagcttgtacgcctacccggcgagggcctgcttttctatgaagaaaagtaggcaaaagtcatttagggctccgccctaaagacccgacgcgtcggtacgccccgaccggaaggcttacagccttccggatctggggctagacgacgcttataaggttgatttttaatttggtttctgcaagccaatcgcagaaagtcacgctaccgagactgtgggtaaaacaagcagttacttgcccagacggcccctcccccgccacgggggaggggtagggggtgcggagccgagcgccgccagtggcggatgcagcgaggcggagcacccgcagcggtcgaaaaaatcgagcaagcgagcagcgcgaagattttttcgggcaccgcaaggcggtgggggcagatacgccgtagctacctttggagcgtatctgtgcgcagtacggatttggatttttctccccagaaaaatccaaatccgtagccagcacagctaagcgacaaaggggtttgcaaaggggaaagcccggttcccctttgccctgttttgcttccttttgcaggagcaaaaggaaggcccccgcggcgagcggtgctaactatgcctttgcaaaaggccccgcgacgccgataggcgactgcaaactggcctccgacgggcaggcaagatgagatgggacctacccacataaaaaggcccggagagaagctcgccgcttccctccggtaaaaaggcttattctgctttggcggtgctgctggtgccgtcctctccgtgcaggatgcggtccagctcctcccggcgggcccgacggtaatcgtagtactgctgcagcttttcccgcagcgggatctcggtatgcagggccaggaaaaagtgctggcggccgttttcccggccggccttaaagtaggccttcagctcctcatagcggaccaccacattcttctcgcgggcaaaggtccttatcttgaccatgaggtgggtggaatagacgaaatcgatggcgaaaacgccgaaaaacgcgccgatgacaaaggaaaacgccaaattgcgggaaagccaatccagtgcccgcaaaatgtaaggatccacaaagaaataataggccgcgcccatcactgcccaaatggcggaaaacagggggcaaataagaccattcacattaccccagcggcggctgtaatcccacagacgggcattcatcaccttcagcagcaggatgccggcaatgtactcgatggcggtcatggcggcggccatcagcaccagcatggcaatgtggttccacacagggttggcgatctggcggctttccgaaaggcgggaaactaggtacaggatgcaaagcccggtgccgtacagcggcacatagggccctaccataaagccgggattgatccacttgcgctcgggattattgccggaaataaagcgccggaagaaaagctccagcacccagcccagcgaagaaccgatatagaacaaaaaagccagcttcaagaaggtattcatagggccctccggtcacggtttttggcggccatgccgcgcttgggaaaattatatcacatcttcggccggggttcaactcacacatgggatagaatgggggcagcggcaggttttgaacctactgctgcccccagagaggtaagtgaggatggctgtttagaagcggcgggtgcctgcatacaggcacagagccgcaagcgccagcagggccaagccgggcagcggctgacccaccggggccgcgccggtattggggttgctggcgggggtgctttcaccggactgggaaggaacgatgatcaccacaccgctgccgctttcggtccacaggatgatggagccgcggattacttcaaagtgctcatagtcatccggacggaagatccactcgtaggctgtccctttttcgactttcacgctttctgggtcaccatcaactgcccacattacattaccgggcacagagaatacatcattatcggcattgaggtgggcatcggccagggtcttgccgctggaggtgatgggggtgtaattgggagtgccggtgggggtaattttggtgagggtgatgacaactgtgccctcggcatactcgtagttattcttatagttaccttcgtgtgcaaaagccttgtactttatagtgattttcttttcgggagctgtattttcgcccattgtataagttatagagccactgttaacatctatttgccaaccatttaatgttagcccatccgcggactcataactatcaccttggaactccatcgtaccgccattcgggaaagcttcattgagcttacctattacctgatcgtaaatctcaatggtcttgctggcggtgtcattgtagacctggtttacattgatggtgcccagctgggggccatccgccttggcaatggtcactttgactttctcgctggtgagggagtaggtgtcaacggtggctgtgcagcagtaatcgtagtcccccgcattcaggccggtttccactgtataggtttgggcagtagcattatcaatcgcggttttctcgctgccgtttaccttgtaccactggtaggtcacaccggtcgcattatccggggcaacggttgcggtaagaaccggggcctgttcggcggtgtagccatatttggcgttgttatgggcccttacggacgcagtgacactcttgatgggggcttctacaacggtcttaccatcggtatcaaatacatagccggggcccaacagggtgttcttatcagtgactccggtaatttcgccgtaggtgccgccggagagttgaacggtatcgccgctaacttccagcttagtaactctaccattccctgttatggtaagcttgccgcttgttactttcaattcatttatggttactccagccaaattaagcgttacctgcgtattctttccactgtaagtcacgctctcctggtttctaattggatttaccgttattgagtctctttcattgccggcataatccagtgccccctgcaaggttgtaaagcatcccccctgagcaggagagttgcctaaatacgctcccaagccaacccggcatgcatcacatataccatctctgttgatatcataatgctgaattgttagattctctctaacatgctcgcatttgtcacatcttgggctgtggcttatgccattggcattaggtgcccacaggttttcatcgtaggtgtgtgcgccatcggcacattccgtcgccagtgctacaacagacagcatggtgacacacagcacggcggccagcaaaatactacttactcgtttcttcatatgttcctccagaattacagtttttattctaccagccacaggcggcgggcggcggttttggcctcgctgcggcggctgacattcaacttggtgaggatatggctgacatgggtttttaccgtgggcagcttgatatccaaaatgcggccgatctcggcattgcttttatcggcgcacatcaggcgcagcacctgcagctcggtggcggtcatttcctcgccggggggcaggggcggcaccaaaaagtagggataccgggcggcctgcacccgggcaaaggccaccacctgccggtaccagctctcttcctccgggctgggcagggcctgcagcaggggcagcagggcggcgccgcagcagcttaccgggcggatgaaccccaacccggcggcaatgcgcagggcatcggtaaggctttgccgccaggcttcgtcctttagccggtactgggccacggcccgcaaaagcagcagggtggtgtgattcatcttccgctggcaggcgatgcagtagggttccagcggagccagggtaagcagggcggcctgcggccggccctgagcaagctccgccatggcctgagtaaagtactggtagcgcttcatgatattgatgctgagggggtcgcgcggggccttttcccggtaccagctatctacggcatcggtatcgccagtccgcaggtcaacgcggcacagcatggcatcgatattgggcaaaaatcggctttggccgccttccgcgaagcgctgccgcaggctttccagcgtcctgcgggcatcctgggagtggccggccgccaactggctgcgggccagcaggcccaccgcggcgaattcaatatccggggtgccgtcccgctggatctcccccaatcggggcatcagggccagcatacgggcggtgatgtcctcgcctttttcaaacttgctttcggcaatggcgcaatccggcagacccacgccatcccggcccagaatggcctccaccgggacacggatggtctgataaagcaggtcatcccggcggctccattcgctgaagtccttgccgccgttcataatgctgggcagggcgctggtgaccgaaaaggccggcagggtcacttccttattgaccaacagccggtaggccgcggggatgatggcggtgagatcggtgacgccgcgctgcggcagggagatatccaaccaggccagccggccccgggcctgccgcccggccgcgtcgcttttggcacggcagcgggcaaactgagaaagcgcctggtaccagcgctcgctgccctcataatcggccgccagggcgcacagcatactcatgccctgcatcagcgccggggaggcggcgatctccttctccggcaggctgcggtagtatttctccatctcgctgtaatggcccatgccgggatgaagctcggcattgcgcaccagaagctcggagaccttggaatgatcccctgccatggtgtagcactccagcgcatggctgtaatcctctttcagctcgtagtagaggccgccgcggcccagaacggtgcggcgcttttcctcgctgtattcccggtccatctcccacagcaaaaaggtgcggaactgcggccagaaccggaaccgctgcacatcatcggggcgcagcatggtggtattgtgctgaagccaggccaggcgttccccggcgtggggatcgccgctgaccatgcgggccagctcggcatcgaagctctcaaatggggcaagctccagcagaaaacggcgaatgggcagatcgaaccggcggtagaccgccgcctcgaagtagaaaaagacctcgtggtagccctgggcgatgagctccgggccataggggcggccgccggccatgcagtgggcgatgaccgccacgcccagcgggtagccgctggtttcccgcaggatctcggaaagctccgattcgctgacgggggtgccctgctgccggaacaggctgcggatatcctcccggtcaaaaagcagggcgtcggcatccaacactgccataagcccggcatactggaaggccatgagccagcccggcaccgccccgcgggaaagcaggacgaaccggcggtcgctgtactcccggatgagctggcacagcgcctgctgatccggctcctcggtcatctgccgcaggtcatcgatcaagaggacctgccagtccttatcatccgccggcagggcgaagtccggctccccggcggtgagagaaagcacctgctgcccggcaagcagcgtttcggccaggatgcttttgccaaagccgcagggcgcggtgaaaaacagcaccctgccccgtgccatgaatttttggtgctgttcccggacagacggccggatgactacatttttggccatgcgctccctccctttgcaacggattcatcccgtgggggccacgggatgccgaaggggaccggtccccttatggtatgatggatcggcggtattttgtgttctggtcttattttaccagccaaagcgggtggtgtaaatcatcccaaagtatgagaaaatacattttttgcgggggatgaggcactcccacaggggagagccatgccgccaatcaggtcagcggggcggcgggaggaccttccatatagggacggaagcgaattccatgccaaagttgcaacagtgcgtgcggattgtgcaattgactttatacacaaggctttctaaaataaaaagtgtagattgtgcacaatttattgtggaatccgttttcggatcgcgaccgaaggcggcagatcaccgttcacctgagaataaaaattacagaagggaggatcgcatgcaaagctccgtgcttagccttgcatgtgaactactatgacaaagtcagctgtccaaaagcgtgaatggccgatcattttgatcgcgttcctctttatgttctttttcggccggattctgggcccgttctccgtggttacacaggtcggctccaatgccctgggcgtatttatcggcgttattctgcttacagtattcacttcccagtccaccctagctgctatcctgggtattatcgccatggtatacagcggctttttgacatcctccgccgctgtttccagttggatgggcggttctaccgttccccagctgatctttgtatctgcgctgtgcgtggcgctcaaggaagccggcgtgatcgatgtgctggtgcgcaagctgcttagcatcaaggcgcttcgaggacgcccggtcgcgctgctgttctcgctgttcttctccagctttatcgtttccatgttcatcgggtttatccccaccgcgctgctgtacttcggcatttatgagtccatccgggatgtgtgcggctatgataagcaggataaattctgcaaattcatgctgctgggcatctacctgggctgcatgggtaatttctgcttccccttcaagggcattgcccttaccatttacacccttatcaataccagcatgcagggctttggactgagcatcaatatgttcacctatatgttcgtgtgcatcctggtcaatctggtatggctgtgcatcctggcctttatgatccccggtgtatttaagtgcaatgttgccccactgaaggagctggatattgaaaatgtagaggcgctgcgcaacattcccaagaaatttaataagcgccagaagctcattctcaccatcttctgcctgtccttcctgtatatcatcgtaatcccgctgctgccgaaggacttccccggaagcgctgttctggctcctatcggcactaccctcattttcctgctggcgctgggcattctggggcttatcaaagtagacggcaagccgctggccaaccccatgaagctgctgagtgaaggcaccctgtggaatgtggtgtgcatcgttggctgcttcaccttcctgggcaatgccatggcttccgctgatttgggcattcgcgactggatcatctccctgcttaaacccgtattcggcaatatgccgctgccgctgctgctgcttctccttactattgttatcaccatcatcaccaacatctgcaacggcaccccccttaccctgttgggcaacgcggccatcatgccttttgtatgccagatgcagctggacaccgggatcagcgcatctgttaccgccgcgacgctgagcctgtgcgccaacatggccttcttgacctatgcaggtaccatctacgccgcgctgctgctggaccgtgaggagatagacaaccgctttatttggcacgatgccatcaaggtgattcctgtttatatcattgtggtttatgtgattgcccttggctgcagctacattctgccctaaccggcttttccgggacgatatggcctgttcccttcttcccgcgcatctgctataatacactaagaaacgaggcataccatcaatggaaaaaccaaagcaaatcactgagcaatcccattccatccccgttgcgggggaagcggatgtaatcgtagtaggcggcggcgtagccggtgtagccgccgcggtttcggccgcacgcaatggctcccgggtcattctgctggagaaaagcatcatcctgggcggtctggctaccctgggccatgtctgcatctatctgcctctggatgacggtttggggcacaaggtatatggcggcctggcggaggagctgctgcatgtctgcatccgctacggctacgataacctgccagattgctggcggaacgggcccgataccgtggacacccccaccggccgctaccgcaccaattttaatatcccggctgccgtgtgcgcactggatgagctgatggaacaggaaggtattcaggtcgtttttgataccaacttctgcgcgcccatcatggagggtaaaacctgcaagggcgtcattgtcgaaaacaaatccggacgcaccgcctacctggccaaggcctttgtggatgccagcggcgacctggacctgatgttccgggccggcgctcccaccgaaacacagcggagcattgtttcccactgggcacatgaaatagacctggataccatgaaaaaaggcctggagaccgggcaggccctgcaggcactgccgctgcgctggctggggcttcgccccgatgccgataacagcgaggcggagatccccatgtactatggtaccaccagtgagggcgtcaacggatatatccgtaccagccgcaagctggcgctggactacttaaagcagcaccagagtccctcctacgcgcagatgaccctgccgcttatgccgcagttccgtatgacccgccggctggttggcaaggagcagctggaggtagtgcctgaccggtatgtggaaagctcaatcggctgcatgatccactcgctggaaatccctgccgaagtatacgagttcccatacggcggcctcatcgataccgagatcaccaacattgccgcagccggaaggatcgtttccgccaccggccgcggctgggaagtcgcacggtttattcccgcctgtgttctcaccggtgaagctgccggcttggctgtttccatggctgccaaggagaatatcagcctgcaggcgctggatgtgcccgccctgcagcacactttggccagccgcggcgtcaaaatccacatgaatgaagccctgcgccggaaccgccgcccccagcccggagaaaagaaggaccccaaaaagacggatgccacatccgttgttcgggcggattccctttcctaccgtcactgagacactgaggaagccccgctgcattgcctacccgctgccataaccaaaaggagggcgcactatggagatccaatacctgaagactgtactgctggtggccacccacctgaatttcagcaaggtcgctgaggagatcccctgtgcgccctcctcggtctcccggcaggtgaagtgtgtggaggaggccctgggcatcaccttatttgaccgtcccgtccggggcgagcgcctgaagctgacagggccgggcaccagcgttcttccctatatcgcacaggtggtgggacaatatgaatcgctggagtttcacatcagccggctgaagggccaggatgagaagccctataccatcggtcttcctctggggcgcatcagcataaaaaccgagtgcctgctgatggaaaaattctatctgtatgcccccgggcacaatattcagtttctattttaccaatcctcggaggtcgaagcctgcctgcgcagtcgggaatttgacgcgctgctggtcactcgtgtcttttggcaggaggaccgtaataaaacgcctgccttctgcaccataccgggtacccgctgtaccctgctgcacaatcagccgctatgtattgtcatgcgggcggaccaccccttggctggacaagcggaagtagatgtgggcgacctgcgggagcagagctttatcctgtactatgatcccatccgggaagggatccgtaccggagatattcaagcagacggttttctccgtcactgccagcaagccggatttgtacccaagctggagatcatctccaagaacatctccgagctgcgcaatgtatgcgtagaaaacttcaactgggtctaccccaccttccagccgaactggatgcttccctcttcccagattcgggctgtcccactgaaggatcccctgtatggctctgaatactatctgattaccgccgaggaccacactgatgacaccgctgaaatggtccggcggttcttccagcaaaccttctctgcggattaaatcgccctccgtaaataaacaaactgaagtcctccgcatgggatcccacgcggaggacttcagcatatatattcggtttagaattccgcaaagccggtggtgcgggggaagggcagtacatcacggatattcgggatgccggtgacatacatgatgagccgctcgaagcccaggccgaaaccggcgtggcgcgcgccgccgaagcgccgcaggtcgaggtaccaccagtagtcctcctcattcagccccagctcgtggatgcggtccagcaggatgtccagacgctcctcacgctggctgccgccgatgatctcgccaatgccgggcaccagcaggtccacggccgccaccgtcttaccatcatcgttcaggcgcatatagaaggccttgatctccttgggataattggtaacaaagaccggcttgccgaaaatcttttcggtgaggtagcgctcatgctcagtctgcaggtccacaccccagcttacggggtactcaaactccacatcggccttttgcagccgctcgatggcctcggtataggtgcagacggcaaagtcgctgtttaccacatggtttaggcgttccagcaggcccttatccacaaagttattgaagaattccagctcgcgggggcactgctccatcacatagcgcagcacatattttatcatgtcctccgccagcaccatattgtcctccaggtcggcaaaggcgatctccggttcgatcatccagaactcggcggcatggcggccggtgtaggatttttccgcgcggaaggtggggccgaaggtgtagatcttgccaaaggccatagccatacactcaccctccagctgaccgctgacggtgagattggtggctttgccgaagaaatcctggctgtaatcgatcttgccgtcctcggtcagggggggatcggcgggatcgatggtggtgacgcggaacatctcgccggcaccctcgcagtcgctgccggtgatgagcggggtgtgcgcgtacacaaagccgcgctcggtaaagaacttgtggataccctgcgccgcgacagagcgcacccggaatgccgcgctgaaggtattggtgcggggacgcaggtgctggatggtgcgcaggaactccatgctgtggcgctttttctgcaggggataatcgggggtggaggcgccctccacggtgatcttctccgcgtggatttcaaagggctgcttggcctcgggggtcagcagcaggcggccggtgacaataagcgccgcgccgacattctggcgggagatctcatcgtaattggccagtttattttcctcaaacaccacctgcagattgctgaagtagctgccgtcgttcagctcgatgaagccaagggccttgctggagcgcagggtgcgcacccagccgcaaatagtgaccggctccgcggtgtagcgctccggctccgcaaacagtgctttgatctctactcgtttcatgggtcttatccttccttttttccgaaagtgatttataatattatagtacgccaaagggccgggcgcaatcctttctttgcccgtaatgcgaaaaaatgtcttttagggcaacttttttgcaaaaagggggttgcttttatgccggtaatacggtataataaattctcgtcaggacttttacttgacccatcctgataacgacatggagatgtcgcctagttggtcgagggcgcacgactggaaatcgtgtaaccgtcaaaagcggttcgagagttcgaatctctccatctccgccatattaacgaaacggtatagatgcgtctggcgaaaagtcaggcgcatcaaccgtttccgggctttttcaggcccggattttttctttcaaaccatagatgcaaatcgctgtttcagagcgtctgccccgattcgaaccgggcgttttcctgtttcatgcagatgcgttcagccagcgccctttttcagcggcgatttttccggctggcagctgcatttttctcaaaaaaagaatcacaaagatttgggcgtcgttttgttggtcctgacggactgagaaagcggcgccttttttcatttcaaaaagggcgctggtcgcagcgcctgtatttgaaggccggagcaatcatgctccggccttattttttatgcacgggaggagttacatgagcatcagcacagaagaaaaggaccgttacctcagagaaacggcaatcgtccttgcccgagaaggatttcagacgggcaaaactgataccggcaagcttcgtgtcctgcttgacggtgcgccgctgtgcgaggtgaccgagaacggcggcatcacctaccgaaatgaggacattaatgaaccggaacgggtcgccgccaaggacatggtgtatgagatcgtcagaaacacagcggaatatatgcggcagatggaaacagcgccctttttgaaagccgacggtctggaggacggctacaaggtgttggcggatttcaacggcactgtgctggctggagttcagagcaaacacggagtccacttcgtcacatgggattgggcctatgggcacacaggagtatgtcatgggcactatttcatggagaactatgcaggagccaaacaggactttgccatccgctccgggctgattcaaaaggaacagcttttcaccccagagcagatgactgagatttatcgctgctgtgcggactctgtagacggagatttctttgaactcacgggagagcaggaaaaaatgatccgcagtgttcagcagcagattgaggagtgtgtgccggatttggatgagcgaatccggcagcaggaagaagccttggaacaagtcgcgcaggaacagataatgtaatatcaaacggtacgggccggagtcttagcaataagattccggcccttttttcatttcagagaggagttcgcttatgccgtactatttcatgcgagacacgccgctgcaggcgttggagcagttgatgatgtctcagcccggtcaaaaacccagaggcggtggaatataccgcagcccatttcattacacgcccaaagatgtggcgtgcgaatactgccagaactatgaccgcaagcatccgtgccgcctgtgtgaatgcacctgtctggaggaacggatcgaagcaggtgtactggagatgaatgagttcgtgcgggactgcttcgcaccctctatggggccgcagttccgaaaacggatgcatcagcaactcagagaaagaaaccctcaattcttcctgtccaatgcccaccggcgaagatggacatactggcgggaacgctgctggcgtctgtctgaccggaacaaagcggctctcttcctgctcacggcatacgagagcctttggcgcagaatggtctggaaatgcgggaacgacggttttgactttcaaagcgtccgtctcggagggatcgagccggagttatacagcgtctaccaggcggcgaaggccattgcagtcggctgctgcaatattactcttgcggaccttgcgtctccggaactggtcacagatgaggcgttccacctgatcactggcgcactactgatggccaaatacggagatgcggttttgaatttggaaaaaggagtgaatgaaacatgatgattcaagcggttctcggtaatcccaaccacccggaatacggcgtggcgaccatcccattccccatcccacatgaccagtacgcacactgcatggagctgttggaggcattggagatcggcgacgcggtcaagacggactgcaaggtggagaagatcgacagtttctacactgtcctgaaacgagcggaaatgctcacggtcaatgtggaggagctgaactatctcgccaagcggctggaaagcttcgacaccggcgaggccgcacagtttcaggcgatggctcacaagctggagcttttcgagctgaaggatctcatcaacctgaccttctgctgccagcaggccacggtcatcaccgacttttccgacctcgccgctgttggccgtgaccactacatgaacctgcacggcggcagcgcaagtgtggatgagctgaacaaactggatggcgaggaaactgcgcggcggctcatcgaaaacggcagcggcaaaatcactccctacggcgtggtctacgacaacggcatgaagctggagcaggtctacgacggccggttcttcccctgctattactatgagccgaatgccatcaccgttgcggtgaccgctaagtccgaaccggaggacacggagcatatcacatggctgttccttcccatggtgcaggaggagatcgaccgcgccctccttcgcgggggcatcacagatcccgccgatgttcgtctgcggctggaggacagccagctccccaatgaggtggatatcctgttggatatggagtgcgaaactctctctgatctcaacgaactggcagcggcaacggatgggttgtcaaaagcggatatggaaaagctgggtgccgtggtcacgctggcagagccaaagtccgcggcacagatcaaaaatctcgcggaaaacctcgacctctttgacttcgcccccggcacacatacgccggaggagtacggcaagtacatgatccgtcagtccggtcatttcgactatgacgaaaatctcgacgctttttatgactatgaaaagtacggcacggagcgcatgaacgcggaggacgggatgttcaccgaccgaggttacatcgcgtacaagggctataccagcatggaggaagtaatgaacggcagccagagcagccacatggagatgggaggtttttcacgatgatcattcaggcggaacttaagtgtaagcagaccgggtgtgaggcagatctctgtgccgtggataaggtcatcgagctgccaagcccgcggttccagcagttcagccgcgcactgctggctgactatgatttcatcgcagaaaacaaaaatgccatccgacacgatgaggatgccaggcactgtctgctcatcctcgatgcggagggaatggacggtttccttgttgacccgcaggggcacaactacgcccggtacagcgcctttgttcccaacgcccgcagcttgctgacgccggatatggggatcgaccgcagctatctttcgccggcagagccttggcgggatgagagcagggatgaaatgctccgcatgacgctgcgtgtcgatggaaagccggactacaccctcgtcctccccgctgacgaggaatacctcgatgcggtgaagacttacctcgatatcgacgttttcgcagatgcgatgctctgtgatattcgcttcaaggtgccttacatcggtgagctaattcgtgacacggattgccccgccgtggaggattacaacgattttgccgaagccttggaggacatctggcagaaggacgggatgctcctgacctacgccgccgtgctggaggccgagcggccggatacgctacgcggagcctgtgaactcctgcgaaatctggacaactatcagcgcatcacggagggcgcctacggttacggtcagcagcgattgcaggaaacgctgg

SEQ ID NO: 1340 - DNA, 10500 bp, Unknown
  16S sequences of unknown bacteria
cttaattataggaggaaatcacaatgaaaaaagtactcgcactggtactggctgttgttatggtttgcaccatggctatggctattaccattaagcctgctgatcctgcgcagcccggtgcttccactggcaaagttcctgttcttgccaacatcaagcccggtgagactgttacctttgaactgaaagacgccgatggtaaggaagttctctattacaacaaagacaacaagtttgttcctgctaacaatgtagttactgttactttcgcaaagggcgctgaatatgttgagtcccagggttgggttaagactggccctggcgatcttgccaacgcttatcagtatcagattaaattcaagagcgatctgaacaagattgctgatactaccgttcccgagatccagatttctggtgtagctttcaaggctaccggctataatgctgttaccctgctgaaggcttctaaacccgatgaaattctcggttattccttcggctatgagaaggaagagctcaatcctgttgaaaacgacagcaactctttctctcccattggcggcaaggtgaatgttgttgcttctctgaaggataagaacggcaaggatgttgctgctcttgaggttactgttaacggcatgacttatactcttactaaaggcatgaagttctacgccctggatactgcaatcacttttgatcctgccaaggataagggctattccggcaatgtagctcccaaggctctcctcgctaacctctacaatatgcccgcaaagggtgaggttgctctgggcgttgatgctaacactgtttacaaggtatatgcaaagggtgttgacggcaaggttttgtctgttgctgctactaacaacgatggcgttctgaccttcaacgttcccgctatgaccactgttctcgtcactaccgaaaccttgaccactactggtaccgttggcaccaccaccacccccggttccaccaccaaccccggcaccggcgctaacgatgtagttggcgtagctgctgctctggctgttgttgctctggtttccggcgctgccatctccctgaagaaataagttagtcccacgactgcttatatctcctaagagataaaccaaaatcaccccccggtttctccagccggggggctttcttgcgcctgcatatccccgcccgcggcggcatagcatagggcaagggggcgagcgcatgagaaaaatcctgccaatgatcctgtgcctgttgctgctgggcggctgcgccaaggggggcgagcctggcatcacaccagaggaaatacaggcccggctgaccgcagattgctgcttcacggcggcctttacttacgaaaatatagagggctgcgccgaggtggaaaagaccggcgaggtgttcagcattacactgacggagccggaggtgctgctggggctcagctttgtgctggggccggagggctcccaaatgatctacggcgataccgtcattgacctgcaggatcacaccatccacgaggaagcgctggcagcggtgatggagcgggtcttcgctggggcagacgcgctgaccgtcacccggcagaacgggcacattacggccacggcagactgcacatttttccattatgaggtgatgctggcggaggacactggctatcccacgggcatttccgtgccggagctgaatatcgagatcgccattaccgattacaccccggcggccggcgtgtagcggtgggatgagcacaacaggacacagcaaagccccccggctggagaaaccggggggtgatttggtttatctcagagagaatcggatagtcagcctatcttatttcttcagggagatggcagcgccggaaaccagagcaacaacagccagagcagcagctacgccaactacatcgttagcgccggtgccggggttggtggtggtgccggtgttaccagtattggcggaagaaccaccaacattggggataacgccatcagtcttaaccagatcgcgaacatcagtggtggtaatggtccagtaaccagtctcaacaccattgatatccttggttacgccaaaggtcagaccggaagcatacagcttgccgttagcgtctacaccatagtagtaatcattggtatcgcccttaatcttataggtcagagaaccagcagttaccttaaagccatcaaccgcaacggtagtgggaagggttacgccagtggggataacagaagcgctgatcttgctgggatcgccattagctacggtgaacttgaacgcagtgttagcgggaaccttcagagtaatcttgtcatttacatgagtggtctcaatggcatcgctaccagtgatataccaaccttcagtagcccagtcaaagttggaaccagcagtcagcttagtggtcttataaccgatatcataggcagcccagaattcagtgtcgaaaacaccagtaacagccttggacacgccgccttcaaccagcttgctcagaacgagcttgccatctttagcggtgaattcagcataggtgttggtcttagcaacagaggtgatcttgagggtgttgatggtcatgtcaactttgccatccagagcacgatcggtgttgtcaacagcaatctgataattgccttcgttgaaagaaccagctacgccttcaaccttgaagttcttggcatcgcgagtaggattattcagataggtgtcgagaaccttgaagaaagcatcatccagttccaggacatacttattgttggcatcatacttatctgcgagttcaacagtaccataagtgttgctaccagaaccaccgggaacaacagttacagcattaccagctgcggcgaaagccatggtgcaaaccatgatgacagccagtaccagtgcgagtacttttttcattgtgatttcctcctaaaattattttggtgtggtgtgcggcgtctccaccgccgcttaccatagtcattgtattacatattgtaaccaattgcaacccccttttgcaatttttagggtgaaaatttgtaaataatccgtgaattcctccaaccatatacagatgcgtacgccagagatacacaaatcggttacgaaattgtaatcagtgtaatttttcccgccgcggcccgccttatacggggcagggttgaaataatccctaaaaggacaataaaaataaccgcccctgctgcccaagcgttgcggttattttttaactaaaacacagggaaagcaaccgctgccggccgcatcacctttgcaatattattgtagtaactatgctgcattctgtcaccccccgcagagcttcggctccgcaggggtcgtttcattttatatgcccaaatacatggccatgtactgcttggcgctgcgacgccagctgaaatcgcacttgagggcgcggggcagcatttcggcgcggtattcgctgtgatacagccccatggcccgccgcacggcccccagcatatcatcggcattgtagctctggaaggtgaagccgcagccgccgcccggggtgtcccagtcgatgatggaatccgccaggccgccggtgctgcgcacgatgggaatggtgccataccgcagggcgatcatctgggccaggccgcagggctcgctttggctgggcatcaggaagaaatcggctccggcgtagatctgccgggagagggtgggcataaacccgcaggtaaaggccacctgctgcgggtgccgccgctgcatctcccggaagaattcctcatagcggtactcgccgctgcccagtatgacgacctgcatccccatgcgcagcatattttccatggcgtattccaccaaatcaaaccctttgtggcttaccaggcggcttaccatggccagaatgggggtatcgggttcttccggcaggtgcatctgctgctggagggcggccttgcacagggccttgccctccggctttctcgccgagaaattggcggccagggcgtgatccctggagggattgtagccaacggtatcaatgccattgaggatgccgcacagcttccactccttctgccgcaggatctcatccagcccatggccaaaataagggtcgaggatctccttggcataggtggggcttacagtggagatgcgctcgcattcctccagggcgcccttcatcatattcaggtccccgtggaattccaccttaccgatggcccagtccggcaggccgcacacatccccggccacatccagcccaaactgcccctgatactggatattatgaatggtaaagacggtatgggtgcgggagagcttggggacctcacgatagaatacattgaggtaaaccgggataagagcggtctgccagtcattgcagtggatgacatccggctcataatcaatgtgggttagggcctccagcacagccttagagaaaaacgcaaagcgctcggcctcatcaaagtatccgtatatgccgccctcccgcttaaaatactgctcgttatccaggaagtaatactgtacgccgccatactgcatggtaaagacaccgcagtgcgccacccgccaggaaagcggcaccccaaagctggtgagaaaggtcatattggcgcgccactgcaggccgatgctgccgtaaagcggcataatgacccggcactcggcgccctccttttgcagggcggccggcagggaacctgccacatcggccagcccgccggaggcggcaaaggggctacactcgctgcacgcaaacagaattttcattgcaggctttcctccttatatataataggtaactgcgcggtgcgggggccatcgcctgcggcatccgcacagttttagtcaagctaaaataagcgaggctcagactctggtatcccgcggaaggtaaagcggatagctggcataacctgccagacgacgattatcggccaccagcacgcccttatcacagatgcagtaatccaagtcggcaccattgccaatgtaacagccctgcatgatgatggaatttttcaccaccgcgccatgcccgatgcgggccccacggaatacaatgcagttttccacccggccctcgatgatgcagccatcggccacaagagaattggaaacggcggcggaaagaccgtatttcaccgggacctcatcctgcacgcgggtgtaaacgggacggtccatggggaacagagtgctgcgcaccgcggggtccagcagacgcatcgagatctcaaagtaggcctgcatgctgttggccgcccggcaaaaaccgtcataccgatagcagtagatgggcaattcccgccctttttggatcaggcaggtatccacaaaggaatactgattcaggctggcagcttcggtcaccagctgaataagcagttcccggttgacgatatacatattattgaacatcaggtcgccttcgccgccgcgggtggcttccagcaggcggccgtcctctccggcggaaaccatgaccgagctgtgtccgtgctccgtgcagataagggtaatgcctgctttatgcgcaatgtgatactccaggacatcggaaagatcgacaccgcagatgacatcgcaatccgaaacagcgatgtaatcggcgctggagctttgcagatagcccaaaaggctggtcatcgattccagcgtaccgcggctgtaaccggcgctgccggcggaggaatagggcgggaaataggcaatgccgccccgcttgcgggaaagatcccactccttaccggagccgatgtgttccatcagagagtgatagttgttctgcataaccagggcgacagaatccaccccggcgtgggacatgcgggaaaggaccaggtcgatgaggcggtaacggctggcaaagggcactgagcccatggagcgtcgcgcggtcaagccacccaaggcgtcatcgtgcgaattggaaaagataatgcccgtcattttgttattggccatgttacagcacctcccctacatcttcttctaccatgccgcgggcgggtacaatagttccagccccaacggtgaccccggcaccaatgacggtaacgccccactgatctttatcggccatcagttccgggcgttcgcccacataggcgccccggcggatcaccgcgttttccgccacaatggcaaagtgcacttcggcgccctcttccaccacggcgcccggcattaggatgctggaatccaccacggcgtttttagccacatgaacaccggagaacagaatggagaaatccacatggccggcgatctcgcagccctcagagaccatcgagttctgtaccttggcgcctggcgcaatgtagtgcggcggcatgcaggggttgcggctgtaaatcttccagctggggtcgtaaagatccatcggcaccttgggatccaacaggtccatattggcctcccacaggctatcgatggtgccgacatccttccagtagccatcaaaggaataggctaccagcttttcgcctgccgccaacatcttggggataatgttcttgccaaagtctttttccgaagcggggtcggcgtcatcggccagcaggtattcccgcagctttttccaggtaaagatataaacacccatcgaggccaggttgctcttggggttcttgggcttttcctcaaactcgtagatggtggtatcctcgcgggtattcataataccaaagcgggaggcttcctccatcggcacttcaaaaaccgcgatggtgcagtccgcgcccatctttttgtggtgatccagcatcttggtgtagtccatcttgtagatgtgatcaccggagaggatgagaacatattcggggtcgtaacgctcaataaaggggatattctggcagatggcattggcggtgccggtgtaccagtcactgccgctgctcttctggtaggggggcagtacaaatacgccgccgttcagccggtccaaatcccacggctgcccgttgcccaggtattcattgagcaccaacggctggtactgagtcagtacgcccacagtatctatgccggaattgacacagttggaaagggggaaatcgatgatgcggtatttgccgccaaagggcaccgcgggcttggccagctttttggtaagggcgtacagccgactgccctggccgcccgccagcagcatggccacccattctttcttcatgaacatctgatgtcactccttctcggtgttgatgggttccagtatcatgcagctgagcggcggcacatccagcgtgatgctgtgtgcccattggcccagcggttgttcctcgctgcggtacagcgtttcccggtcaaatcccgcgccgccatactgctcttcctcgctgcacagggccacccggtaggtaccggcctccggcacgcccatacggtagtcctcccaccggctggcggcaaagttgcacagcaccagtgattttttgcccttttcatcggcgcggtaataggtgatgacactgcgtgtgttgtcatcggcattcagccagcggaagccatcccagttgtcctccacctgccacagggcggggtgagccaggtagtagtggttcagcgcccggatgtaatccttcgttttgcggtggctctcgtaatccagcagcatccagtccagctgcttatggtagtcccattcaataaactggccgaactcacagcccataaagagcagcttttttccggggtgggtcatcatatagcccataaaggtgcgcagccccgcgaatttctggttatagtccccgggcattttattcagcagcgagcccttgccgtgcaccacctcatcatgggagatgggcagcacaaagttctcactgaaggcgtacatcatgctgaaggtgagcttatcgtgattgtagctgcggaagtaggggtccagcgaggtgtagaacagggtatcgttcatccagcccatgttccacttaaagttgaagcccaggccgccgatctccggcgggcgggtaaccagcggccacgcggtggattcctccgcgatcatgaggaaaccggggtgctcgctcagcaccgtgctgttcagcttgcgcaggaaggccactgcctccaggttttcccggccgccgttgatattcgggcgccattcgccctcctgccggccataatccagatacagcatactggccacagcgtccactcttatgccgtctatgtgatatgtatgcgcccagaagttcgcgctggaggtgaggaaactctgcacctcggtgcgtccgaaatcaaagacccgggtgccccagtccttgtgctcccacttggcggggtcgctgtattcgtagcagcacgcgccatcgtattcgtacaggccaaactcatccttggggaaatgcgccggtacccaatccatgatgacaccgatgccagcctcatgcagggcatccaccaatgccataaaatcgtgcggggtgccgtagcggctgctgggggcgtagtagcctgtcacctggtagccccaggagccatcataggggtgctcggtggggggcagcagctccacatgggtatagcccatttcagtcaggtaggtgggcagctcctccgccaattgcagataggagtaatagttcccatcggcattgcgccgccaggaaccgatatgcagctcgtagatattcaccggcaggctgcgggcatcctgagcggcccgctccgtcatccattcggcatcgtgccagcggtaacccgccagccggtagatcttgctggcgttctctggcggagtctgggtatggaaagcaaatgggtccgctttatacagcgtgcgcccattcgccgtggtaatctggtatttgtagcaatcatagtcatgggtcagctctaccgtggcgccccacaggccctgctcattcaggcgggtcatggggtttgcagccgcgtcccagccattaaaatcccccaccacactgatggccgccgcatgtggcgcccaggtgcagaagttggtttttccatttagctgccggtgggcccccagcagctcccacgcgtgtgcgttggtaccctggtggaacagataaaccggcatttccttcgattttgtgatcctgttcatggtctttgcatcctctcctttgtgcaagggataacagccatcgggcggaggaaaatccccctttttacccatcttttattatagcatttccccctaaagcgggcaagtgatttacacccggtttgtacgattttacagatagcatacattttgccggtgttttggtacaaaatgatgaacccctgccaaaagatgcccacggcttgcctttttgcgccccaaatggtacactgttggaaacccattaccgcgaaggagaatccggccatgtttgtcgatctgcatattcacagttatttttccgatggcgcccagaccccggagcaggccgcgctggcctgccgggatagcggcgtaggcctggccgccctgtgcgaccacaacagttggctgggctgcgagcgctttgcggccgcctgtgaggacctgggggtacagtccatccgcggggcggaattcgactgccgctggcaggggtaccacctgcatatcctggggtatggctttacccccacgccgcagctggccgccattgcccaccgcagccgggagctgctgctgcaaatgagcgtggacctcatcgaaaaaatggccccggaatacccgcagctgagtgtggaggagtaccgggattaccactacgacccgcaaaaaggcggctgggccgggctgcactatctgcaggaaaaaggtgtgacccagaccctgagcgagggaatgcccctgtatgcccgctatggcctagattacacctcctacccctttccgcaggccgccgaggtcatcaccgccatccgggaggcaggcggtgccgctgtgctggcccatccgggcaattatttttccgggatggaactagccagtttatacaccacttttaatgagctgtgcgcgctgggactgggcggtatcgaggcctattatcccacgcatagcaaaatttttgccacgcagacggcgctcttttgcgaaaaaaaaggactgctcatcaccagcggaagcgatgatcatgggctttttgcccatacagacggttggcagcagtaccacatcggctgccagatgatggaaccgcaccgactgcgactgggcaatttggcgccggaagaatgagcgaaaatttacaccaattctacaccactttcgaaaaaattctccgggcgctcaccgctcggaggatattttttcctgtccttctgcctcgtaaaagatgaaatcatccacatcaccagccacagaaaaccagctttctccataatcatatgcgtttgtgttattatctggcatgataatgctcctttatgcaaagattaacttccttattctatgctatctcacgcaaaaagatgcttgaaaaacattgtaatagtaggaggaaatcacaatgaaaaaagtactcgcactggtactggctgtcatcatgg

SEQ ID NO: 1341 - DNA, 5935 bp, Unknown
  16S sequences of unknown bacteria
aaaatcgagattttaactcgattttatataattgcatttgctaatgcaattattcagtagacattatttatcaaatattaaaaaattttgaaagccgctgccttatagggcttttttggccgaaaagcaaaaaagtaaggactatttgaagcacagtcataattcccgcctggatgattctgccgggaatcagcgcgatgtatcccttgccgtaaagcaccgatatccaaagtgaattaagcagcaccgagccgaagagctgatttattataacgctcagtatcacccgtaaaagggtggcgtttttatgtataaaaaacgcggtgcaggcggctgttaaaacggcggtgagtgtaaatccggggaaataggcgccgctcggaaaaagcaaagcgcccaaaatatcgccgatgcccgccaccgccatcgcccacggcgtgccgagcattgccgcagcaaacgccaccgcaataaacgcaaagccgaagcgctgattccaaacgctgtaggacataaggcgttcgagtacaatcttaagcgctatgagcagcgccgcggttacggtttgcaggacatactgtttgttactttttttcataaaaaaacctccttatttacccgttttaccgataataaggagaaaagtatcttcatattagtcggcagcgggatgcgactgccgtaccgcggaaatatccttcgtctgccgggcaactccccgtcccgacagcacttgacgcacgaccgtctactctgcaacggtgttttaaacaccgataattattttacacttattaagtctgtttgtcaataattacttgcatattgcggaaaaatcaaatataatgagattataaaatacacaggggagtgtgtgctttgcgacgccttttggcaaaagctgcggactttatccgcgaatcggataaaattctgctaataatatgcattttcaccagtctttacggctgtgcggcggttttttccgccacccattacagggctacatatcgcccgtttttaacccaatttatatgctttgcggcgggggtcgttgccgcgcttataatttcggcggtagattactcaaaaattctgcgctactggtatcttgcggcggcactgggcgtaattcccgttatgcttacattctttataggctttgcgcccgagggtaccgacgataaggcatggcttgacttaggctttaccacctttcagccggcggagcttttgaaaatttgctttgtactgaccttcagcgcgcatataagcgccgtaaagcccaatattaacaagcttaaatacttaatacccgtttgtttgcacggagcttttccggtcttgcttatacattttcagggcgatgacggaacggcacttgtttttgcggtcatggtcgtgtttatgctttgggcggcgggcgtttcaaaaaaatattttttggctatgattccagtaatcctgattgccgcgcccattctttatttctttattatgaatgacgaccagcgcgacaggcttaccgcaatcttcggcgttttgaatttcggcgcgaagcgcgacccgaacgagcaatggcctacctatcagcagtggcgcggcagaaccgcacttgccaacggcggctttgcgggtcagggctttttaaacggcgatttcacgcagaacggaatcgttccctacggctttaacgattttattttcgtaagcataggggaggagctcggctttttgggctgtatggctgtcattctgctgctcggcggaatctgcttcaggtgcttacaggtggcgcggctttcaaaaaaggacagcggcaagcttatctgcgtgggaattttcgcaatgatatttgcccaggcggtaattaatataggtatgtgcacatctgtcctgccggtcataggtataaccctgccgtttttcagcgcgggcggaacctcgcttttatgcttgtatctcggtataggtttggtgcttaatgtttatctgcaccgcaattcgagaaccatatatctgcacgataatatgaaatgatttccaagcatagcaatatttgtctataaaatacaatatattttacttgataaaatctcggggaatttgtaaaattagaatataaaataaagaggggcgattatatgattcgcgtaaccgtttataatgaatttttacatgaaaaaaccgatgataatgtcaaggcgatatatcccgagggaatacataatgcccttaaagagcacctgacagatgatgagattacggtaaaaaccgtaacgcttgataatgtcgaggatattaccgacgagctgctcagcaataccgatgttcttctttggtgggggcatattgcacacgataaggtgccggacgaggtggcaaagcgtgtgcaaaacgcagtgctttcgggcatgggtgccgtattccttcattctgcacaccattcaaagccgttcaagctgcttatgggcacaccctgctcgctcggctggcgtgaaaacggcgaccgtgagtatgtttgggtctgcgacccctctcacccgatagccgagggtattgactgttacataaaattagagcacgaggaaacctatgccgaacctttcagcatacccgagcccgacaagcttatatttataggcagctatgagggcggcgaggtattgcgcgcgggctgctgctacaggcgcggttacggaaagatattttatttccagcccgggcatgaaaccttcccgacttaccacaacccgcagataattcgcgttattaaaaatgcgattcattgggcaaacaacgattaccgcagggaaattgattgccccaatattaaaaaaatcgaggaatgataccccatatgaaaaagaattatgcagttataggctacggcggacagggcggctggcacacaaggcagatacttgcgagcgatgttgccgcacttaccggtatttacgatatcgacccgaaaaaagccgagcttgccgagaaaaacggaatacacgcttacgcttcatatgatgaggttttggcggatgcggcggttgacgctgtcgtaatagccgtaccgaacgattgccacaaggagcttgttataaaagcgcttgaaaaggggaaaaacgttatttgcgaaaagccggttgaaatgtcggttgcagcgcttgatgaaatgattgccgccgccgataaatcgggaaaattcttcaccgttcaccagaacagacggtgggacgttgactttttggcaatgaaaaagatagtaaattcgggcgagataggcgagcttataaacattgaatcgagaatacacggctcgcgcggaataccgagcgactggcgctgccacaagccctacggcggcggtatgatactcgactggggtgtgcatctcatcgaccagatactgcagataataaaggaaaaaatcgtaagcgtatactgcacggttaccaatatcacgaccgacgaggttgacgacggctttaagcttaccctttattttgaaagcggaaagaccgcctatattgaggtaggtacatataactttattgcaatgccgcgcttttatctgcagtgcaaaaacggcagcgcaatcattgaggactggcagaaaaaggcacaggttgcgcgcatgaaggcatggaacgaaaaagaagtcctgcccgtgcagaccgccgcgggaattaccaaaaccatggcgccgcgcgatgagataacccttgatatgtacgaggttgaccgtccggtaagcgatgtacatgatttctaccgcaatttctgcgccgtgcttgataaaaaagcagagcctgccattaagcatagcgaggttcgccgcgttatgcaggttatggaggcggcgtttgaatcctccgataaaaagcagcgcattgaggttaatatttaatgcttaacctttctgtaataggcacgagcgggattaccgaaaagtttttatctgccgcgcgtaaaacaggacgctataaattcaggaccgtttattcgcgtaccgccgaaaagggcagagcgtttgccgaaaagcagggctttgagggcttttgcaccgatataaatgcattggcgggcgacagcgcgactaatgctgtgtatatagcctcgccgaactcctgccactttgcacaaagcaagctttttttgcaaaccggaaagcacgttttctgcgaaaagcctatcgtgacaaatgcggcggaatatgatgagcttttatcccttgccgataaaagcggactcatttacgccgaggcaattatgagccgccactttaaggggcgggaaaagctctttaaggggctttcacaaatcggaaatatttcggttgcgagaataaatttttgtcagcgctcaagcagatatgacgcttttatgtcgggcgagcatatgaatattttcgatatgtcgctctgtgcgggaacgcttatggatttaggcgtttactgtgtgtatgcggcggttgatatgttcggtatgccgaaaaatattaaagcctgcgcctcgttttttgaaaacggcgcggataaatcgggctccgcaatttttgaatatgacggatttacagcgttactcacctacagcaaggcggggcaatctgtttcggattccgaaatagtgggggacagcggcgttttaaaaatcggctctgtttcgcaatacggcgatatttcgcttgtaaagggcggcgccgaaataattctttcggaaatgcctacccgcgatgaaataatgggcgacgaggcaattaaatttgccgattacattgaaaacggaaaagaattttataacgattaccgcacggtatcggctcttacgcacaatgtccatacctgtatggacttaataaaacaaagcgcgaacattaaatatccggaaaggaagataaatctatgaaattaggcattgtaagcgcaatttacgacggctttacctttgaagaagccgttgaaaacgccgtaaagaacggctgtgagtgtatggaagttgcctgctggccgcagggcaaggcggaaagaagatatgcgggagtcagccacattgacgtggataatatgtcccccgagtatatcgcctatataaaggatttctgcgcgaaaaagggcattgaaatttcctcgcttgcgttttatcccaacactatggacggcgacctcagtaaacgcgaggcaaacattgctcaccttaaaaaggtaataaatatgagcgcgcttttgggcgttaatatggttactacctttataggcagggatcagacaaagacggtggaggaaaaccttgaattatttaaggaaatttggccgccgattataaagcttgccgaggaaaagggcgttaaggttgcaattgaaaactgccccatgcttttcggcgcggatcagtggccgggcgggcagaacctgtttaccacaccgaggctttggcgcaaaatgtttgaactgctgcccagtgataatttcggcataaactatgacccgagccactttatttggcagcagatcgactacataaagccgctttatgagttcagggataaaatattccatgttcattttaaggatatcaagctgtttaaggataagcttgacgacgtgggcataatgggctatccgcttgatttcatgagcccgaagctgccgggactcggtgatgttgactggggcaaatatgtttcagcccttaccgatataggctatgacggctatgcctgcattgaggttgaggataaagcctttgaaggctcaaagcagcgcgttatggattccgttgcattaagctgccgctatatgcgtcagtttgtaatataatgtctactgaataattgcattagcaaatgcaattatataaaatcgagttaaaatctcgattttatgggtcaaaacctttgttttgaccgtcagtatccattgattgtcgcctgatttta

SEQ ID NO: 1342 - DNA, 5485 bp, Unknown
  16S sequences of unknown bacteria
gacaaaatcggcgtctccgaaggcgtaaaatgcctgaaatgcccgggcggacacgcgtggggcgactccgcgcttctcgcgacggcacgggacatgatgaaaatcatgcgtttcgtcatggacgacgggaaggtcggcggggagcagatactcgacgcctggtatgtgcgggcggcgaggtcatgcctcatctccaccgcgtccgaaagctatgattacgagcggaacggttacgggtaccagatctggaaattttacggcgacgggtacttcttcaacggcatgggctgtcagttcaccgtcgcggttccggaaaaggacatgatcctcgtcttcaacggcgacaatcagggcgtcaatggcgctggcgcggttatcctcgacagcttcaatgaactgatagcgaaaacggcgggcggcgagctgccggagaacgatgcggaaaaggcttcacttgacagatatgccgacaatatgacactgttcgccgcgcggggagagaaatattctccggtcgggaaagtaattgacggcaggacgtttttaatgaacgaaaacccgatgggctggaaaagattccgcgtcgacctcaggaaaaacgacggtcagatagtgtacgaaaacgcgcagggggagaaggcgctcgaattcgggatttgtgagaacagcttcgtgttattcccgcaggaaggctattcgcgggaggtcggctcggttccggcgcacgggaacttctacaaatgcgccgcgtccgccgcatggacggatgagagaacgctgtcgctcgttgtacagatcatcgacgaatacttcggacggctctggattgacctgatattcgacggagacaatgctgcggtgaaaatgcgcaagtccgccgaggattttctcgacgaatactccggtgaggggacgggaagaatggcgtgattcagcgattatgtgctatagttcagcaccggcgtgtatagacttccggggcggtttccggtataatatagcaaatgatatctcaaaaggagagcaataatgcagcttaaaaccgtttcatcacaatacaaacacctcccggagcggggcgaaaacgacttcgcgccgtatctcaccgggagcgagatcatgcttcggaacgacaccttctcgtttcaggcgctctgccgcgcggacgacgggtgcgtctgcctgccggtcagcgtttccgccgtctgcgggggcgtgccggtcgaggcgtggagagtcgactacgcgccggtcatccgcgtcgggaacgtctacgacgaaaagggctttgagagcgacaaacccggagctttcccggacatcctctcgccgagaccctcggagccggtcgtcgaaaagctcgacgcgccgtggaacaacgcgtatttcgagaaggacaccgacaacctcatcaacatcaccggcgatatgtggctcccggtctggttcacgctcaacccggatgggaagacgctcacgcccggaaagcgcacgataaccgtaaaaatgacgagcctcgccgacccggacgacatcgtcacggcggagattccgctcgaggtcgccgacgaggagctcccggagcaggacgtgttctgcaccaactggttccactgcgactgcctcagtgacctgcaccatgtggagctatacagcgacgagttctacgcgatatttgacgaatacatacgcaacatgaccgagcaccggcagaacacgctgcttctcccggcgttcacaccgccgctcgacacgccgatcgggtcggagcggatgaacgtgcagctcgtcgacatctcgcgtgagaacggagattggaagttcgggttcgacagaatgcggagattcataaagcacgccgacaaatgcgggataaaatggttcgagcactgccacctcttctcacagtggggcgcataccacgcgccgaacatctatctgtcagacgggacgagaattttcgggcaggagaccgacgccgcgggagaggaatactccgggttcatacgcgcgtatctcatggcgttcctcgcgttcgcgaaggaggtcgggatcgaaaagcggctgatattccacatctcggacgagccggtgccaaagcagcttgagtcctacgcgaaagccgtcggggttgtccgcgacctgcttgacggatatctgaccgcggacgccatgtcgcacatcgacttctgggaaaaagggcttgtcgggcagccggtcgtcgatatgccgttcgcggagaatttcttcgggaagtgcccggatttctgggtctactacaccggcggatactacgagaaaaactcggcaaaccggctcatcacaaacaccgcggcgcggacgagagtactcggcgtacagatgtggtactacggcgcgaagggattccttcactggggctacaactactgctatgaccggctgagcgcggggatggtcgacccgagggtgtcgccgaacgggtataagctctacgcgggcgactgctgtctgccgtacccgaccgtcaccggcgggagacacgtcgtgccgtcgataagggaaaagctgatgggcgaggcgttcgacgatctcagagcgctgaagctgctcgagaaaaagatcggcagggaagagacactgaaaatctgcgaggaaacgctcggcgggaagatcagtaatacgctgattccggacgcggacacgctgcataagctcaggaataaggtcaacaggctttgtgccgaaagataaaaaaagagccccggagccgacgctccggggttttcattgtcattttgctgatcaatcagtgtgttaagaacagcatcaggaagaacaggatcataataacccaagtgccgaccttgacttcctttgccttgccggtgaagagcttgatcgccacgtaggagatgagaccgaaagctataccataggagatgttataggagaacggcatcatagccatcgtgaggaacgccggaacagacgacgccgggtcatgccaatcgatctccttgacgcacgccatcatgaggacgccgacatagatgagagcggcggcggtagcgcagcccggaatcagctgtgcgaccggcgagaggaacatcgcgatgaagaagaacagcgcggtgaacatcgaggaaagaccggtacgtccgccctcagcgacacccgcggaggactcgacgaaggtcgtgacggtggaagttccgcagattgcgcccgtggtggtagcgacagcgtcagcgagcattgccttgtccatgttcgggacctcgccctctttggtcagcatattgccgcgcgcgcacgcgccgtagagagttccgatggtgtcgaacatatcgaccatgcagaacgcgagagcggtagtgacgataacaagaatcaggttagcggttccgtgcgcctcagcgaaagcggagaagttgaagccgtcagtgaaaaccttgaagagagcctcagagccgaaagccttgaaagcctcgatcgggctgtccatagagatagcgagcgggtagaagttcggaacggtcagtccaagcaggtagtaaagaaccgcgccgccgagaatgccccacagaacagctccgcggacattcttcttcgacattatcgcgatggcgataacagcggcgatagtaacgagaagcggcatgacattcgcccaagcgccttcattaagaaggttgaacgagccgagcgtgacgccggtcgagctggacggaatgacgaccttcgcgttctgaaggccgatgaaagcgatgaaaagtccgatacccgccggaatgcactttctgacggcgtccggaatcgctgtgaaaatcttctttctgagaccggtgactgtgagaacaatgaataccacgccgtccataagcacaagcaccagcgcgttcgcgtatgtgagcccgaacccgacgcagcaggtatagacgaagaacgcgttaagacccatgccgctcgcctgcgcgagaggaaggttggagagaagacctatcagtacagtaccgacgatagccgaaatggctgtcgcgatataaatcgcgccgtaagaaacgccgagcaccggtgtgccgtcgccgaacgggttcgcgaacatattcgcgttgaccatcaggatgtacaccatagcgaagaaggtggtcagaccggccatgaattccgtcttcacattggtgccgttttccttgagcttaaaaaacttttccatgttgggaaactcctttcaaagacgtaaaaaattatttacaacctattatagcacatattctgtcaaatttcaaggggttccggcaaaaaagttccaaaaaaatttaccggatatttttcgctaaactcttccatttttgctccggatgtggtataatataatttgttgttttcaggcgaaatgtctgaccggcgcacatcatttttccgccgggaaagaccagagatatatttttcagaagggaacgatcacattatgaaagaattctacactatagatgtcgcgggtctcaagcgcgacctgccgctctgcccgctgtccgacgacctctatatcggcgcgttcgtcatcttcggcgacgtcgagctcaccgaggtctccgcgaaggccctgctcgacaaggctcccgatttcgacattctcgtcaccgccgagtcgaagggcatcccgctcgcgcacgaaatggcgcgccagtccggcaagaacacctacgtcctcgccagaaaagcccccaaactctacatgaaaaacgtcatcaaggtcgaagtcaagtcgatcaccaccgccaaggtccagaccctctacatagacgaagaggacgaaaagaagctccgcggcaaacgcgtactcatagtcgacgacgtaatatcaaccggagagtcgctccacgcgctcgaagcgcttgtcaaccgcgccggcggcaacatcgtcggaagaatggcgatcctcgcggaaggcgacgctatcggacttccggggatcagctatgtgcagaagctgccgctgtttgataagaacggggatcctattccagttaaggaagattaagggatcggcataagaaaagcgggcaacgaacgaaaagcgggcaacgaacgaaaagcgggcaacgaacgaaagcgggcgaccaatggtcgcccctacagtgttgttcttgaccgcttatattgcttgaccattgatataacatctgaccgccgcgaacggcggtctctttttatatcagaattccctcgagatggtcgatctcatgctgaatcgcctgcgcggtgacgccctcatatgttgctatgcgcggcttcatgtcgaggtcgaggtatttcaccttgatctttttgtaccggcgggtcttccggacgcctggaatcgacaggcagccctcctcggtgtcgtactgcatagactttttgattatttcggggttgagcatcaggagcggaaacccgtcacacagcacgacgatgatccgtttccggataccgatcatgttcgcggcgagcccgacgc

SEQ ID NO: 1343 - DNA, 8258 bp, Unknown
  16S sequences of unknown bacteria
acaggggtgacgcaggtctgttcccgttcttccagctgcgccagcgtgtctgcggccaaattggagaggcttcctgtcaaacgaaacgcgcgcacatggacctcgcccacccacagataccaaagctccacctgctcgcccgcgctgcagtgccgggatagatagttccgcagcagcgcggcgtccggttcggtggcatgcagtttcacttcatatcggcagggcttcatggaaaggcccagatcttccactgcgctgcggtagtacgccagcggctgaatggaaaagcaatcttcactgtcatgtttcggaccattcggaggcagcggatgatctgcgcacagcagagtaatgcagctcatggatgctcctttcggtaaaaaagcagggcgggcgtcgatacccgccctgccggctgttgcaactatggttgggaaggggacttactgcttgatttcttccatgataaaagcttcgatctgatcgccttctttaaggtcgttgaatttttcaatggacaggccgcattcataagattcggctacttccttcacatcgtccttaaaacggcgcagggaagccagctcgccttcatgaatgaccacgccatcgcgcacgatacgcacggagcagccgcgctggatcttgccctcctgcacatagcagccggcgatggtgcccacgccggagactttgtaggtctgacggatctcgacccggccgatgacggcttcgcggaatttgggggcgagcatgcccttcatggccgcctccatttcattgatgcagtcgtagatcacgcggtacatgcgcatatctacgttgctgcgggcggcgctgtcgcgcgcggcggcatcggggcgcacgttgaagccgatgatgatcgctttggaggtggcggccagcatcacgtcgctctcattgatggcgccgacgccggaatggattacgcgtacgcgcacctcttcgttggtcagcttttcaagggactgcttgactgcctcggcgctgccctgtacgtcggccttgacgatcaggctcaattctttcatttcgccggaacggatctggctgaataggtcttcgagcgttactttctgcaccggcgcactggcggcggcgcgctcatcggccttgcgctgctccaccagctcacgggccatgcgctcgtcggccacggcgttgaacgtgcagccggcggaaggaacctcggccaagccggtgatctccacgggaacggagggaccggcgtctttcagacggcggcccttgtcgtccaccattgcacggatgcggcccacggaggtaccagcaatgataatgtcgctctggtgcagtgtgccgttctgcaccagcagagtggccacgggaccgcggcccttgtccagacgcgcctcgatcactgcgccggaagcggcgcggttgggattggctttcagctcctgcatctcagctttgagtgtgaccatttccagcaggtcgtccacacccatgccggttttagcggagatggggcagatgatggtgtcgccgccccagtcttcggccagcaagccgtgctcggtcagctgggtcttgatgcgttcgggatcagcggagggcttatccattttgtttaccgccacgatgatgggaatctctgcggctttggcgtggttgatggactcgatcgtctggggcatgatgccgtcgtcggcggctaccaccaggatcgcaatgtcagtgaccatggcgccgcgggcgcgcatggcggtaaaggcctcatggcccggcgtatccagaaacgtgatgggctttccgctaatctccacggtgtaagcgccgatgccctgggtgatgccgccggcctcgccggaggccacattggctttacggatatagtccagcagggaggttttgccgtggtcaacgtggcccatgaccaccacgacgggggcgcgggggaccagatcttcgggcttatcctctgcggtgtcaatcagcttttcctcaatggtgacgatcacttcatgctccactttgcagcccatgtcttcggcaatgatggcggccgtgtcgaagtcgatcacctggctcaccgaggccatgacgccgttcttcatcagggcttttaccacttccgcaccggtttttttcatgcgggaagctaactcgcccacgctgatctcgtcaggaatttccactttgaggggggccttcttggcaatttccagctgcaggcggcgcattttttcctgctcctcctggcggcgcttgttggaaaaagtcatattgccgccgcggcggttattgttgcggaatttctccttgccctgctgcatcttacctgcgcgctggccggccttggagctttcggccatgtcctgcaggcgctcgtcgtatttatccagattgacattggctgctttgcgggtgtctacgatcttggtcttaggcacgcgggaagtcgccggcgcagcaggggctgtcgccggtgcgggagctttccctccgcttttgacggcagaggacttttctgcggcgcctgcggccggcttcgtttcttcctgcgccgtctgaggtgctttggccgcctctttttccgccgatgagtgggcctcggcctggaagctgtcggcaaaaatgacctcgatgctggagatctggtttttctgtgtcaggtaatcgaggacgatggaaatttcttcctctgtcatcaccgcgctgtggcttttcggaggagtggaatattccgaaagaatattcatgatgtccttcgacggcaggttgaagctctttgcaatatcatgtactttgattttatttgtcatagccaaataaagccacctccaaagttaatttttcaggttgattgtttgtgcggccgctttttggcgcggcgtgcgcggatgcgcttatctttttcctgcagccgctggacggaatcatcgtagacgcccggacagcataccgcgagtttttgcactgccgaggcggccaggccggattcggtaatggccagcatggcgcagctcccgcggccgcaggccgcgcccagctcttctttggtaaatggaacggaaagcacctcggcatggctggaagcagttacattgcgtgcacggcggatgctgttttcggcggcatcggcggccagaaaaactacccgggctttaccgtctgcggcggcgccgctgacaccgtcttcgccaagctctgtccggcccgctcgcttggcaaggcccagcagacgtaaaaaaccggtttttgcctcaggtcccattggcggcctccatctgcgcaagcagcgcttcgtaaatctccgccggaattgcggtttcaaatgcacgctccagcgcctttgtcttccgggcgcgggcaagacatgcgccgtcgggacagagataggcgccacggccgggtttcttgccgacaaagtccaggctgatctctccttcgggggatttcacaacccggatcaggtcgcgcttgtttttcatcgtgcggcagcccacgcattgccgctgcggaatcttcttcggtttgagcaatccttatccgcctcctgcgcctgttgttatgcttcttcgtgtaccgtgtccgcgccgtcttcatcttcgatgacgatgctggccacatcacccagcgttacggtttcggtttcttcgtcgtggaaggactcaggcttgatgtcgattttataaccggtcagccgggcagccagacgggcattctggccttctttgccgatggccagggaaagctggtcgtccggcacgatgacgcggcagcccttgccgtcgtcggccatccacacgtccagcacgtcggcgggagccagggctgcagcgatgtattctgtggggttttcgctgaacttgataatatcgatcttttcgccgttcagagcatctaccacagcggccacgcgctgacccttgggaccaatgcaggcgccgatggggtcaatgttttcgtcggcggaccacacggacattttggtacgggagccggcctcgcgggccacatttttcacttccacaataccgtcgtagatttcggggacttccagttcgaacaaccgcttgaccagacccggatgggtgcgggatacgacgacctgggcgccgcgagtgccgcggcggacttccaccatgtacactttcacgcgctctccctcggtgaatacttcaccggggacttgttcgctggcagaaaggagggcgtcggtggcctcagaggcggtgccgatacgcaggctcacattgccgttgcgcggatcgatgcgcgtgaccgtaccggtgagaatctcatgttccttgccggagaactggttgtagatcatgtcgcgctcggcttcctttagcccctggatgatgatctgcttaccgttgccggcagcgatgcggccgaattccacattatctacgggcagactgaccgtctcgcccacaccgatggagccggcgatggctttggcatcggcgcgggaaatctcgctgcctgggttttcaacctcgtccactacggttttctgaatgtacattttcagcgtgcgatgttcctcgtccacacgcaccagaacctcttccacatcggggtggtcgtgcttgtaggcgttgatcagggcctgggtaatcttatccatcatgtagtgctggggaatacctttttctttttccagcatatccagtgcggcgaagatctcctccaccttcatgcctttgcggctttcctgttctttaacagatcttttcatagcaaataaaaacctcacaccattctgccacagaaaacgcggcaaaataaatttttatcaaaagcagttcgcttggttaaaaatcgacgcgcaaccgcaccaaagcaacgtcgcctttttcgaaacggagtgtttcctcgccaactttcagcagcacggcaccgtcttcatagcctgccagatcgccggcaaattccttgcgcccgtccctgtttttgtacaggcggacggtgacaggactgcccagaaaacgggcgaaatcagacgcccgcttgagcggacgctcggcgccggcagaggacacttcaaaggtatagctgccctcaatgggatctgcctcatccaggaggtcgctgacgcggcgggaaatggcttcgcagtcgtcgatgctgacgccgccctccttgtcgatatacagccggagataccaggttccggcctctttcacatattctacatcccacagttcgcacccctgtgcggcgatgacaggagcagccagctctgcagtgagttccgtaacttttttcaatccaatcccgccttttttgaaaaatgtccaagccgttgacttttgaattttgaccaacaaaaagagcggactgcaaagtccactctcccaaaaacctttactaacaatgctactgtaccataaaatcccgatcaatgcaaggtttttccgggattttcttttttattatatgtaatttttttaaactgaaccataaaatagcgataaaagagggagattcggcgcttgaaactgcaaacgtcatgtgtccctttggaattcatagcagcactgattcggaatacgaaaaattgttttaaggaaaagaaacagcctgccttataacgggcgggctgtttggttatctttacgttttcctttttaccattccggcagaccctgacgctgcagggcaatggcctcttccaccgacataggcgcggggttgggcagttccaggaaatcgcgcagctcctgaatgccgcggcccgtaatggaatccacttcaaaaatacgggaacatcctgcggcctccagccattggcgcaccatggggacattggctttgggggaatctacctttgtgataattccgatcagcgggcggttcaagcaggtgggaaggcccggcactaaaacgcagaatggttcgtctgctccagcgatcagcccttcgagatcgcactcaaaagagtagcagtacaatgccttgcaggccagggatttcatttcatagtattcgcccggcgtgtcgatcaatatgtcccaggtattgacatactgcgttttatcgtatctggttttttctcctttgagggcctggatcaacgtggttttgcctgcctcgctgcggccgcacaaatacatttttcgcatgaagatcccttcctgagcgatgtgttattgctgtgaaagcgtgcagacgcggaaatggagatcatctcggaaaaagcgcagattctcttccatggcggcgtccacttccgctctggacccggtgatgatcagtgcaccgctgaaacggtccataaaccccacgtccacttcgccggccttgacggccacgtcggctgcgatcacggcggattccgccggggaaagctgcagaatgccaatggcacggccttcctggtcaaaatcggcatgaaaaccgatttccagacagagattggtatagactgacggatcgggtttcccgatcacatgggccagggtgatttcccggccgggcaccgacaactgcactacccgggtacgctgcccgtgaacctgcttgaaaatgctgtccagtacctgctggcgcgtcatgcgctgctgtgttgcttgcttcatactgtctgcgcgctcagcgcttggtgatggggcaggagacatagcctaaggtgttgtggaaataatcgacgatttcttccacagcagtggtcactgcggacagctcgccggtgatgatcagggtcccgctgaaacggtcggcaaaaccgaggtagacctctccgcttttcacggcgatatccgaagcgatgacgacagactccggcggcgtcatgttcatgatgccaattgcggaggagtgataatcaatgttggggttcaacccaagcttgacatatacaatgggggcagggccgccgatgatatgggccagcgtgatctctttgcctgctacagtttcctgcacaatacgtacctgctcctgcggagcgttggattcattcatatctgcacctcgatccaaggatggttttctattatttattatcgtcttcctggtatgcaaagtcaaggggcggcgggaaagtgggcatgaaagtacgtcttttacaaaaaactgcaacataggccgcgccaaaatacagcagcggagaagcaggcaaattggccaaagcggcgaaatatcgatggggagggcgctgccctgcgtggaacaggaaagaaaaccccggaaaaccaatggctttccggggctgaagtgtatgcatttctcagcgcttggagaactgaggcgcacgtcttgcggccttgagaccgtactttttacgttctttcattctgggatcgcgggtcaggaaaccggcctgcttcagaatggtgcggtatgcgggatctacgctcaacagggcgcgggcaataccatggcgcagggcgccggcctgaccggaaacgccgccgccggaaactgtggcggagatgtccaccttgcccacagtgccggtggcttccaggggctgacggacaaccattttcagggtttccagaccaaagtattcgtcaatgtcacggccgttgatggtgatggtgccgttgccgccctcaaacaggtggacgcgggcaacagaggactttcttctgccggtgccgtacatataaggctttttgctcgtatacattctcgtctacctcctattagtcgactgcataagcctcaggcttctgagcctgctgctcaaagtttgcatctgcatagatgtgcagacgggacagggacgcgcggctcagggagttcttgggcagcatgccgcggaccgccacgcgcatggctgtctggggctgttccttcatcaggatgcggtagggggtctccttcagaccgcccacccagccggagtgggtgcggtaaaacttctgggtgccctttttgccggtcagcacggcctgagccgcgttgatgatgatcacgttgtcaccgcagtcggcgtggggagtatattcaggcttgcgcttgccgcgcagcaggtcggcggccaccacagcggtcttgcccaagggcttgccggcggcgtccagaatataccacttgcggacggtttcgcccatttttgccatataagtggacatattgattttcctccatttatttgaatttccttttgaaaacaatgcaaaagctttccatcagcatggaaagcatgtttatttataccacgcggcgtacagtatgtcaacaaaaaaattgagttttttattgtattctttttatatctcgtgataacttattttttctcttgatat

SEQ ID NO: 1344 - DNA, 7675 bp, Unknown
  16S sequences of unknown bacteria
cttgtaggattaacttccgtcttcgcccccggattctactggcgaaagggtcttcttcgattttggctagccgccggatttataccaaggataaacttcacttgatagcggtattcatagcagaaatttttgcaccatcaccaattcaattcggttgaaacttgaagtttcagttcgatataagctgccgcattgaattgttcctacgttcgctgacgtaagctaaacgaaattggatgttcgcttcatttcaacgcacaaacgagcgccaatccgcggttagcctaatccatttcactttgattaggtattctcaattccgcgcgatgaagaaataccgatttaaatccaactacccgcctcaaactctcccgcgcgaacattttaagctccacccttacactttatgcaaacccgcgcgactgttctgttcaaatgggcgatgatgaagtgtattgctaaaccgaactccaccgcgagcgtagattcacaaggagacggcgtttgatgtctctggaactaacgtagttagttcggtgcgccctccgcgtaggagtatataatgaaatcggaaagacgcaagtctttcttcttttttttctcacttaaaacctaagtgaacctcccttggggaagtctcttagacagcgccagtagtctaaggtaaagaaaattgcttgcgctctttcttgaaagattctcaggcgaagtctgagagcgaatgcactacctcttttcctccccacggaaacgacagcttcaccgccgtgagcgaaactccgctgtagtttatcctgctcccgtacttgccgtctcctgcgaggggggatttccgcgaaccgaactgcacgcgaatctggtgcgtccgtcccgtctcaagctcaatgtacgccgcgcgaaccggcttcccctttatctcggtcttctcgccgagacgataacgcagaacagcaagctttgctccctttctctcgccgccgaccacaaacgacttgtcacgccgcctgtcgaagtagaggtagtcgcgcatttctccctcctccggcaaagtctcatccggcgttacgagcgcgcggtagcattttttgagcttcccatcagctatgatccgcgaaaattccgccgccgcctgctttgtgagcgcgtagaccatcagcccctccgtgttcctgtcgagcctgtgaacgacatacggcgtttttccgagagctttctcaatctcatctgggcatgagggcgcgttttccgccttttccgagaggaatccggcaggcttatagacgagaacgtagtcctttgtcgttgtcagtatgatgctttccataatttcagttttctccttaaatcaaaaaagagcctcgcgaggaagctcttttgtgcagacttataagccgggttctgtataatcaggcgattatctaatcaggcgattatctaatcgaacgattacagctgtcatctatctggaattatacgttgccgcaaatttctgtgccgcctcgcgggatatgacgggcagccacgaatcccccgaaaatcgggaaaattccccgcactgaggcgttgcatcggatagggtttacatttgcacacagttgcctgtcgtgccggtgagctcttacctcgcctttccatctttaccgcgaaaaatcacggaagtctatttctgttgcactttcccggaggtctccctcggcggacgttatccgttatcctgccctacgatgcccggactttcctcacgccaataccttacggctacatggcacgcgacagccccatctgcgggatttattatagcataaatttcgctttttgtcaaggaaagcggtcagactttaccgctcattcctcagcgataatgccgcccagctgcttgtccatggtcttcttcagtaccttggagagcttagcgacctgtgatgcaagctcagtgccgtttgcggtagctgtaatgtatgtgctgccgagctggttcgcgccgaagatatatgccatctcgtagcggcggccgtcgaagattatgtcgagcatttcaacggagtccttgtcgcgggctaccttgccggaaagctgaacgtcgtaatacacgggacgcactgtcttataggattccgcgccgaggttttcaacgataactccggttctctcaaggtcgcggtttgttatcggaatcatcatagcctgtgcggagcgtgcgacaaaggtatgatagctttcctgcgcttcatcatactttggcgaggggataattccgaagtcgtcgtccatatcgcgcagagtcttaccgtgaccgagaacctcgctgaggaacagggacttgccctccataaagtggggaacgatacctgacgtttcgacgcctgatttggtgagatatgcctgatatacatagtttaagtcaaagaactggtcgtgaactttttttgatatatcatagaccttctcgggaagctccttgaattcggggacgttgttctcgtttttcgagataagctgctctccggcagaggtgagaagcacgagggagaagtcggagtgagttgcaagaccgtactggtcgtcggagtccatctttccgtcgccgttgagatcgacagctgccgaggacaccatttcgtaaagcttatcgtacgtccagcgtccttccttgactatttcatacggggactcgagtttcagcttgtcgagcatattcttattgaggaacagcacccatgcgctttcgccgtacatgaggtggagatctccgttagccatatacagcgagtctccgatagagagagtatctatagcgcccgcgtcccaccacggcttttcaaaattcagcccgggaacgtcgtaaaggtttaaaacctgcttctttgcggggtatttaatgcagctctgcgactcgtcgaacacgatatcgtaggtgtactcgtcggacatgaccatgtttgtaatagcgagaccgatgtcgttccagccgacgatgttttcggaaaagcttacgtttagcttgtcaccgactgtgacattgcggttgtaaacggcgtcgtttatcggctcgcctgtaatatcctcggcggtgaggagtacataggcgtagttgctcacgacgttgagcatattgaagcagtgtccgtcgtagcttccggtcggcaggtcgtcgtagatcgtagtttcggtttcggcttcggcttcggcggtttctgtggcgtcggtcggatctgcggcagagctttccggagtagtttcgtctttgctgtccccgttggagcaggatgtgacgagcggagacgtcatgagacacaccagtatcaatgcgataagtctttttttcatttgaacagttacctcaaaagaatatgatatttgattaaaattacaccaacagaataacacaaattcggcatattgtctacggtgaaaacgcacaattataacggattgttttgttgagcttacacaaagaatcaactgctttgtaattttccgcgcgctatgagaaagttatgattgacgaaggtcctctgtgttctttaccatcttgttcagtagtttctgaacaagcttctccttcgtttttgctcttgaaacaaaatcggtggagtttttcgatatcgcatcgttgaacgtggtgtttaagaaatatccgcccagcgcattcgagtacgccagtgcaaagccgtttccgaaatggtcgtggattatgtcaagcatctgcgcagaggactggtcgcgggtgtattttaccttcagcgacgattcgtagtagttcggaagcacctgcgcatatgtctcgcggcagagcacctctataacagtgctgataaagtcaagcctgctcataggaacggaaaccggaatgaatccaagctccgccgtgtcgtgagtcgaggtcacataatccttctgcgtttcgtcaagcatcgggtacggcaggatagcgaggtctacatcggtgtcgcggaccgtagtgttttcaagagagccgagtctctggtagccgaggaacagagatctgccctcaaagaaaatgttttccgtctgtgcttcgtttccgccggtcaggtttacggcagtcgcggtgttgttgaatatgccgttcagcttttcggtaagcataacggaacgctcgttgttcagcgtgattatcgggcatccgttttcgtcgcgttcgataaatccggggtctgcgctgatgagccacggaatcatgggtccccaatactcaaatatagcaaagccgaactggtcgtcctttgtcatagttccgttgccgtcgaggtcctttgccgcaccgtctataagtgttcggaagctgtccagagtccacgtcttgttcagcacggaggaatatacatcttccggatcgccgtaaatgtcgcggtacattcctttgttcatgataaggcagtgagaacagcggagcatatctataaaatagtctcccgccagtataaaacgcatgtcggagataattgaaatatcgctcatgaagtcgtcgtaccaccacgggttatcgaagtcaaagttctttccgtcgttaatattatggaaaagtccctccggagtcagcggcgcaagaccgtaaatgtcgtttattacaatatcataagtggagtcgccggattgcaggagctttcgtatatttaacgccacctgatcgtaggcatagttgcagttttcatacgcaaggttaacgttgagcttttccataacgtcgaggttgcgctgatatgcggagtcaggtgcggcgtctcctgttatctcttccggaccctctatgaggtagtttgaagacgtgagagtaccgcgttcgtttacggagttgtatatggtgagggtttctccgccgaggtcagtgtcaacaaacgggtcgacataaccgtcgtaatacgggttttcactttccgtttcttccgctgtggtttcggaagccgccgtgatagttgtttcgcctgtcgtctcgtcctgttgattgtccgcgcatgaagcgaacgtttgtaaaaccaaaaggagagcgataagcagtgccgtttttttcttcatgggtatatcctccttgctgatgccagctaataaatagttatatattaagtcacacgaagttaatatatttgtgtgttaagcgcatacgctaaataaatattgtaactcattatagcatatgtccaatatactgtcaataagcacaaagatattttaaataaaaccttcggaaaaattcagtctcgcattgacttcaagtgagggaaaagaaaaagagcttgaaagctctttcagattaattataaactcctgcgcggaggtgttcttatgcagggacgcttttcttcaagaaaaatctctatctcttccgctgaagctcgctcacaccggcagccatagcctcgcacgcacgcagaatatcgtcctcgctgttcgttgcgtcaaagctcagccttatcgcgcagtccatttcgttttccgtgcagccgaacgactcgagcgcaaggcttttctttttggagttggcggcgcacgctgatcctgccgagacgtaaatctcccgctccgagaggtagtttagcatggtttcgctgcgtattccgggcaggctgacgttcattatgccgtccactccgtttttcgggcggttgacagtcactccgagcggctcaagaagactgtgatacctctcttcaagcactgcgcggagcttttttgtcttctctgttctctcggcgaacgtcgtatacgcttcttcggcggcggcggaaaaggcagcgattgcacagaggttctccgtaccgcttctcatgccgaactcctgacctccgccgggcattacgggagcgatattgtgccgtttgatgatgttttccgagacgtacagtgcgcctgccccgcggattgagtggattttgtgtgcgctgacggtcattgtgtcgactacgagcagcttcggtgtggttttcaccttcatgtagccctgcacgcagtcacagtggacgttcgcgtcggggaaatactccttcacgagagcggcggctgattttacgtcgtagagcgcgcccgtttcgttgttcacgagcatgaagccggcgaaaattacgggtcgaccgtcctcttttgccccttcaagagcgtgtttcagtccatccatatcaagctccccgccgcgtgtgcctatcctctcgagggcgtatccctctttttcaaggagctttgccggctcgtctacggaaggatgctcccctgcggagatgatgaccgtgccggttttgcccttggcgaggtgctttttcgcgttgcagcagccgagcatggcgatgttgttagcctcggtaccgcttgcggtgaagtataccatatcgcgcgagaacttctgcataccgaaggttttttcaacgcggcggcggcagtcctcgagcagcttttttgacgccagaccgagcttgtacacggacgagggatttccccagaccgacgcggcttccgtcattgcacgcagagcggtttcggatggctcggtggtcgcggagttatcgaggtagatcattttatcaccatgtagccgaggatttcttcaacttccgcgaggtggctgtcgaaggtatcttcaagggaggtatatgtgaaaacgtagacataaccgtccttgacagcggcttcctgcaaaaacttgtaggagttctcgccgagcttcgcggtgtaggtatatctctttgcgtaaagctcgtcaagcgtagtattctcttcggagatctcgttaaagtcggtgaagacgagagcgaggtcggttttgttggtctcccaccactcgtcgagggagctgtcgtagttctggagatcccatcccatgacggagacgctggaggggtctgtcgcggagtaataagcacctgcggcggctgttgacatatcgacagtccatttgtcggggacatagaggcagtagtcggcgttttcgttagaggcgagggtatagcctgcgggaggggcgtactcgtcggtatttttacacgatgcggcggagagagtgagggagatggcaaaagcggccgcgatcgcacgcaaagcggatttcttcattaaatcaatgctccttttgatgcgcgaaaatttcgatacaatgttattataacattatagcagattctccgcgcggagttatagtggggaagtgtaaacttttgaagttttgcacagacttcgcctatgaatctgagaaaaagagcgcagaaattttttctaccttagacgacgtgcgccttctaagagacttcccctgatgtaagtttcacttaagattcaagtgaagaagaaagtagaaagagcttcgccctttcagatttaattattccacttcgcgtggggcgctcctttcggagggaacgcagagaggttcaaacgcctgccccttgcacttactatgtaagtgcggagttccggcttaccggtggagtttggcttgtaggatgagcttccgtcttcgcacccgtgaactactggcgaaagggttttcttagagtaggctaaccgcggttttataccaaaattatacttcacttgacagcggtattcaaagtctaaatttcaacaccgtcaccaattttgtgaagccgaaactgcaagtgcagttcgatataagctgccgcactggattgattcaaagttcgctgacggaagcaaaacgaaattggat

SEQ ID NO: 1345 - DNA, 2201 bp, Unknown
  16S sequences of unknown bacteria
ataatatttaatgtaatatttttaatgtatttaatatttttaatattatttaaaaattaaatttttaatctgccccgtatatggggtaaaaatctgccccgtatatggggcaaaagcagtttcaatttttcggcgggggcttgttatcaggcgtcttgtcggcaatttctaaggaggtaaaccattgaaacgaaaaaagactatcctctccatgtttcttattccgcttttatttttggcgattttccaaggagtttttccttttttaatgctcgttgcgggcaatataaaggcaaccttggaaaacaacgccataaatgtggacagacatattgtggaaaacaggcggtacactcttgaaaacaatatggtgggtgactggggtaaacttcaagaagaaagcaatgtggtggcaaaaaatttggaaaacctccttgcggaatacgatgccgacatagatgattttatatccagtgacgaaatgcaaaaccgccttttgtcagatgtgttttcatatatggtagaagatattcagcacaggaaaacatccggtatttttctcattatggcaaataacaaccccatagatcagccctctgcctacaacggattttttgtccgtgactccgacccacagacgtcaacagccaaaaacaccgaccttttgatggaatgtggcgataaaaacttagccagagatgaaaatatagctcttgactctccctggcgcacaaaattttcctttgagggggtgggcaacagagaagccgacaaattcttctacaccccatacacagccgcattggcaaatattgacacggatatggtcaacttaggctattggtcaacgccttttatactacacgacaactaccaagacagccataagatgataacctattccatgcctttggtttataacggcagagtttacggcattttgggtaccgaactttcaacaacctatattttaggccaagctgcggttaaagatttggacaaaaatctcaatgccggctgtatgcttgcaatagacataggtggcggaacatatacaagcattgcgggcaacggtgttttgtacgataccgtaacccaaaacggcgatacctttaaaacagaaaccacaaaaaataaaggccttaaccgtgttgtgggcagtaaagtgggagagcagaatatttactgcatagccgagccgctttccatttacagcaacaatgttccctacgataacacagcttggaccgttatcggtttggtgagcgaaaattccatatatgaagcaggcaatcaactttacgaacactttttaatgataatcgtaatttgtatttttattgcggttatatttaccgttattttaacccaccgtatcacacggccgatttacaggcttatttccagcgtaaacggcggtatgaaaggccttaattctttccggccttcaaatatttacgaaatcgacgaattgcatgacagatttaaggggcttgctcgggcagagataaacaccgcctcacagcttatggaagaaaaagaaaaataccgtatagccgttgaaagttcagaggacggatttttctcatatcttattgataccaatgaaatagatattgtaaacagccataaatgtgacggaagatggaactttgagaatgattttaaaccaaagattatgaatagcgtttacccggatgaccgaaatatcgtggaagatttttatagaaaaatccccgaggaatttaaccgggatcttcgcttaaaacttgccggtgaggaagaatacaaatggtaccgtatatccggcagactggttaaaggggagcgggccaataagggtatgtttatcggcagtttcagaaatatcaacgatgaaaaacttcttgaaatagaaagacagcacaaggaggaaaccgacccggttacatctttctacatcttaaaagccggcagagcaaaaatccaaaaacggagaaatgttgcaccaaatggagttatgttcaatatagatgtagacaacttagacaacataaatacaaaatacggttcgactttcggcgacttgattttgaaagaattgtcaaaacagatagccgataaatttgccgattgccggggcactgtttttctccgttccggcattgatgaaattataggctggctgccgggagtttttccggcggcggcagagagaaagt

SEQ ID NO: 1346 - DNA, 4235 bp, Unknown
  16S sequences of unknown bacteria
gtatcatactgctcaatttttccggcgtgacagaccgcaattgcatcgctcatgctcatggcctcaatctggtcgtgggtcacaaacacgccggtaatgcccaacttggtgatcagcgtccgcagttccgagcgcatctcttcccgcagcagtgcgtccagtgcggaaagcggctcgtcaaacaggatgcaggccggttcaatgacaatcgcgcgggcaaatgccacacgctgctgctgaccgccggacagctgatgaggataccgctgggcaaaatcatccagctgtacagcgtggagtgcatttttcaccttttcgtccaatttgtccgtcttgccagccgcccgcaggccaaaagccacattttcaaagacagtcatgtgcggccagagggcaaaatcctgaaacacaaagccaaggccgcgcttttcgggcgggatattgatcttcttttccgaggagaacacacagcgattctcaaaccagatctcaccgctgtccggcgtttccagtccggcgatcatccgcaacagggtggtcttgccgcaaccggaaggtcccagcaatgtggtcaggctgccgctttgaatgacaaagctggtaggctggatcacctgctttgcgccaaaggattttgtaacatgaacgagcttgatctccatattttgcactcctacttttgatacctgctctatggtagcacgaaggatttgtgcaaactatcccagtggcgtaaatctcatgtaaaagtttggcaacaaaaagtccccgctgaaccttaagatccagcagggatttcatgaagatataaatatccgaaaataagcccatccagaggaaagttaggcaagatggaacagatcaatcagcaccaccattgcaaggccatagtaaacgacaaccgctaccaaatcgttgatcgtcgtaatcaatggtccggaagcaacagccggatcaatatgaattttatggaacagcatcggaaccaatgtgcccaccagactggaaacgaccatggcgacaacaagtgatgcgcctacacagccagacagcagaagtgccgtattccaagcgtagcctttgaaaaagtggatataacatcccagaaaactcagcgccattacggccagaatgcacagagccattcaagctataacctgatctcttgcacagagcatacgttgatgccgctctgccctgtaccatggcagataaagaagcaacaggactgcagcaagaaccggcagaaagcccagtagataaaaacgttctccaaagcagtgggcgaaaaaggcagtaatcgcattgccctgcggatcattgagaaagaaaaagtttgttttcagcagccgattcaggaaaaagatcggcgttgcgattgcacacagaaacgccagtacccagcggatatgatgcacctgcgggcgaaatccgccagcaagcagaaggaccggatagaggatcagcagaacgtgaatgctataggaatgcagatgcagcaggttccagaccgggagccgctgccatgaggggctcaacattgcgaccactgctcccggaatacagagcgcataaaggatttccttgctccaacggctctggtgtatggcatcgtaccagcagacaaagatgttgatgctgcacaggcggagaggcagataggtcacgttccattgaccggtgtacagcaggacggcctgcttcataaactcatcggccagcatcaggacaaacacagcgcgaaggatctgatgccgggtcacttccctgcagcggtagtagatcaccgcacagagaaaaatgaccgccgctgctcccagcaattctgcccaatgcgttgcactgaacaaagagaaggcgcggtaatccgccccgcgttctgcctgtatcgtctgcacggatttccagaaatcttccataggattctccctttctgcgatttcattctacaataaaattgtatcatcgaaatccagtcgaagaaaccgtgctgcggtcaaatctgtgtgaaatccgagtgcatctcacttcagactggagtgcacgttggcctgataggcttcctcgtagaactgtgcctgacaatccacggcatcggcaccgggcatccggcggacatagctgccgtccggctgctgcacgcgggcgttgcagttgtcggccagcatcgtgtcaaagatgtgctgcaaacgtgccttcagagccggagccgtgaccggagccgcgatttccacgcggcggagcgtagagcgggtcatccagtctgccgagccgatgtagtaccgggcacgctctccctgtccgaaaatgtagatgcgggaatgctccagatagcggcccacgatgctgatgatatggatattctcggtctcatccgggacaccggcacgcaggcagcagatgccgcgcaccaccatatcgatgtagacgcccgcctgacttgcctcgatgagcttgttgatgagcactttgtcggtcaggctgttgatcttgatgccgatgtagccgccctcgccgcgggcggcagctttgatctcaccgtctatccgattcagcagacggttctgtaagcaatgaggcgccaccagcaggttcttgaccgaatccaccgtttcgccctgatccagtgcgcggaacacttcggtggcttccagaccgatttccttggatgcggtcaggaaagaaaggtcggtgtacaggcggctggtcttttcgttgtagttgccggtgccgatctgggtgatgaaggaaataccctccttcgttttgcgggtgatcaggcagagcttggagtggactttcagcccttcaatgccatacaccacatgacagccggcacgttccagcaggcgggaccactcgatgttgttttcctcatcaaagcgggctttcagctccaccagaacatccacctgcttgccgttttcggcggcttccaccagtgcatccaccaccttgctgtggttggccagacggtaaagagtcatcttgatggagaccacgtccgggtcgcaggcggcctcgtgcagcagctgcaggaagggacggatgctctcatacggatagtgaatcaacttgtcctcttccaggatctgcggaatgatgggcttgcgctcgtccagtgcagggctgggctgcgggtggcggggcgcaaagaacaggtcggtgtggctgcgcagctgatcctcgatctggaacaggaaagagtgatccagcggagaatcgtattcaaacacccgcttggggtccagtttcaggtttttgcacagggactggataatttcttcgtcgatctcacggctcagttccagacggacaggtgccagctttttgcgcttcttgaccacttcggccatgtgatcccggtagttcaggtcttcgtcatagatcaggtcggcgtcaatatccgcattgcgggtgatgcgggccagcgttttgctggtgaccttatagcccttgtagagcagtggcaggaagtgcaggatcagttcttccgacaggataaagcagccagtacggcccggcaccggcaccagccgggggaagatctcattgccgcagggcacaatgccgatcttcttcttttctgccttggtgctcagcaccgcaaccgcatagatgcccttgtttttcaggaacggaaatgcctgctttttgctgatgatgaaactggacagcagcggcaggtagtcctgccggaacagcttttccagttcggtacggctttcttcctccatatgggcaaagtccagcagacggatcccctgctctgcaagctgttccagcagaccattataagcagcgtcccggcgggctgtcagcttgtggataaaagccagcgctgcatcgatctgttcgccgctggtcatattcgtcttattttcccgtgcgtttttgtccagcagcatctggtcttgcaagctgccgatgcgcaccatgaaaaattcatccagattgctctggaaaatcgacaaaaaactcagccgttcacacaacggcagacgggaatcctctgcctcctccagaacgcgttcgttgaaccgcagccacgaaagctcacggtttgcatagcaatgataggtgttttccatattcctcttccttttctctgaccggaatgcttcggattgcatgatacaaacgtttttattgtaccgtgcaaatgtaaaatcagaaatcaggaatgtgtctggaatatgtaaaatcgcttctgcacacagattttaccgcaattt

SEQ ID NO: 1347 - DNA, 32759 bp, Unknown
  16S sequences of unknown bacteria
ccgtttctcgcgcttgcagtctcgggtggacacacatctttatacaaggtagaaaactacgtcgattttgacgagataggcagtacccgtgacgacgcgtgcggtgaagcatttgacaaggtcggtcgtgtgatgggacttccttatcccggaggagcagctatggataagctcgcgtcggaagcgtacaccaaattcgactacacaaaaaaagacgcgctgaccttcccttctcccgccgtacacgacgagacttatgatttttcgttcagtggtctgaaaactgccgtaataaatcatatccacaacgaaaagcagaaggctaaagccgaagacctgccgtatgagacaaaatgcgagattgccggagcttttacgaacgcagtatgctcgggaattacaaaaaaagtatcagccgcgctgaaagatacgggaatgaaaactcttgtcatggcgggaggagttgcggcaaacagtcacctgcgtcgtgcagtcagggatatgtgcgactccctcggtgtggaatttgtcgttccgtcactgtcgctgtgcggagacaatgccgcgatgatagccgcgagagcgtaccatatgtatcggaacaaacttttcggcgacatagaactcgacgcttgtgcctctgacgaaggtgcggaggagtatctcgacaggataaagagccttgcacggttaggataagcagagtttcaacaaggtttttcaacagcctgtggaaaactacagttgaaaaactaagattatagacacgatgataaaatattcagccattcatcgggatgagtaatgttgtatccgaaagtaaattcattttatgccggttcgcattgaaattttgttagaatcaatacacaacacgagtttttcggtgtcgaaatttctgctattactacatcttgacagtgaatttgaagaaacaaagaattaattttgcaggattatttaggataggaaacaaaaacccatatacagtatgaaaatcactccaatatacaaaaaccgactgataacacttcccgccgagacagttttacaaaagttatccacagctacaaaagaagagcttgcggtgcttatagcggttatcgccgagcctgaatttgacgttaaggaaatctgccggaagctcgacatgacggaaaacgcgttcaaacgttctctcgactcatggatcgacgcgggagctttatatatcgacgacggaaaagcgcagtccgagacaaaatctttaccgaagagcaagaccgacacagcaaagaaaatgacagcaaagcgtaccgagcggaatattactcttcactctaccctccccggctacacgtcggacgagatgagcgaaataattgaaaagaaaaaaggcacgttcgagcttatcaacacctgtcaacagatactcggcaaggtattcaacgctcaggaaacagcgataattataggacttaacgaccatttaacattgtccgacgaatacatactcctcctctgcacccacgccaagcagatgaacaagccgtcagtgcggtatatagaacagcttgcgcttcactttttcgacaacaacgttatcacatacgaggcgcttgaggaagagcttaaactaatcgaggaaagagttccgtttgaatcatacgtgagagagctgttcggaatcggaaagcgcgcgctcattccaaaagaaaaagagttcattgttaagtggcacgacaagtataagttctcgcgggacattgtaagagaggcttatgagcgcactgtcggtcaaactgacaagccgagcttaaaatatgccaacgcaatacttgacaattggtttgcggcaggttatactactattgatgacataaaagcggcggaagctgaaaggcagaagaagcgcgaaggcgacacacagcagtccagcttttcgacggacgatttttacgaagccgctttactccgttcttataaggaaaacaagtaggtattatgggaagacgagaaaatatcagacgtgcgaaagacattattgccgcgaacagaaacatcagcataagcgaatacgaaaatcacgttgcagaggtatcgtctgcttatcccgaatttaaaatgataaccacacttctcgcgggaacaggacctcgcatcatggcggcgtccctcggtaagatgctcgaagaagacagcattgaatcaatacgcgcggaatatgaagctttggctgagcaaaagaggcgttttcttgtgtcccacggttatcccgaggattactgcgacataaaataccgctgtgagaagtgctcggacaccggttatgtcggaataaagatatgcgactgcctgaaaaaagagattgtctcggctactcttgaaaattccggtttgtattcgctcatcgccacacagacattcgatacgttttcgctcgattattaccgcggaaatgaacgattcttcatggagcagaacttgaagatactgaaggattttgcatcaagcttcactccgggcaaatctgacaacttcatatttttaggtgcaacggggctcggaaaaacgcacctctcgtcatctgtcgctcaggctgtcatagcaaacggatattatgtcgtgtatgaatccgccctgacgatgttctcggactatgaagagaagaaattcggacgcagcagctactatgacgcggattatgaatttgacaaatatgtggaatgcgatcttctgcttatcgacgacctcggctgcgaaatgacgaactcattcatcgtctcatgcctgtacaacgtcataaacatgaggctcatccagcacaagtccacgataatcagcacaaatcttaacaaagaagagcttagaaaacgatattccgaccgcataataagcagaatattcggagactacaagccgctgatattcagaggttcggatatcagagaacagaaaataaggcaaagcatttaaaatttatatacatcaggaggaacaacaatgaaaatcggagcaatggtcgaatccttcagattaggattcaaaaacggcgttgaaaaagcggcttctctcggcatcgagggcattcaggcttacgctacaggcggagaactcggcgttgacgacatcactgacgcaaagctgaaagaggctcttgacatcgttaagtcaaacggtcttgtattttcggctatctgcggcgacttcggtcacggattcatgaatcccgagcagaacaagatctatgttgaaaagtcaaagagagtgcttgacctcgcgaaaaagctcgagtgcaatatcgtaaccacgcacatcggtacagttccggctgaagaaaacgaaaccaaggaaatcatgcgtaaggcttgccgtgaactcgcggaatacgcagactccgtaggttcagcttttgccgtagaaacaggtccggaacccggcaaagtcctcggcgaattccttgattctctcggagcgggcggtgtgagagtcaacttcgaccctgcaaacctcgttatgtgtgttgacgacagaccggagaacgcgctgaagtatctcggcaagtatgtagtacacacacacgctaaagacggcatcatgcttaagaagaaaatcgaagagaaaatcaacatcggcgaagaagcaaaggaacatcaggctctcgctgacatgggcatgaagtatcttgagcttcctctcggcgaaggagacgttaactttgacgtatatctccccgcactcgctgctacaggcttcaacggcttcctcacaattgagcgcgaagtaggcgacaatcccgaaaaggatatagctctcgcggtagaattcctcaaagaaaaaatcaaaaagtttaatttaggttaatttatgaaattatttattgcatcggatctccacggctctgcttactacacccgcataatgctagaaagatacgcagaatcaggagcggataagctcgttctcctcggcgacatactgtatcacggtccgagaaacgatctcccgcgtgattatgcaccgaaggaagtcgcgaaaatgctgaacgaatacgcctccgacatcattgcggtacgcggaaactgcgaagccgaggtcgacagccttatgctcgaattcaacgttacatccgactacggagtaatatttgacggaaagcgcacaatttatctctcgcacggtcacagagtcgagcctaagcttcatgaaaatgacgtatatctcacgggacacactcatatccctcacgactttatgaataatggtgcgagatatcttaatcccggctccgtatccattccgaaaaacttcaccaagcattcagctatgctctacagcgacggcaattttgagtggatggacatagagaacggcgagatgtacacgctctgacaaacggaggtcaatatgaaaatagcggaagctctcatcgagagggcggatattcaaaagagaatagaacagctccgtgacagactctctaacaatgcattggtgcaggaaggcgaagaacccgcggaagacccgacttcccttctctccgagcttgacagacttgaaaaacgtctctgcgagcttgttgcaagaatcaatctgacaaacgcaaacacggtgtccggcggtatgactgtgaccgaaatgcttgctctccgcgactgtcttgcgcagaagaatgatatcatgcgtgattttctcagagcggcaagccagaagtggatgcgcggaagaggcagtgagatagttgtgaaaagcaccgtctccgtctccgagcttcagaagcaggttgacgacatatcaaagcagcttcgtgagcttgacacacgcattcaaggcataaactggaacaccgaccttatctgacaagtctgcggtagtcgtggcgggcgagcgtaaacctttaatgcttgaggtattaagcgtttatgatgggcaacacaaacggagaatgtgtagggttcgactccctgtttcactcttattctcatcatttttacacttgcaattatacagctaaaactttttaccacacgctgacgctttgacgagggcgggcttggggtcaacttaaatatcagccggggatttctctccggcttttatttatgccggaaaacgaaatattaaccacctcagccaaaggagaaatgtgaacgattcagtaaaatttaccatatcatttgttacgcttattgacaaaacagttcatttgttatataattgagagtgaggaagtttgtcctcaaatatcaatttcaatcaaaaaaagaggttatataaaatgtcagagaatgttgagcgcggtggaatttctattgagcttgaacacatttttcctataattaagaagtggctttactccgaaaaagagatatttgtccgcgaaatcgtatctaacgcctgcgacgccattacaaagctgagaagactgaattctctcggccaggctgacgtggatatggacggcgcgaaaatcaaggtaatactcgacaaggacgcgtctaccatcaccgtaaccgacacaggcataggcatgacggaagaagagctgaaaaagtacatctgtcagatagctctttccggtgcgcttgattttatccagaaatacgagggtgaaaacggctcggacaacggcataatcggtcatttcggtctcggattctactcttcattcatggtcagcgattccgttgatgttatcacacgttcctacaccggcggtgacttcatcaaatggacctgcaccgacgacggcaactacgagataacgaccgactttgacaaagatgaagcacaagagcttataggcaagttcggcaccgctgtagttatgcacataaacgatgagggcaaggagttcctttcagaatacaagctccgcgaagttctcgacaaatactgcgctttcatgcccgaagagatttactttgatgacggacatcatgaagaagagcctcacgagcatgacgacggctgtaaatgcgaagagtgcaaggacgaaaagaaggaagtcaagccgataaacgatacacatccgctttggctgaaaaatccctccgactgcacggaagaagaatacaaggaattctaccgcaaggtatttaacgattggaaagaaccgcttttccatattcacatcaaagctgactatccgctcaatttcaagggaatactctacttcccgcgtatcggcagtgaatttgaaagccttgaaggtcaggtaaagctctactacaatcaggttttcgttgcggacaatatcaaggaagttatccccgaatatcttctcatgctcaaaggtgtgcttgactgtcccgagcttccgcttaacgtatcaagaagctatctgcaaaacagcggctatgtcgcaaagatatccgctcacatcacaaagaaggttgcggacaagctaaactccatgttccaaaatgaccgcaagagctacgaaggaatatggcgcgacctcaagacgtttgtggaatacggctgcatgagagaccgcaagttctacgacaaggtttcaccgagcattctctttgaaacaactgacggagaattcaagacagtcgacgaatatcttgaagcagcaaaagaaaagcacgaaaacaagatatactacgcgtccgacgttaccgctcagtcaaagtatgtaaagatgttcaaggacgaaggaatagaagtcgttctccttgacagagttatagacacgcagtttatcaacacaatcgaatccaaccgcgaaggtgtaaagttcatcagaatcgactccgagatagctgatgtcctcaaggctgacggtgacaaaactgaaattccggccgttacggagctgttcaagaaggttgccggagaacacacgaccgttacattcgagagactcaaggacgaaaaaactcccgctattctgaacctttccgaagaagcgcgcagaatgaacgacatgatgaagctctataagatgggctcggatatgccggttgaacagactcttatcgtcaacaccgcctctccgctcattgaaaagctcacaaagctgacggaagagagcaaaaatgacgaggctgagctgatagcgcgtcagatatatatgcttgcttctctttcacagagacagcttacatctgacgaacttctcgcgttcctcggcgaaagctacgatattctcggcaagctctgatgaacgaaagcctgagagagaatattatattcgcgtggcacaagaaggaagcggcacggaagctgagcgacatatcgtataatgaagctgccgcgttgtactgcgaggataactccggcagggcaagcgtaaatgacgccgcggaactgttccacgaaatgacggactcttccctttcgcatgacgggatttcaaccgaattcgcccatttctgccgagagtttgccgcggtggttaagctgaattttgacgacgaccacgacgagacgacatctgacatatccccgaggatagcgtatctgcgaaacagcttctccgacaaggcgtacaatacattttctcaaagcttcaggtttgtcacggctgtatatttcagcggatttgaagaaccgtgcgaggaagtttattacgaacgctgctcacacgccatgataccggtctacaattcgcacgacggaattctcatgtcgctgtacaagctgctgctgaaatacgacctcaaaatcgtctccgcctgtaatatcggcatgggggatgaatccgctatgaggtatgctcttaccgcaaaaagcctgccctccggaatggacaaaagatacgttgacctgtcagtcgttctgtcagacagcaaaaacatcggagcactgcttcattcgcttgaaatactcggagcggtgactgttttgataaattctttcccgcttgactacaccgacgagagacgcggacttatcatgcagcttgacatgaagagtgcaagcacagacgctttacgattatttctcgaaggctcaagagtaagccatgatataatcgggaattatgatattttgtaaaattataccgaaaggattatgtatatggaagactacatgaagagataccttgaatggctgaactccgacaaggtagacgaagaaacaaagaaggaactccgctctattgagggaaacaatgacgagatagaaatgcgtttcggctcttatatggagttcggcacaggcggtcttcgttccaagatgggcgcaggctgcggaatgatgaacatttataccgttgctcagtcaacagagggagtagcaagagtaatcgactctctcggagaagacgcaaaaaagcgcggtgtaatgctcggatatgacagcagacacaattccgcactgttcgcaagacgctgcgctgaggttctgaccgctcacggaataaagtgctacatgttcgatgagcttcgcccgactcctatgctctccgcaggtgtacgccatttcggatgcatcgcgggaataaacatcacagcttcacacaacccctcggtatataacggctacaagctctactgggaagacggcgctcagcctacatctcagatggcggattatgtttcatcctacatccacgcgacggatatttttgaaggcgttccgacaagagacaaggttgacgaaagccttatcacaatggtaggcgcggactttgacgagatattcatgaaggacgttatcgcggagcaggtttatcccgacgtaatcacgaaagccgccgataatcttcaggtagtttacacacctctctgcggcgcaggctacagaatcgttcccgaagttctcagaagaatcggcatcaagcacctttcacttgttgacgctcagataaagccgaacggagatttccccggactcgctaagcctaacccggaatatcccgcttcatttgccgaaggtataaaaatcgcgaaggaagtaaaatccgatcttatcatagcaaacgaccccgactgcgaccgtgttggcgttatggcaagagacaaaaacggcgagttcaagtgcattaccggaaaccagatgggctccctccttctcgactacattttctgcgcgcttgaagaacagggcaaaatgccgagtgacgcatatgctataaaaaccatcgttacaagcgaaatggctacaaagatatgcgaagtacacaacgtaaagctctacaacgtcctcacaggattcaagttcatcgcggaagtaatcggtgagcatgaagcaaaaaaggaaggcacattcctcctcggatatgaagaaagctacggctacatgaagggtcagtactccagagacaaggacggcgttgttgcatccatgctcatttgcgagatggcggcttactactctctcaaaggcatgacacttatcgacgcggttgaaagcctttacgaaaagtacggattctacatggaaaactccgccgagatttatatggaaggtcttgacggcaaagaaaaaatcgccggactcatggacaagctccgcgcagaaacacccgagaagctcgcaggaagccgtgtggtcaatatccgcgactaccttgccgaaacctcaaagaatatgctcactggagaggtcgaaggcacaggtcttcccaaatccaacgtaatgtactacaaggctgaaaacggctgtgtagttgtagcgcgtccttcgggaacagagcctaagataaaattctacattctcgcaaacggaaagaacgaagaagaagctcacaacaacaccgtcgactgcactcatacccttgaagatatgctcggtcttgcacacgatacgctcaaaaagtaaaacagaataatcattttgaaacggcatcggatattttcggtgtcgttttttcgtataaatcaagccgagaaaaaacttaaaaataattcaaaaaaattataaaaatgtattgacaaaagagagacgatgagttataatatatgacgtcgggtgaacaacccaagacaaagcgaatagccgaaaggcaatattccagatagcggtattgtgtaacggtagcacagcagactctgactctgtatgtcggggttcgaatccctgtaccgctggagataaaagacataccatgtgtcacttgagtgtgagatgcggtatgtcttttgcttattattttttgtttccaggtgctaaatgtcatctttttctttcagattttatcaaaaaatcattaccttcgcatcaagggtgatattctttgctataatatttccgacactctgtttctcttccctgccgccgattttcaaccttgacaaaaatttcattgcgtttcttatcgcactggcaattgtaatcccagtcgagagggcaacttcgctctggttcatggcggtatctcacctgtcgctgttctgcacagtttatcttgtgctccacattttctttgccgataagctgtggttcggttacgcgacagtgttcggatttgctccgtttatcatatgcgcactgttccttatgctcgggctttttctggcaaagaagattcgcgtgaaaaaatactccgtcggaagcggcacaaaaggcgagcacatcaaggttgttcagcttactgatatgcatccgtcgagattcttctctctgtcaaccgtcagatacattttctcgctcgtgcaaaagcagaacgcagatatcatagttatgactggcgacatctttgacgaaaacacctctccggatatgtttgataaatactgcgcgctgttctccgaaatcgtcccgaagtacggcatatactatgtgttcggaaatcacgacgcgcattggctgtggaagaaacctgcacactcccgcgaagacattgtgaactccctgaaatccgccaacgtccgcgtgcttgaggatgaatcagttacagttttcggcggaaaagtaagaatcatcggcagacgcgacgtgcttgacgaaagaaagactcccgccgagcttctcgccccctacaaggatgaggacacatacaaaattctgctatgccacgagcctatcggacttgatgaatgcgcaaaaaacggagctgacttgacaatgtgcggtcatacccacggaggacagatattccccgtcggtattctgagcagccttttcggaataaacgaaatgcgttacggcatcagaaactaccccggaaacaggtgtgttatcgtctccagcggcgtcggtacgtggaaatatccgattcgcaccgagtcccgcagtgaaattgtggtagttgacgtgaatttgtaattaatatagctccgtccgacatttgagatatcgcaaaatatcagccttatacaaatagctattttttatttgttttgtgagtcactgaaaattaataataacatttaaattattatatctttgtgtggtataataataaagatatatgaaaagaaattcattcgcttgaaatacaggagtaatcacatgaaaaaacatattgccgccattcttgcagtcacagctatattctcttccgccgcactgacttcctgctcttcttccggcaacgaagacgaaactacgcctgaaacaactgaaacaacagctcccgaaaccgaagccgagactgaaactgaaactacgcttcccactcccgaggacgttgaaataatagattttgaagttctgacgctcgaaaaagatcccgtatacgaaaacggaaccttcgtcctttacttcaccgatcacgacgtaatttacgacgaaaacactgttgtcaacatcggcgttgtagctgaggacgaggcttacaccgtcaaaggcacgatagacttcacaacctattccgacatgaaggttgacgataacaactactgcggaattgcgctgactcctgcttttgagatagactccggcgagtaccgcttctccatcaccttcgacgactacaaggttgaattcaacatggctgtataatctgccgcgaattcattcccgcacttacggctgacactgtatctgcgggatttttttgagtttgcgaaagttttttccgaaaagtccttgacaaaggcgcggagttatgatatactctgtaaagtaaattgctttacagtctgttttgcagtgtcggaggaaaatgatgtttgagaagaatatgaagttccccatactgcttgacacctacggctcgctcctcactgacagaaaacgcgaaatactcgattactattacaatgaagactattcgctcgcggaaatatcggaaataaccggaatttcccgtcaaggtgttcgcgattccataaaaaaaagtgaggaagaactgtttcagcttgaagaaaagctcggacttgccgacaaaaacgaacgcatactgcgcgcttcacaaatactcgacgaaatcacgcaagaaagttcactcgacaaaagcgtaagaaatgccattgagcttgcactgaagcagctgaacgaagccgaaaaataacgcatttgatttacgatataccgaaatggggttataaatgttctcaaatttatctgaaaagctggaaaatgcctttaaaaagttcaaaaacaaaggaaaactcaccgaagccgacgtaaaggaaggtatgcgtgaggtcaagcttgctctccttgaagctaacgtaaactacaaggtcacaagagacttcatcaaatccgtgactgaacgcgccgtaggctcagatgtgcttgaaagccttctccccgctcagcagattatcaagatagttcacgaagagcttgtcaagctgatgggcgagacgaacaacaagctgcagatatcctcgcgcccgccgacagtcataatgatggtaggtattcaaggctcaggtaaaaccacacagacagcaaagctcgcgtcaatgtacaaaaagcaaggcaaacgtcctcttcttgttgcctgcgacgtttacagacctgcagctatcgaacagcttaaggttgtcggtgctcaggtcgacgttcccgtattcgacatgggcaactcggatccggtggagattgcaaaagccggaatcgagcacgctaagcgccacggtcacgacatggtattcatagacactgccggacgacttaacgttgacgaggctatgatggaagagcttgagcgcatgaaagccgctacagacccgacagaaatactccttgttgtggatgctatgacaggtcaggacgcggtaaacattgccgaggcgttcaacaacaggcttgacataacgggcgttatcctctccaagctcgacagtgatactcgaggcggcgcggctctttcgataagatatgtcacgggaaaacccatcaagttcatcggtacaggcgaaaagctcgacgctatcgaacctttctaccctgacagaatggcatcaagaattctcggaatgggcgacgtgctcacgcttatcgaaaaggcacagcagacgttcgacgacaagaaagccgctgagcttgaaaagaagctgagagaaaactccttcaccttgaacgactacctcgaacagttcagacagataaagaacatgggcgacattgaacagatagccgctatgatacctggagttaaacccggcgcactcaaggatgcaaaagtcgacgaaaaggctatggctcacaccgaagctatcatacttgcaatgacggcagaggaacgagaaaagccgaacgtcataaacggttcacgccgcaaaagaatcgccaccggaagcggaacttctgtagaggaagtaaacaagctgctgagacagtacgatcagatgaacaagatgatcaaacagcttacggcacagtacggcggaaagaaagctaaaaaacgaatgaaaatcccgttttcaatgtaactcgcggatttttatataaaaattaaaattattttcggaggaaaaaatggttaagatcagactcagaagaatgggcgcaaaaaaatcccctttctatcgcattatcgttgcagattctcgttctccccgtgacggcagattcatcgaggaggttggttactataaccccatgacagaacctgtaactctcaaggtagaagaagaaaaggttcagaagtggctcgcttccggcgcacagcccactgaaacagtaaagtcccttcttacaaagagcggtatcattaaataattatggacaatacaagcagcgcaagctatcgtgacatcgacttgaaaaaagttctggctgacatggcgcgcgctattgttgacgatcctgattcagttagtgtaacggaagaagaaaacgaatccggtacggtattgactctaaaggtagcggaagcggatatgggcatgataatcggcaagcacggtaaaattgcccgagctatacgcaccgtcgcaaaagcagcggcaaaagtagccgacaaaaaggttacggtagaaatcagataagaatctgctgaggacttatgataaacaaaggtgttcataagtcgaatgtagttatccatcgtgggtgtttccctgtttccgggaggcatccatttttattttcggcaaaaaataccctcgatatcattttcgataccaagggcattccatagcttattctattgtgtatgagccgtcgccgtcggttgtcagctttgacttatagaactgtgttatcgcgtctatcatgtagccggtgtcttttgttcccgcggtttcgtatgacgaatgcattgcaagctgagcaagaccaatatcgacagttatcatagctgcattggtgtttgaaatcgagccgagagttgatccgccgcccatgtcgcttctgtttgcgaaacgctgtacgggtacatttgcgtcctcacatattttcgcgaatattgcagatgataccgcgtcggtagtgtacttctgagctgcgttttctttgataactacgccttcgtttattgcgggtgagttctgcgcatctgaaagctcgggatgattcggatgctttgcgtgaccgttgtcagccgataccatgaacgacgacgcaagagcttccgttacgctgaatccgagcttttccgctatctttgcaagtgtatcgctgaggaactgtgagcctgcaccctgctttgttgcgcttcccgtctcttcgttgtcaaatgaagcgtaaacattgaccgcttttgcctcatcagccgccgagatgaatcctatcagtgttgaatatgcgcactgaagattgtcgattcgcgcggatgagaagaattcgtctcctgctccccaaatagttccgggagtgcggttgtagagatacaagtctccgcctacgacgttctcttttgcacatccagcgtattcggcagccgtttcaagaagcgttccctttttgtcggaggctgagtaaagcggcatcatgtcgacggcaatgttataagaaaatccgctgtttatctgacggttctggtgtattgcaacgttcgggatgagcacgaggtcgcggtcgatattgacgtttttagtcgtgattttactgccgtccttaacgataagtctgcctgctattgaaagcggtctgtcgagccatgacgaaagaatcattccgccgtaaccttcgacattgagcttaacgtattttccgcacgcttcggcttcaaacgcgctcttgagcttgaatgtggggctgtccgtgtggcttgcggttatcatgaaagagtgcgcgtatttctttggtacggaaaaagctatgacagacgagccgtttcttgtgacaaagtatttcccgccgggtacgatatcccaattttcgtgttctccgagcttagcaaaacctgcctcggtgagctttttccctatttcttcgacagcctgaaaagccgtgggagaatttttaaggaatccgagaagctcttcggtagtttttatgttatccatatatattgctccttattgaatttttactcattatagcacaaacatactgtattttcaatcatattgtcgatttccgttgaaaattatgccccaaatcttgcaataagcggcatatttatatataatgaagaaaaaacgcttggagtaaaatatgaaaaaatacgatatagcggcttatgcctggccatcatacaccggaaaagaaccgcgctcgcttccgttctgggaaaaaggcatgggagagtggcagactgtgctttcagccaagaaaaaatgcgacctgcacacacttccgcggaaacctttgtggggagctgtcgacgaagcggatcctgccgtcatggagatggaaatagacgcggcagtaagtcatggcgtcaacgtatttatctacgactggtactggtatgacagacgaccgttcctcgaatgctgtcttgacgacggttttttaggcgcgaaaaacaacggagacatgaagttctatctaatgtgggcaaaccacgacgctacatttctgtgggacaaaagaatctccgacaagagcggcgtaatctggcaaggctctcagccgattaacgaattccgcacggtatgccacagagttatcgaaaaatatttcacacgtgagaactactataaaatcgacggatgtccagtattcatgatttacgacgtgatgaatctcatgcgaggactcggcggaattgataagacacgcgaggctctcgactggttccgtgaagaagttaaaaaagccggattcccgaacctgcacctccagctgacgatttggagcgaactcgccgtagacgtcagcggagttgattcgggaaaatccggctcaacgcgtgatattgttcctgcgcttggctttgactctatcacgcattatcagtttgttcattttgtcaactgcaacagagactaccgtgaaattctgtcggatgttgcgcgggaatgggagagaatccgcagtgaatacaaagtgccgtacttcccacacatttcgataggctgggacaacaacccgcgatacaattctctgacatatccgataatgaggaataacactcccgaagaagtcaaaaaaggctttgaaatggcgaaagcattctcggacaaatacaatacaactccgcttatcacgataaactcatggaacgagtggaccgagatgagctatcttgagcctgacgacgtatatggttacggatatctcgaagcggtgcgggacgtattcctaaagtgattattttctgatattgaacagctgattcatcacaagccacaatgacgggaagaagttcattatgttccatactcctccaccgtcaagactttcattcgcggcaagcctgagttttgcgtcagccgagcgcgcgtcttcaaaccaaacgatatgctcaacagcgtcggaatatgtctgcggtctgtcgtaatatctgtagtaaggcgactgcgcagtttcgtcatactgaatatctgctccgcgcatgatggcacgatttaccgccgcaatgtttgagagtgactgagccttagacacccctttcacaaacggcagcgcccagtcataaccatagttcggcagtccgagaaatatcttgtcgcgcggaatttcactaactgcataattcaccacacggctgacctcgttgagcggtgcgacaggcatagggggtccgtaggtatatccccattcgtatgtcataagcattacctgatccgcagcttcaccgagtgctttgtagttatgtccttcgtagagcagtcccggttgatttgctgagtatttcggcgcgagtgacacgaataccactctctcatcccctacagcttcgttcatcctgcgaataaagtcggaataagcctgagcgagttctgccggaatatactcaaagtccacgtcaactccgccgtaacgcttttcatttaccgcattcaccgtgttttgtatgactgcattgctcatactctcacttgacaagacctgtctcacgatttctgttgaaaaagtgccgttttcgctgagtgaagtaagaaccaaaagcggcgtcgcgtcgtattcgtaggcaagggatattagctcttcttctcctgcgggtggtattaggcttccgtcgggtcggattccggttgaaaatacggaaagatatgtcaggtacggcagtgttctgcgcagcgttgctctgtcgatattgccataggcgtacccgtttgttgaaaattctcccaaagacggttcggggtacgatatgttaagcacctgccccgggtatattgtcggaactccgccgagtatgggattgtttcggtacagctccttcattgtaatcctatacatccgagctattgactgaagagtatctccgccgcgtacagtgtgagtttgtgtcgggaatagtatgacaagcgactgacccaccgcgagctttgacggattttcaagcatattgtcggtaattatccttgacggcggaactccgtattcacgcgctatggaatatatgctgtcgccttttctgacggtatgtatgaccatttttacctccgaataaacaaaaatacagctccttatggcacgatatcattgtatgccgcgggagctgtttttattactgtttatttgaggaatatttcaagaacgggaatgtcggcgttcatcggcttgtagatgggaagcggaatgtcaactattctctgctctgcgttgtagctgaactggagttccgatgcgtcggagagaatctggatatactcaacgtgctccgcaagctctcctgtgagtctgagcttaccgaaaggccagctgtacatatggacataaagtctctgcgtctcgggattatatgtaagacggcagtccttcgggcattcaaattcaagaggagcctgtgtgcatccgtaaatggagcgtgaatggcgtttcatccactttccgataccgcgcagtctgtcatatgctctttcgtcaaactcgccgcgtccggtaggtcctacattaagaagcaggtttccgcccattgatacgctgtcgataagcatcttaagaagctgatctacgctcttccacgactgctcgtctctgtagtaaccccatgagccggagaatgtgtgacagccttcccatactacaggaacaccgtttaccttaacccattcgtcaggcatatactgctcaggcgtctttatatcctggtctatctggagtctgtcgtcaatcattatcttcggatttatggagcgtatcatcttgataaactcttcgctgtgccactcattcttgccctttccggggaatctgtttgagccgccgacggagaaatcgaaccagattatatcaacggggtcgtatctgcggagaagctcttccgtctgattgtggagatattcgacgtatctttcaagatgtcgctcgggatcttttgcgatgtattcggcattgtctctcatgggatggcattcgtcaacggtgtaatccgggtggtgccagtcgaggagagagtgatagaagccggtgcgaagtccctttgaacggaaggcatctaccatcggggtcaaaatgtccttgccgtagggggtgttggtggacttgtaatcggtgtactttgaatcccacagacagaagccttcgtgatgctttgtggtgataacaaaatacttcattcctgcctcagccgcagcgtctgcccagagagtcgggtcgtagaggtcgggatcaaagtgtttgaagtattttttgtcatatacctcagtcgagatgcgctcgtgatttttgagccattcatgtcgtgcgccgagagcgtaaagtccccagtggataaacataccgaaacggtcatgagtgaaccatgatgtgtctccgggggtgggagccggcttaattacagtcagttcttcgagtttcattttattctcctttgcggaattttatggtaagtccagtatataataatcaaatgcaaaaatcaagagaaaaataaaatattttcatcaaaatatgcaaataatactatatggacagcatttttattgtaagctgccggatatcattataacgagaaggatgaggatggatgaaaaatcacgttttggcaaccgttatcgaaaatattcacgcaagagaaatacttgactcacgcggaaacccgacaattgaaactactgttacactgtctgacggatctgtaggatgtgccgctgctccctcaggtgcgtcgacgggaaaatatgaagcgcacgagctgcgtgacggagatacaaagagatacatgggcaagggcgttctgtctgccgtggaaaacgtcaacggaaggatttttcccgagctgcgcggaatggaatgcgaaaactctcttgtcgatagcagaatgatacgtcttgacgacaccgagaacaaaaaacggcttggtgcaaacgctattctctcggtctctcttgcctgtgcaaaagccgccgcctctcatgcaaaaatgccgctgtaccgctatatcggtggaacatcgggtgtaacgcttcccgtgcctatgatgaacatcctgaacggaggagctcacgcggctaacaatattgacattcaggaattcatgataatgcctataggctttggcacgttctcagaggctctcagagcgggatgtgagatttaccacactctcggcagaattctaaagaaagatggacacgagacaactgtgggagacgagggaggatttgcacccaatctcaaaagccatacggaagctctcgactacatcattgccgcaataaacgaaagcggatacgagggtcaggtgaaaatagctctcgacgcggcggcaagcgaatgggctgaaggagacaaatacactcagccgaagtcgggaaaacagttcgattcagtctcactcacaaacgaatggcaggagctttgcgcaaaatatccgataatctcgatagaagacggtctcggcgaagatgataacgacggatggaagagcatgacggaaaagctcggcggttcaatcatgcttgtaggggacgactattttgtcacaaatccgaaaaagctcatggaaggcataaaaaatcgctgcggcaactctattcttgtaaagccaaaccagataggaacgctgagcgaaaccgtcgaggtcgtcagaacagcgagaagattcggctatgctacgataatttcccaccgctccggcgaaacatccgacacgaccattgcagatatagcagtcggaatgaacgcaggatatattaaaaccggagctcccgcacgttcggaaagatgcgcaaagtacaaccgtctgcttgagattgaagaagagctgtgctgcggcggcgaattctacggagtaatgatgtcggataaaagaaaattttaaacaaaaagtgaattcatgctaaagcatattgaaaaagtcaaaaagctgtgctataattacaaggtattgataattaaataacttacaagcaaaataactcgtgaatcaaggccataccagccgggggagcagcgggtccctgtactcgaagtccgctacagcgagggtggattcccgacatgaggggaaagcttgtgtagtctgtgtcacaatgaaagtgttgacgaatgggtcttgcgcgattggcggctgtgaaccatgtcaggtggggaaccaagcagcattaagcagtttagttgatgcgccgcagggtagcctgttccgagccggaattctgaagtcgtacatgatcctttcttcgattatcgggtgtatggtcttgatttgcgagttattttgttagttattcataatgtgtgaggcgcgacaatgtatcagactttgtacagaaagtaccgtccgcgtgtatttgacgatgtctgcggacaggagcatattacatcggtactgcgatatgaagcggaacattcccgtttttcgcacgcttaccttttctgcggctcgagaggaacaggaaaaactacctgtgcaaaaatcctcgccaaggttttaaactgcgagcatcccgtaaacggaaacccatgcggtgaatgcttttcctgccgttctattgatgaaggaaacgcaacggacgtactcgagatggacgcggcttcacgaacaggagttgactacatccgcgacattcaggatgaaatcagctttgctccgacttcactgaaaaagcgcgtctacatcatcgacgaggttcatatgctctcagtcggtgcgttcaatgccctgctgaaaaccctcgaagagcctccggaacatgcggtattcatccttgcgacgactgaatttcataagctgcccgcgactatcatctcacgttgtcagcgatttgatttccgcaggattgacagtgacgttatcgccgctcgacttttgtatatagccggacaagagaacatttcactcacgcccgacgctgcaaaagtaatcgcaaaacagtctttcggaggaatgcgcgacgctatcagcttgtttgagttatgctcagccggcggatgcgacgtcacagtagagcgtgtttcagacattctcggactgacgggtatcgaaactctttacaagacggctgttgcggtttcacgcggagatattgcttcgattttcacggtagtcaaggaaatagtttcgtcgacaaaagacattgcggttttctggaacgagcttaccggtttctggcgcgacatgatggtactgaaatacctcccgaaggaacagtattccgcgtatctcgactataccgagccggaaatgaagctccttacggacgcgtcgagaagatttaaatccgaaactctgtcgtatcagttcaatctgcttgacgaagcgacaaaggatatcagccgactcccgcagacaaaacgaatgaccgcggagctgactttgataaagatgagcgacccttcccttatgcgcacaaattccgcacttctgtcgagaatcgccgcattggaagaaaaggtcgtaatgcttgagtcgggtgtagtatcagtcaaacctgctcccgaaaaggttgaagctgcgcaggatacagaatcggctgaacaggaaaaagcatctgaatcaagcgaaaacacgccctccgccgagaagaaaatgagacttatacccgacgtcagcgatgttgtggaaaggctcagcacaaacaaaggcaatatagcggcgcttctttctcagtcggactgctacatttcggaaagcggagacgagcttgttatacggacgcagaatcctatggcaaaaatagttctctcacgcgacgaagaaagaaaatccctgctcaccgcgtttatgatgtgcaagttctgcggtgcaggcacttccctgtcaattgaatcaggtgaggtcagaaaacgtcccgagcctatagacgagcttcagacgttctgataatttaacaacaacgcggctctaaggatgctccgaactgctgcgtattaataatatttttggtaaaaggtggtaacttttcaatgaaggcaaagcttccaaaaggagtaggcgctggtccctccaatatgcaaagcatgatcaagcaggctcagaagattcaggacgatatgactgtgctccaggaagagcttgataaacgcgaatatgagatcaaggcaggcggcggtgctgttactgtaaaaataaacggcaagctcgaagttctttccctcgaaatttctcccgaaatcgttgatcccgatgacatcgaaaccatgtccgacattatcattgccggtgtgaacgaagctatcaagaaggttaacgaaacaaacagcgaagaaatgggcaaggttacaggcggtctcaacatccccggaatccccggacttttctaagcgaaccgatttaggatactgaaatgaacgaaaacattgaacctctcgagagactgacggatatgttccgcaagctcgacggagtcggaaaaaagtctgcggctagatacgcgttctgtgtgctgaatttcaccgatgaagaggctgagcagttcgcggaggctattctctcggcaaaaaagcagatacaccgctgcaaaacctgctgtaatatcacgacaggcgaagaatgtgcggtatgttcttccgactcacgagattcttcaacagtttgtgtcgtcgaagaccctcgtgctgttattgccattgaaaaaacaaggcagtacaacggagtttatcatgtacttcacggtactatttctccgatgcgcggcgtaactcccgacaaacttacgataaaagagcttctcgcaaggcttggtcccggaagcaatatccgtgagcttatcctcgcgacaaatcccactgtggagggtgaggcaaccgctatgtacattgcaaagctcgcttccccgctcggtgtgaaggtgacaagaatcgctaacggtgttcccgtaggcggcgaccttgaatatgccgatgaagttactctcagaagagcaatggaaggcagatacagtattctgtagttttcaaatacggacctctcaagcagtttgagctgccgggaggttttttgttgtttgggattgacttttcgctgttcgtgtgttataatggggaaacttgagggagtaattggcgtgtttttcgcgcgatatgtcaacatactggcagaaaagcctggcatatcttaattaatgagactcatgtgcaatctgtcattgtgcatgcagtcttttcgtgtatggaactgttgtgccgtgcacgctttttttatgccaattgacaaaatatttggaggaaaacatggaaacctttttgatgtactttttgtttgtggtcggcgtcgttcttatcgtaaaaggcggcgactggtttgttgacggtgcggtatgggtcgccgaggtcacacgaatgccaaaattccttatcggcgcaacaatagtaagtcttgctacaacactgccggagattattgtctcgacgattgccgctgttgacggacacaaaatcctgacgtctcaagtcggagattatatcacggcgtcgcaggacaaggtcggcatggctattggcaacggaatcggctcggtagtatgtaatacggcgatgattctcgcaatcagcattatttttatgcccatcgtgattgaaagaaaagattttgcgccgaaatcccttcttcttatcgcggctctcggagcattgttcgtgctttctttgaacggctcgtttaccatagtcggcgctgtcgttctcattctgatatttgcgctctatatttttgagaatatccgctccgctaaaagcaatgccgacaactcagaggaagaacgtcccgaggtcaacaaaaaatccgtagtcacaaacatactccgcattgttttcggagctgccggaattgttatcggttctcagcttcttgtaaacagcggaagtgacattgcggcttcatggggagtttcggaggctatcatcggcgtaacaattgtggcaataggcacgtctcttcccgagcttgtcactgcgattaccgcggtcatcaaaaagcagtcgtcaatgtccgtcggaaatgttatcggcgcaaatgttatcgacactacgctcatcatttccgtatgttcgtttgtttacggcggcaaccttcctgtatcggcacagaatatttaccttgaattccccgttgcgctcatcgtttcaataattgcgatagtaccgacaattgtcaagaaaaaattctcacgctggcagggagtcgtaatgcttctcatatacatcgcatatcttgttatcgtaacggcggctcttccctcttatcttgcactgttcggcatctgaactgcataaaaatacccgatactcggcggttgaagctgttgtatcgggttatttttctattcagcgactgcacaggcatatacggtgttctttatcgtattgtgccatgtccaccacggtgagccgccttcctgctgagcgtagaatatgcctattccggtcttaggatcggcaacaagatagcatccgagcgcgccgtcccatccgaattcgccgttttccgaaagagaattgtttctctctctgtccataagtgtgcgaacgccgagtccgtagccgtagcctgctttgctccatccgccgaactcttcaaaatcgcgcagtgcatctctgcaaagctgattctctcgcatcaagtcaatagcggaaggcggcagaatccttgctccgttctcgcctactcctccgtttgacagcatcgccgctaattttccgtagtcgtttattgtcgagacaagtccgcccccgccgctctccatattctcgccgaagcctgtgtcaagcccgtatttgtatatacacacgtcgtattttcccgtctctttgttgtacgcgtgatattcgggagccattcgtgattttttgtcttccggaactttgaacatggtgtcattcattccaagcggctcaaatatttccgtgcgcagataatcggaaaacttcatgccggacgaaagctcgattaccgcgcctaaaacgtcaaggcaaaagctgtatttgaagtgcgttcccggctcaaaaataagcggctgagacagaagtgcgcgtgctacatctaccgttgtgggatttccgttgtgctctgacatcagtctttcatatctgtcggattccatatcgtaatacagtccgcctgacattgagaacaggtggcgcactgtcataacgttcttcgcgggaataattcctctgtcgggtgtttttaccatgaggcgcgcggcttcgggaatgtagtctgacacgggagcgtcgaggttcagcttgccctcgcttacgagcttcattccggctgttgcagtcgatatctttgtgcaggaatacagatttacaagagtgtccgcggtgaacagctttttctcatcaatatttgcgtatcctgtcgcatatgtatgcaggtgtctgccgtgcttgtataccgttattcccactgccggtatatgcttatcgcggtttatcgaatcaatgtatgaatcaagatagccaaaattcatattttctcctgcctttcggttttatttgcgcattattaaagtacgctgtttattccgtgacctgtcttcgtgaatgcgtcaaggttattatcgagtattttcataagtctctctcttgcggcttttgacgtccatgcgcagtggggagttattatgcagttttttgcgtgaagcagcggatttgcggggtcggcaggttctttcgcgagaacatcaagtcctgctccgccgagttttcccgaatttaaagcgtcagccacgtcctgctcgttcaaaacagctccgcgcgatgtgttgattatgacagctccgtccttcattttggagataaactctttgttcaccattccgcgggtcacgtctgtcagcgggcagtggaacgagatatagtcgctctcacggataagcacatcgtgagcagtgaacgtaattccgtcttcttctccgcttgttttgcttcgtcttgtcgcgagaactttcattccgaacgctttgcagatatgagcgaaacgagttcctatagctccgcagccgtatacgccgacagtttttccgtcaagctcgacaaacttcgactcctgatacataaatccgggaattcccgtccacttgccgtatttcaccatatcggtatatccgttcaaatcaaacgcattggcgagaagaagagtgaacgcgtgctgtgctaccgaggcggtggaatatcccggcacattgcagacttcaactcccctctcacggcaggctgacacgtctatcatgtcatatcccgttccgagagcggagacatatttaatattcgggcatttttcgagaacttccctgcctatctttactctgtttgtgaatacgacctccgcgtctcctatgtgttctgccgcttcactgtcactaagtttgtcgtaagcggtgtattctccgtattttttaagccaatcccatgataaatctccgggatttaccgcaaaagcatctgttattactgttttcattttatcctgccttatcttattagatgaaaatatccccgattgttttcgaggatgattttcttattttatctcttgacgcgcgcatttccgccccagaccgaccaaacctgttcttcgtcagccggctgagcatagtccgtgaggaaggttgtggcaagcgcgcccgtagcccatccgaactggagacacttttcgtcctcccagcctttgagcatagcgtaaagaagtccgcctacaaatccgtcgccgccgcctattctgtcaaggacgtgtatctcgcgaggctctgccgtgtaccagttgtctcccgcaagcattatcgcaccccagatgtgtgtgttgacatttacaacctgtctgagtgtggtggcaaatacctcggcgttcgggaattcctttttaacgcaggctatcatgcctttgaagctgtcgattttcgatgcaaggtcgcgtcctccggcttctggtccttcaactcctagtgcaagctggaagtcttcttcgtttcctacaagaatatcggaaattgacgcgatttcggtgaatatttcgcgaagctcttcttctctgttcttccagaatgaagcgcggtagttcaggtcgaaggagatttttgttccgtattttttagccgcacgggcaagttcaaggcagaaacggcttgtttccggtgagagtgcgccgataagtccggaaagatggagtatctgtacgccttcttcgccgaaaatgcggtctgtatcaaaatcttttatattgagcgttcttccgacttctcccgctctgtcgttgcatactctcggacctcttgagccgtatccgctgtcggcaatgttgaactgatgacgatatccccacggtccgccctgttcaacctcagctccttcgtagtcgattcctcttgagcggagatttctcttgataaagtccgcaatcgggctgtcttttacaaatgtggtgagtacctttgtcttcattccgaggtatgacgcgatcgagataacgtttgactccgcgcttgtcgcctgcatgaagaaggtatctgacgactgcaccggctgaccgttcatgggacatattctgacgcccatgcttgtgggaactacgatggcatatttgcagttttctctgaatttcatgatgatatccccctgatttatgcgttatactgagttgaagcggtatttcctacttcaccgttgttccagtccgtatggaagaatttgcctctctcggcgtctattctttcgtatgtgtgcgcgccgaaatagtctctctgagcctgaagcaggttagcaggcagcttttcacagcggtatccgtcgtaatacgaaagagcggaggtcatagccggcatgggaacacctgaaataattcccgcggcgcatacttttctccaaccttcatccgccttctcaagcgctgacttgaagtagtcgtcgagcatgaggtttgtgatgtcgggattcttttcatacgcttccttaatcttgccaaggaacacgcttctgattatgcatccgccgcgccacattagtgctattccgccgtagttgaggttccatccgtaggttttagctgccgaacgcatgagagtatatccctgcgcatacgaaacgatttttgacgcatagagcgcgtttttgaggttttcgatgaactctgtacggtcgccttcaaatttggcataaggcttgccgagcacctttgacgcgctcactctctcttccttgattgcactgaggcagcgtgcgaatacggcttctcctatgagagtgagcggaattccttcgtcaagcgcggctattgcagtccattttcccgtgcccttctgtccggctgtgtcaaggattttatcaacaagcggtgaaccgtcctcgtcttttcttgtgagtatgtccgctgtaattccgataagatagctgtcaagctcgcctttgttccattcagcaaacacatcgtgcatttcgtccggcgtcattccgaggtagtcgcgcatgatctggtaagcctcgcatatcagctgcatatcgccgtattcgattccgttgtgtaccatctttacgaaatgtcccgcgccgtcctcgccaacccagtcgcagcagggagttccgtcttcaacctttgcgcagatgttctggaaaataggcttaactctttcccaagctgcgggagaacctccgggcatcatggaaggacctatgaacgcgccctcagcaccgccggaaactcctgttcctatgtacagcataccggtctcttcgacgagcttgcatcttctctgcgtatccgggaaatgcgagttgccgccgtcgataattatatcacccttgtcgagaagcggaagcagctttcctatagtttcgtcaacgggagagcctgcgcgaatcatcatcataacaactctcggtttttcgaggttctgtacaagctcttcaaatgagtggcacggaatgaagctttttcctttacctctgccgtccatgaacttgtcgacaacgccgtcccaaacatcgtaaaccgcgacagtgtatccgtggcgttccatattcatggagaggttttcgcccattactgccattcctatcatgccaatgtcagcttttttcatgattttctccttatatttatctgtcttttttcatgttttcgagaactgaatacggaattctcagtctacccagtcctgttccgatagagatgtgcggcttgaacgaaccgtggaagtcagttccgccggatattttcagtccgtactttttcgcgagtcctcggtattcggtctccatctccggggtatagtcggtgtagtagccttcgattccgcaaagtccttcctcggcgagacgcttcacgaatctgtcaagctcgtctttcggcttctttgtcaggtgaagatgtgcaagatacgcgtctcctccggcttttctgataagctctatagcctcggtatcagtcagcgcctgcgattcggaataagcgggacagccgacgttgagccatgtattgaaagcgtccttcggtgaggaagaatatcctttttccgtcataatcttcgcgaggtgcgcacggcacaggataccgccctttgctttttcctttacctcgtcaagtgtaacgttaattttgtatttcttgagcatttcgcaggtttcgccgatacgctgagttctcacgtctcttatgtagtcgactgcagacaaaagcgcgggagaagacgggtcgatgaaatacccgagaatgtgcgtctccgtgtcggattttgccgaaagctctatggcgggtacaacttcgattccgcattccgcacctgcttttacggcttcactcactccgtcgcaggtgtcgtggtccgatatcgcaaccgcgcttagtccgctgcttttcgcgtgtttcacaagctcggcaggcgtcatagagccgtcggaacatgtcgaatgcgtgtgcaggtctatgtatttttccatattattccttatcgtatgtccaaagaccgagggcggggtttgaaatatagtaaatctcttcaccgtctacagtgttccatccgtcagtcagctttgtgtggtcgtatttcttcgcggcttcggaatacggaatataaccgaacgcagctccttcaacttcttcacgcgtgagcttttccgtacaataggttatcgagaatcttccgtcggacgagccgtggataaggtgcgccgctacggagagattttcttttaggtcggtattggcgggatcgttcacgagtttaagcacgttctcgcgtccgacatagccgtattttctgataagtctgtcgttttcgctgtcctcgccgaaatgcactactcccggagcaaggacaatgagttctccgccgtcggctatagccattcttgtacggtaaaccgctttgtttccgagccatgtgcttttgaattcacgcggatcaagatatacaacggctttttttatcggtctgtccatatggatgaggtttatcttctggctctgctccactgccatctcaaagttttcgcggcttcttccgatgtacagtccgtggatgttcgtcttgtctcccgtatttgtcgtgcaggtgaggacgtacatgagcggcacatctccgagaaaatgctcttccgcatagtcgaacacgcgccttacgggagagaaatccttgcccataattctttcaagtccgtagaacgcgccgagcatatgggacgaatttatcatggacgagccgccgcagccgacaaagatattcttggaatagtttgccatgccgacaacttcatgcggtacgacctgtccgacggatattataaggtcatattcgcccgaaactattctgcggttcacttcaacgtcaattttatccttgaccagtccttccgaaacatccgacacaaactcagccggaacttcgccgatttttacgacgtcggtacgccagttatgcacgatgagcttttcgtaaggcacaactccgcagaaaaacgcctcgcattcctcttttgtcatcgggacatgagttcccagcgcgggcataacgtcgacctcgcactttcccgagagcatttcgtagtactgcgctgtaatttttccggctcccgagtacattcttgtgtagtccggaggaagtatcaataccttgtgcggatttttgcccttcagagattcttcaagagcctgctttaagctgtcgtccgtaagtcctttttcacttttgtaaaacatagcatctccagtttatattatgattttaacaaaataatcgtttatgactacattttatcacccaaagccgtcaaagtcaataaaaaactcacgcgattagcatttcaaataatttttgcgccgtttttccatactcaataacaatttcgcactcttgttcatgtcgactaaaaatcgaaattgtaaaaaaatatatttttcgcccattccacttgacggctcagggaatatactatataataaatgaggaaaacttaatatgctttctgcgactgacggaaaggct

SEQ ID NO: 1348 - DNA, 4232 bp, Unknown
  16S sequences of unknown bacteria
ccgctggcattggacgatatggactatatactcgcaaacgatcttgcagaccttagacacggcaaacctgcgagatatcttgtaaacaaagatggatttacggggaaaacacttgataatccggaagaaatatttgcattcgtggactcttgccttaagtaaggaagaaaggtggacatgcgggtaaaattatgactgcgttattgacgcaaggaggaaaaaaatatgaaactgatgatagcgtctgatattcacggctcggcatattactgccgcaaattgcttgaagcatataagacggaaaaggcggagagacttttgcttctcggcgatatactctatcacggaccgagaaatgatcttcccaaggactacgcgcccaaagaggtgatagcgatgcttaacgctatgaaaaacgaaatactctgtgtacgcggtaactgtgatacggaagttgatcagatggtgcttgaatttccgattctcgcagattatgctgtaattataaacggtaagcgcgatatatatgctacgcacggacatatttacaatgaaaataatctgccgccgattaaagacggtgatattctgctttgcggccacacgcatgtgcctaaaattacagagcacagagggggagaaaaagagccgcgttacacttacataaatccgggatcggtatctataccgaaagaagaaagccatcacggctatataatacttgaagatgatgaaatgaagtggaaagacctattgggaaaggtcatagataattatctgctgtggtaaaaataaaaaaattgcagtatagaaaaaagcggacgataataaataaacatgcaggagaattatatgagaaaattcgacacaaagatacaatacttaaattataaagtgctgcgcgaagttgcgcgctttgcatggaacgatacgcttcttgagaacataataaatataccgcaaatagtagtgccaggtgatacggcaactatgagatgttgtatttataaggagcgcgcgattcttggtgagcgcattaagctggcgatgggcggcgatcgggaaaatcccaatgtcatagaggtaatagaaatagcgtgcgatgaatgcccaatgagcggttacgaagtgactgatgcgtgccgtggatgtcttgctcacaggtgtgatgatgtatgcccgaaaaatgccataacatacgatcagaactatgttgcgcacatagacaaaactaaatgtgtaaactgcggggcttgtgcccgggcttgcccttacagtgcaattacaaacaggagaaggccatgcgaaagcgcatgtaaggtaaaggctatctcgatgagtgaaaagggccctgcggaaattcacaacgataaatgtgtcgagtgcggggcgtgcgtatatcactgtccgtttggcgcagtactcgataaggcttatatactcgatgtcatagatatgataaaaaagagtgaaaataacagtaaatacaaggtatatgctatggtagctcctgctatcgcaagtcagtttacatttgcgagaacgagacaggtgatagaggggataaagcggcttggattttatgatgtgacagaggcggcgctcggagctgatatggtggcgtatgaagagtcaaaagagcttgccgagaaaggatttcttataagctcatgctgcccggcatttgtggaatacatacataaaaatttcagcgatctcgagcaatatgtatcgcacaatctttcgccgatggcaacgctcggaaagtatataaaggaaaaggatccgacggcgaaggtggtatttatagggccttgcacagccaaaaaggaggaagcgcagaaagaaacggtaaagccttacatagatgcggtaattacgtttgaagagctgcaggcgctctttgacagtaaggatatcgagattacagaacttcctgacgccgatcttgaaggcgcgtcatattacggcagaatatttgcgcgaagcggaggacttgcagaagctgtggcgcagggacttaaagaacatggaagagctgattttgagttaaaaccgctttcatgcggaggtattgaagagtgccgtacagcattgctcaagaagaagagcggtaagctcgacgccaacttcatagaagggatggcgtgtgtcggcggctgcataaacggcgccggatgtcttacgcacggtggcgaaagaagccgctctgaggtggataagtacggaaagaaggctggagaaaaaacgatagccgaagctgttttggaagcggaagctatattttaaaagttatatgtttataactggacgctgttaggcttaaaaagcttgacagcgttttttatttttaatatttatgttgacaaggccgcaatattgtatataatagatatatacaatattgtttttattttttaaaggatatctaaatgaaaattataattaacaatgcgagtggagtgcccatatatgagcagatagtatcgcagataaaaaatcaaataatgactggagagcttaccgaaggcgaggcgctgccttcgatgcgtcttctggcaaaagagcagcgcataagcgtcataacgacaaagagggcatatgaagagctggaaagagagggctttatatattctgtggtgggaaaaggcagctttgttgcaccaaagaacatagaagtaataaaagagcagcatcttcgtgagattgaagataagctgagagaagctttggcgcttgcgcatctttcgggtatagagataaaagagctcaaggaaatgtttgatattttggcggaagaatgagctgtgcggtgcagtgtgaaatatataataggatgatgcgaaaggggataatgtaagaaaaaatggttgattttgcgatagatcttaaaaatgtgacgaaaaaatatgatgggtttatgctcaataatgttagctttacgcttccacgcggatgtattatgggacttatcggtgccaacggtgccggtaagagcacaataataaaactgatgctcggcattataaagaaggacagcggtgatataaaacttcttggatgcgatagcgataggctttcaaatgaagtaaaagaaagaataggcgttgtgtttgacgagagtttttttccggaaaatatgaagctcagagaaattgaaagagtgctggcaaacatatataaaaactgggatgaaactgtgtttgcgagatatacaagcgagtttggactgccgcagaatgtagctatcaaagatttttcacgcggaatgaaaatgaagctgagcatagcgtgcgcgctttcacataacgcggagcttctcgtgcttgacgaagcgacgagtggactcgatccgatagtgagaaatgaaatacttgatatatttctcgattttatacaagatgaaaacaattccgtgctcatatcgtcacacataacaagcgatctcgaaaaggtgtgcgattatgtaacatttattgataatggaaagataattatgagcgatgaaaaagatttaatactcgaaaaatatgcggtggtgaaatgcagccaggatgaaatcaataagcttccgcgcgaaaagacgatagggataagaaaaaataagttcggcgcggaagttcttacggaaacaaaagcagtgccggcagattttattgcggagccggcggatcttgaaaaaattatgctttttacagctaaaaaggagaacaggaaatgaagggacttataattaaggatttatataatttgaggaaacagctcgttttgtacattattattggtgttatatatagtgtaatcggggtggtggctaaagacagcggcggcagctcttttacaggattgatattgatattttcggcgatgctgccgataacagctgtttcgtacgatgaacgcgcaaaatgggataaatacggtctgactatgcctgtcagcaggagagagacggtagctgcaaaatatctgctgggtgttatattgacagcggcaggagctttgctttcgtttgctgtaggcctgcttttcggtgctgatatgacagagtatgcggcagtcgtaactatgcttgcaggcatctgttttctatatctcagcgttttgcttccaattgtatataaaatgggaacggagaaggcgaggtttataatgcttgcggtgatactgctgccgtttctgcttattatggcgggagcgttatatgcaaagaactcggttataggcgatat

SEQ ID NO: 1349 - DNA, 11548 bp, Unknown
  16S sequences of unknown bacteria
cggggaaagcgagggaaaacattatatcgtcatggaatatgtccgcggacggacgctcaagcagctgatcgcccagcgcggcgcactgcacttggatgaggcggtagacatcatgctgcagctgaccagcgcggtcgccatggcccatgaaaaacatatcatccaccgggacatcaagccgcagaacgtgctggtgaaagatgacggcacggtgaagatcaccgatttcggcatcgcggtcgcgcatggctcggtccagctgacgcagcatcataccgtgatggggagcgcgcattatctggcgccggaaaccacacggggcgaagcgccgaccactgcggtggacatttatgcgctgggcatcgtcttctatgagctgctcagcggcagcgtgccctttcagggatccaaccccacggagatcgccgtcaagcatctgcgcgagcgcatgccatatatccgcgatttcaacccgaccatcccgcagtccgtcgaaaacatcatcttgaaggcgacggcgaagaaggtcagcgagcgctatgccagcgtggaagagatgcgtgaggatctgctggaatgccggcagccgcatatgcgggatgtggagcgcattcaattggatgatgacatgatcacttccgtgcaggtcaaggacggccgcctcgaagtgaagggtgagcctgcgcatcgcggcagccgcaggaagatcgtaatcgccggcatcagcggcgcgctctgcatgctggcagtggtcatcgccgcactggtgttcagcggcgtgctgcattttggcggaggaagcatcgtcataccggatgtctcggggatgaacgaggaagaggcgctttctgcattaaaggagagcggtatcggtgaggaccgcatccaggtggaaagagtgctcagcgaggatgtagaggaaggcgatgtcgtcgatgtctctccgcaggcggatgagcggctgcaggaaggagaaaagctgacgcttgaggtttcgcgcggcggctattatgtcgtggagaactatgtcgggatgacgctttcagagcttcggggcatctttgcacagaatgaggtcaatattcgcatcatccagagcgagcaagccatctccgatgtggaccggggcacgatcctctctcagagcctggatccgggggagaagatcgatccgcaggcggacaatgagatctccatcgtggtggccgcttcgcccagctttaccatcccggatgagatcatggggatggacatcgatgaggcaaaggaaatgctcaacggctatggagcagcggtcgtgacccgctggatcagcgaagatgagctcagcgaagaagagctggcttacggcgaagggaatgtcgtgcgctgcacaccgcagagcggcatgacttacatacaggagggaacagacagctacatcacgctgtattattattgatatgaaaacaggacagatcattcgcatcatttcaaatcagtataccgtgcgcacccaggagggagaacagctggagtgtgtcgcgatgggaaagctgcgcaagggacattctcccgtggtcggcgatcgcgtggaggtggagaggtttgatgcgcagaacggcatccagcgcatattgccgcgccgcaatgcgctgcgccgtccgctcattgccaacgtggatcaggcgatcatcgtcatgtccacgctttgtccggatttttccgcccagctggtcgaccggctgatctttcagatctgttatgaagggatcacgccgctgatctgcgtcactaagatggatctgatcgacgcaggatcagcgatccacgcgcagatcgaggattaccggcagagcggctacgcggtgttcgtctccggagaagggggcgtgccggatgcactgctcgccgcgatgaagggaaaggtgtcggtgctgtgcggccagtccggcgcaggcaagagctcgctgctcaaccgcatcgatccgggctttcagctgcgcacccaggagaccagcaaggcgctgggcagaggccgtcatacgacccggcactgtgagctgcacgaggtcgccggaggatgggtggcagatacgcctggattctcatcgctggattttcattatatgcagctggaccgtctttccgcgtgcatcccggattttgcgtcggtccagggagagtgccgcttcaaggactgccgccatctgcaggagccggactgcgcggtcaaggatgccgttgaggcaggcaggatcagcaagatccgctatgcgcactatgaagaggtcgcgaagctgatcctgtccaacagagtgaaatattaggaggaacattatgcaggaactgatcgtatcaccatctatattgtcgctggattatgcgagggtcagcgagcagctggatacgcttgcgcgcagcaaggccgcctggcttcactttgatgtgatggacggccattttgtcccgaatctgacattcggaccggatatcctcaaagggtttgccaaggcagtgccccagaagatggatgtgcacatcatggtcgaagatcccgtgacctatgcggatgtcttcatcgacgcgggcgcggatgtgctcaccttccatgcggaagcgcttgacaatgacgtccgcgcgatcagcgcgctgtgtgcgcatatccgcgaacgcggcgttctggccggcgtcagcgtgaagccgggcactcctgccgactttctgctcccgctgctcgatcagatggacctcgtgctggtgatgtcggtggaaccgggcttcggcggtcaggcttttcagccgcaaacgctggaaaaagtcaggctgctcagaagcgagatcgaagcgcgcggcctgcatacccgcattgagatcgacggcggcatcaatgcgcagagcggtgcgctggccgtggaagcgggctgcgacccccttgtcgcaggcagctacgtcttcaagaacgatatcctgcaggcggtggaatcgctcatatgtctttgatcgtgctcgtctctccgctcagcgctcaggtgccgctgctggaaggcgctgattatgccggggtggatgccggggcgctgtgctgcctgcgccagggcatccccatggtgttcgccatcggcgatttcgatacggccggcagcgaacaagatcgcatcgccctgtccaccgactgtcatgtcctcccctgccggaaagatgagacggatatggagagcgcgctgctggaggccaaacggcgcggctatgacacgatcatcctgtatggcgtgctgcaggggcgttttgaccatacgatggccaatctgtatctgatgctttaccgggatccctccatctggctgatggatgagaaaaaccgggtgcgggtgatcggggaaggcgtttatgagatccgcagggaataccgatacctgtcttttctggccctcgaacaaagctgcatcagcgaaagcggcgtctcttatccgctgacgcggcgagagatcgacacgcatgatatctacaccatttccaacgagatcacggcggacaaggcgcggatcgaggtgcataggggcaggctgctcatgatggaatgcagtgactgacatccgctgcccgatgacttttcctttctttacatttgcgcggatttatggttaaatgttcagagatttgggagggatgcagatgaaaaaggtgaacaagaatctcattttttattttgcgatggcgatggcgctggctgtcgcaggcatcacctccatcttggcgagaagctcgctggtctccctggtgatggtcttgctgggcgtcgacctgatgatcaacgggctggtgcagctggttcgcttcttcttggccaagatgcgccgcagcggcgatttcagcgtgctgatccgcgcctttctgagcatgagcgcctcagtattcctcatctggtatcaggagatcccgatgtggctcatggtcgtcctgttcggcgcgtatatgctgctgtatggcacggccttcctcatccgatggtggctgtatcgccaggacggggtgaagggccgcttcttgatgtttttgatgatgatcgggttctacgtcgtaggcggcatcttcctgctttcacccagcctgacgatggacgatatgctcatcctgtttggcatctactgcctcatgctggcgctgacgtattttcgtgacgggctcgatgcgctttccagcaagacgaagagccggatgaagcgcaaggtgcgctttacgatgccggccatcatctgtgccctggtgccggccaaggcgctcaatgacatcaacgaatacctcaaggatgaggatgactatgagatcgacgatcataaggatgaagaaaagggcgatctggacatttatgtacatgtgacagacagcgggttcggcctgctcggccatatggacatcggctttgaaggcatgatcctctcttatggcaactacgatacggacagctaccgcctcaacagcatcatcggcgacggcgtgttttacctggctccggaggaagcgacggtagagacgtatctcatggtcgagaagaataatctgttcgtctatggcctgcgccttgatgaggaacagaaagcgcagattcgtgaggcgatcaaccgcatcgtcgcgcagggatatcgctggcagacgaggatcgagcgggaagacgggttttctcatccgcaggattatgagagcgattttccttcccggctcgtctgcaagacgaatgcgcggttttacaaattcagggacggccggttcaagacatattttgcgctcggctctaactgtgtgctgctcgcggattcggtcatcggcaggctgggcacggatatcctgagcatgcgcggcatcatcagcccgggcacatatcaggattatctggaaaaagagtatcgcaagaaagacagcatggtcatctcgcggcgtttttatccctgtccgaaagaaaaaaagaaaagcgcgttttccgcgcttcgctcatgaacggcatctgccgttttttttgtgtgccggacaaaagaaaaacaggcggatgcctgttgacctttagatggcgcctttcttcttcagggttttcagagcacgggcgctgatgcgcagtgtctgcggcttgccgtcaaccatgactttcaccttctgcagattgacattccaggtacggcgtgacgcacgcatggagtgagagcggcggttgccagttaaaggtcccttaccggtaattgcacatactcttgacatacggttacctcctttacgcattttatacttccgcgatttgcttatttatattatcatctgccacatgaaaaagcaaggaaaaaataaaaatatagctggttcataatcggcggcttcccatcataggatgaagtggtgatgaagtttgctgaggggaaaagtcaaacagcgcatccagcggatcttcctgtgtgccgtgctcatcttcgcttgcatcctgtccaagctggcggtcgagcagatcgttcatcatgatgccatcctggagcgggcgatggatctgtggcagcgtgactttgcggtggctgggacacgcgggacgatctacagcagcgatggcacggtgctggcgcaggatatcccagccacttctgtggtcgtcgtcccatcgcagatcgaggatccagagcatgcggcgaagcagctggcggatatcctggaagcggatgagcaggcattgtatgaaaagctgaccagaaagcagtccacccagaagctgcagccggagggtcgtctgatcaacgatgagcaggctgacgccatcgaagcgctggagctgcagggcgtgtatctcgtgcaggattcgctgcgctattatccgaggggcgattatctgggacaggtgcttggctttaccgggatcgacaatcaggggctggccgggctcgagctccagtatgatgagctgctgaaggcgcagcagggctcgctgaagatccctctggacgccaagggaaaccatgtgacgctgcttcaggaaacttatgaggccagcggcagcggcatggatctcaccctcaccatcgatgccaacatccaggatatcatggagcgggagatgcgcaatctcatgaagcgttataagccgcagcgggcgttggccttagccatggatcccaacaccggcgtcatcctgggcatggtgtctcagccgggctttgatcccaatcattatgatgagtatgaacaggagacgatcaatcagaatctgccggtctggatgagctatgagcctggctccacctttaagtcggtcacctttgcttccgcgctggaactggatctgttcgatatgtttaccgatacgtataatgaccgcggctatgagatcgtcggaggagccaggatcaaatcatggcgcgccggcggccatggcctgcagacgttcttgcaggtgctggaaaattcatccaacccgggctttgtcgagatctcgcggcgtatgggcacagagcggctgtatgaatatgtgaagaaatttggcttcggagagaagaccggggtcgaccttcccggagagagcgccggcatcatgttcgatctggaggagatgggcgagctggagacagcgaccgtggcgttcgggcaggggctcgcggtcacgccgatccagctggtgacggcattcagcgccatcgtcaacggcggcacgctgtatacgccctatatcacgcagagcttcagcgaccccatcagcaaagatgtcatcgtgcaaagcgagccggccgcgaagcgaagggtcatcagcgaagagaccagtgaaaagatgcgttatgcgctggagagcgtggtcgctaacggcggcgggcgcaacgcctatatcgagggataccggatcggcggaaagaccgggacagcgcagaaagctgtcgacggcgcttatctgcccaatgagtatatcttgtcttttctttcggcagcgccgatggaagacccgcagatcgtcctctatgtggcggtggacgcgccgcaaaacgatgtgcagtatggcggcacggtcgtcgcgccggtggtcaaggccatgtatgaggacatcctgccatatctgggaatagagaagacggatgagcagctgcccaaaaagctcgtctggccggagacggaagccatcgtcaccgaagatttcatcggcaagaagcgaagcgaggtgcagcaggaaggggtcatcttcgagtttttcggcgaaggagatacggtcatcgaccagctgccgcgcggcggggtcacattgaatgagagcggaagggtgtggatctatcttggagaagatacgtttgaatgacctgctcgccaccatcggcatatcctccgaggatgagcggatcgtatgcggcatccacgaggacagcaggagagtggggaaggactggatattcatcagccgtctgggcacgaaaggcgaaggaaaagcctatgtgtgcgaggcgctggacaagggcgctgtggtgatcatggaagagcggtgtgcgatgcgggatgtgtatgtctgcgcggatgtgcagaaagccttgatcacgctgagcagcgctttatatccccggctgtgtgcggacctgctctgcatcggcgtgaccgggacgagcggcaagagcagcgtctccgcgtttctctatcagatgctcagcgcggacatgccctgcatgcggatcggcacgcatgaggtgtgcggcgctggctggcgtgaggagatcgagaatacgacgccgccgctgtgcgagctcatccggctgtttgagcaggcgcgggaagagggggcgcgctgtgtgatcatggaagtcagctcgcatgccatcgcccaacagcgcatcgccctgcttcgcttcgatcatctcatctataccaacatcaaagaggatcacctcgactttcaccgctgcacagcgcattaccgctatacgaagtatgcgttgcgcagatatctgaagcccggcggtcaggtcatcgtcaatcatgatgatccgctgctgcgtgatctgtatcctttgctggcaggccattgcgtgaccttcggccatgtcccatcgcattttcagatcctcgaggagcatgccgatcggtccggaatcggcttccggatgaatgagtatgcctgtcatgcgccgctgtatggcgcctttcaggtgatgaatatcgccccggcggtcatctctgccaggctgcttggctatccgcgcgcctggatcgaagagcgggtggcggcgctgcacgggctgagcggacgcatgcagaaggtatgggaccatccgctggcattcgtggactatgcgcatacggaggatgcggtgcgccgcatgtatgaagcgctgcgagatctgccccatgaacgggtgatcacggtcatcggctgcggcggggagagagagcaggaaaagcgcggcgccatcgccgccttggtcagcgccaacagcgacctgagcatcttcacggcagacaacccgcgcggcgaagcgctttcatcgatattgctgcagatgcgggaagctgcccaggggtgcatggtgttcgaggagcgggcccacgcgatcaaatttgcagtggaaaacagcggaaatgatgatataatactcgttgtaggtaaaggggacgaaaaggtgcagatcgtttcaggagagcgcgttcctttcgatgatgcagagatcctgctgcgcctgctgaaactggggaggatggatgaccatgcagcttgaatacattttggcttttctgataacgctggtcgtgaccctgctggtcatgcccggcgtcatccgctttttacataagatcaagttcggccagaccgaacgcgaggaagggcttgcctcacacaaggtgaagaacggcacgccgacgatgggcgggatcgtgttcatcctggtgccgctgatcgtgttcgccctgatgcggccttccgcattgcgcgagcccagcgtgtggatcgtcatgctcgcgtatgccggctatgggctgatcggattcatcgatgactacctgatcgtggtcaagaagaacaatgacgggctgaagccttcggtcaaattcgccatgcagtctgtgctggcggtcgtattcttcctgctgtaccgcacgacggcatccacggagatcgtcatcccgctgctgggatggagcttcgatctgggctggctgtattttgccctggtctttctgatgttcacggccgaaagcaacgcggtgaacctgaccgatgggttagacgggctgtgcgccgggtgctgcgtgatcgccctgttcccttatgtgatctttgcgctgatagaaggacatcaggatctgggcatcctgttattgtgcgtgatcggcgcattgatgggatatctcaagttcaacctgcatccggcgaaggtgttcatgggggatacgggttcgctggcgctgggcggattgctcgctgctacggcgatggtgacgaagcaggagctgctgctcatcctcatcggcggcgtgttcgtcatcgaagtgctttccgtcatcatccaggtgacgtattataaacggacgaagaagcggatcttccgcatggcgccgatccatcatcattttgaagccggcggcatgaaggagacgagcgttgtcctcatgatgtggggcatcgcgttcatctgcgcattggccggtctgttgctgggggtgctgtgatatggaaaatgtattgatcatcggcggagcgcgcagcggcatcgcagccgcgcgcctgctgcgtgcgcacggctgtgcggtcacgctgaccgacagccgggaagtaaaagagaaacatgaactggagagcctgggcgtgcgcgtcgcagacggcggacatccggactggctgctgcatgaggactggtcttatgtggtgaagaatccggggatcccttatcgtgtcgcgatcgtgaagcatttcgtggagaagggcgtcccggtctatacagaggtggagatcggctaccgttacgcgaagcatttccgttatggtgcggtgaccggcacgaacggcaagacgacgatcacctcgctgctgctggagatgctgaagcgcaaaggcaaggcgctggcagccggcaatatcggcatcccgctctgcgagcaggtgtatgcgcatgaagaggaagagatggatgtggccatcgagctgagcaacttccagctgctgggcatggagacatttcggccttgtgtgagcgtcgtctgcaatctggcgccggatcatctggattacatggattcattggaggcatactatcagagcaagatgcgcatatatcaaaactgcaaggcggacgactggttcttgcgcaatgtcgacgatccgctcatcctgcagtatgcgacggatattccctgccgtgtcatcgattactcgctcacacgcacagacgtcgatctgtatcgcaaggatggcaaagtctggttcggcgatacgatgctctttgacacgtccacgctgaagatcgtcggcgattacaatgtggccaatgcgatggcggcagcgtgcatggcttaccgcatgggcgtatcgttagaggatatccaggcggcctgcgcatcgttcacttctgtggagcaccggttggaattcatcgatgagcgcgacggcgtgcgctattacaatgattctaaggcgaccaatactcatgccgctgccgctgccctgcgctcgtttgcgtccaatgtgatcctgctggccggcgggcatgacaagggcatcccttttgatgatctacgctgctttgacgatcgggtgaagctctgtgtcgctttcggcgagacgagagcgcagttcaaggatgtgttctcccgctgcacctgtgtcacgacgatggaagaagcgctggacgaggcgatcaagaacagcgcgccgggagatgtgatcctgctttcgccggcctgctcgagcttcgatcagttcaagaattacgaggaacgcggacgcatcttcaaggagatggtgcgtgagcggcttgcgaaaggagcgtagccaatggagaatttcatcgaaatactgaaatcggtattgtatggcatcgtagagggcatcaccgagtggctgcccatcagctccaccggacatatgatcctgctggaggaactgctgccgatgaaggtcagcgaatcattttgggaaatgttcttggtcgtgatccagctgggcgcgatcctggccgtggtcgtcctttactggaacaagatctttccgttcaactttcgaaacaagaaccgcccgtttctgcggtatgatgtctttcagctgtggttcaagatcctcgtggcctgcatcccggcagcgatcgtcggtctgttgttcgatgactggctgaacgcccatctgtataatgcggtggtcgtggccatcatgctcgtgctggtgggcatcgcgttcatcatcatcgagaaccgcaaccgcggacgccgcgcccgcgtggactcgatgcatcagctgtctttcggcgatgcgttcatcatcgggctcttccagctcatcgccgcgatcttcccgggcacttcccgttccggcgcgacgatcatcggcgggctcatgatcggcatcagccgtacggtg

SEQ ID NO: 1350 - DNA, 31838 bp, Unknown
  16S sequences of unknown bacteria
ccgccgcaggcggctgggcctgcggcccccgtcccggatttttcgcaagccctaaaaaacctgataaaaaatccgcttaccctattgcaaattataccgagatggtatattatattgccgtgataaaaagccgggaacattttccggctatactatatagataaaggaagtgtatcactgtggaaaagcgctttgtttacgccgataacgccgccaccactccggtcacgccggcagtgctggaggccatgaccccctggctgatggagaactacggcaaccccagcagcatttattccatcgggcgcgccgcccgtaccgccgtggaaaaggcccgccgccaggtggccgccgccctgaatgccgagccgggcgagatctactttacctcctgcggcaccgaggccgataactgggcgctgaagggcagcatgcgccgctgggccgccaagggcaaaaagcacctcatcaccgccgcattcgagcaccatgccattctgcacagcgccaaggcgctggaaaaggagggctttgaggtcacctacctgcccgtcaccccggagggcctggtagaccccgccgagctggaaaaggccatccgggaggataccgcgctggtttccatcatgctggcgaataacgagatcggcaccgtgcagcccattgcggagctggctgctatcgcccacgcccatggcgcctggttccataccgatgccgtccaagcggtcggccatatcccggtggatgtcaaggctctgggggtggatatgctctccctctccggccataagttccacgcgcccaagggtgtcggcgccttgtatgtcaaaaagggcatcctgcctaatatctttatggatggcggcgcgcaggaaaagggccgccgcgccggcaccgaaaaccttgcctccatcgtggggctgggcgaagccatcactgtggcgaccgccagcctggaagaaaacatggcccgcatcaccgccatgcgggatcgcctgatcgattccctgctgcagctgcccaggacccgcctaaacggcagtcaggagcaccgcctgcccggcaaccttaatatctcgttcgagggcatcgagggcgaatcgctgctgctgcggctggatatggccggcatctgcgcttcctccggctccgcctgcaccagcggctcgctggatcccagtcatgtccttatggccatcggcctcaagcacgaggtcgcccatggcagcctgcgcctttccctctcggagctcaccaccgaggaggatatcgattatatcattgcccaggtaccgcccattgtggaggggctgcgcgccatgtcccccgtctgggaaaaaatcaaggatctgtaaaggagattgcctatgtatagcgaaaaagttctggatcacttcaccaatccccgcaatgtaggggagatccccgatgccgatggcgtgggcgaggtaggcaatgcccgctgcggcgatatcatgaagatgtacctcaagatcgatggcgataccatcaccgatgtcaagttcaaaaccttcggctgcggcgccgccatcgccaccagctccatcgccaccgagatgatcaagggccgttccatcaatgaggcccttgccctttccaaccgtgccgtagtagaggcgctggatggcctccctcccgccaagctgcactgcagcgtactggcggagcaggcggtcaaggccgcgctttccgattactacacccgccagggcatcgaccctgagcccatcgtcggccatgtcaaaaaggatgtccacgagggcgaagaggcggaaggtgcctgcccctcctgcgccacctgcgaccactgagaataaagaaaatcccctcacctctatccggtggggggattttttccttttaagtcaaatccaaagggagctgaccgcaaaagttttcggtcaagcctttttcaaaaggcttgcggtctttggtcgcgctgtgcagagcgcgaaatttcctgtaccggagggcactccgcagggggatgaatttgcaaaataatccggtggatcgttttgcaaagagggggcgcccccttacttgttccttttgcaatatgtcctttcaccgagctggtgaaaattaaaaacctctccatcaaaaaagcccccttttgggggctcaattgtaaacttttcgttaaaaaaagtgaaatattaacctttggtctgcaaaaaaaggcaattttgccgtattagtggggggactttcaaaaagccttagaaccacagcaccgctatggcaaagcccgccgcgctgcacaaagcgccccacagcaggtcggtgggggtatggcgtttaagtgccaccgaagcccacgccaccagccacccgatcacaatactgggcagcagcatccaccagccaaagtagtagatgaggaacaaaagcggcccggccgcgctgcacgcgtgcccgctggcgcgcctgtgaagcacgcggttgcacagggtaaggaacagcgccgagaaaaaatacccggcacagatggtgcggatctccggcgagacccccgccagcagcgcccacaaaaaggcaatggtataccccaccccggtaaagacaaacgccagctcccgctgaccctcccggccgcggctgcggtagcgggggaacagcggctgcgccggataagccagcaccggcacaaagcccagcagcagaatggtggtgaccagttccccgaccgggcagaagggctgcggcccccagaaatacaggatgagcagcagggcggtcaccatcaccggcgggatggatatgacccggaccagaccggccagtttttccttggctgtttttgtggttttcatgcggttcctcctcccgaggggtagtgggttgcttatgggtttattatagcagaatcgctgcgaaaaagtgaggggcaaagtgacggtttcggggtaaatttttaggcaagatttttccctttaccgcagcgccaccagcggcatatccacatagatatcctgaccggtgaggttatcgtgcacggtggcggtcagctccttgcgggcattgatggaaaaggccacattcagccgcttatccagcggggtgccgggcggctccagcttggcaatgacggcggcattggcggaatttttgctgtaattgagcagccgcacggtatcgctgctgtcatccaccgcagaaaaccgtccatcggcatcaaaggagacccgtcccatccgcttgtgctcgatctccgccatcatcagctcgatcgccttttgattgcggaaggaggaggacagggtgagggtcaccggcttttcgctggggtattcgctgccggccttgaagatgatcttgtaccgcggctccttggtgagggaatccaggtagcggatggcgtaggaatgctggatgaaatcgacgatattgagccccagcgagaaggccagcgccccgtgggccaccgcctcaaacggcttgtggcactgcaccttttcccggccaaagatgccccggatgccccgctgcaccgccgggatgagggtagtgccccccaccaacagcacccgctcgatctggctgcgggaaatgccgccggcttccgccatgttgacggcgttattgaggacatcattgagggtgacaaaaaaatcgtgctcctccagaagatccagcaggtcattctgggtgtagcggaactcgtaggtcttgaaatgctcggcatcaaaaaagctgcggctgctctcgctttgagcggaaagctcctccttgatctgccgggccagggtggtaagctgtggcaggatctcctcgcactcttcggcggtgcggccggcccgcatcagcagatcctccagcagccaccggtcgatatcatcgccgccgaggaaggcgccggctttgcccagcacccggcccttggccgcttctccggccgccgccccggcaaaggattccggcatgcggaccaccgaaacatccagggtgccgccgccaaaatccaccacgcacaccaccgaaccggcccgggtagagccgtaggaaatggcggccgccaccgattcatccaccaggcggtaagggacatcggggtaattttccgcaaaaaaggcggagatccactcccggtaggtatcaaaggcattgaccggggcggtaaaggtgaccacggtatcggcgttcagctccaaattgcccagcagccgggtgagatacagccgcgcgatatggtcggcggaaaactcccggccgcggtcctcgtagagggaggtgaggtgcagaagaccccgcttgaagccccaaaaatagcggctgctgcggatatcatccagcccgcgggaggtgacctcgtagcccattaggaagctttcctccccccggtagtagaggacggatggagtgactggcggcatggcgccgctccccggcgcggtgatggccgggaagctcatggtctgcggctcctccctggcaaagttccagcgggccaccacggtattgctggtgccgaaatcgacggcgtagcgttccatcagatcacttcctttactcttgcttttacccagatctgctcccctttggcatagcccaccgtcgccacaatgaccggagtgcccggcgccagcagggcggggcaatcgtgtcgggcgctgtcgtagggggtctcctcccccaccgtaccgatgacggtaaggcccagcgcccccacaaaatcatccaccggggcaaacatcccgatcatatccctggccagcagcgcggggttctgggcaatggcccgccgggcggtgggcagggccagcagcagggggcgcatcgcctcaaagagggctctttgggcggcttccaccgcttcggtctgctcccgctggcggccggcggcttcccggtcggcttcccgacttacggcggcggcatgggcctccagctgttccttttggcgggcggcttcagccttttccagccgcagggcggcggtttcggttttcagctcccggatggttttctggctttgcagcaggtctttgaaggccataggggttctcctttgtttgagattttgcggagggcgggcgcggggcgcagccccggccgcggagcggccgacccgccggaggcgggtgacgcccctgcggggcgtcgggctgcgccccgaccggccccttgcaggatttatacttactgtataatcgttggttcctgtccggagagtgtattctgctccagggtaggctccatgtagctgtagtgggtatcgtgccgccaaatgcgaatctcctcgccggtgacggtcatgcgggtggcatcggtaaagagcctttgccaggggccccaggggcgggtgtagtactcactgctgccccgccagcggatcttatcagcaaaggcctgggcttcacagcaccacaggctgccatcccggcaaagcagggcaaaatgactgccggtcatcgccatctgggtcacacccgatgtgaccggcagcggctcgtagggggtctcgctcagcttttcgcagagggagatcagagtgccatcggcctggcgcagaacggtggcatggggcagggcaaaggcctggacgatccccatataggcatccacgctgcagctgccgtattccccatcaccgtagaccacggccgtgtggaaggtggtgaccccgacggtatgggtgggacagctggaaagctgcataatgcccacccacttggcaaagagatcgccccggcggctgcggcaggtgccatcggccagcagcaggtcgcccagcggctccaccgcggcggcatagcggatgccggcaaaatacatgagctgctgcaccgagtaaaagttctcgctgactttggaattatgggccgagaggacaaagggcgtaccagccccctgcagcccgatgaccccctcaaagtggcggaacgggtcggtatcgttttcgaggtaatcactgcggtcgccgtagaaacggacggctttcgccgcggggtccaccgtgctgtcgtacagggtctggccaaaggagcgcacccggccatcggtgaaggtgaccaccacggttttgccctcctcggcggtcagcagttgctccacctggggcaggtcgtgccgctcgaagccgtttttgccaaacagcacgaaggagaggatctccccgtgcagcaccagcaaaaagggctggaacaccgccatgcggcgcaccccggtaaactgccggaaaaactcgccctccgggccgctttggtcagaaaagagccttcccgcggcatccacggccatggcgttgctgcggcccccggcgatgctccacaaaaggcaccggcggatgttccgccagccctcggtgatgcggcgcttctccgggcggcggcgggtaccctcccagccgatagagccatcccggaagatggccatgaggtattccccctcgatgacccaatcggtcacctcggtccagtcggtgatatggtcatcagccgggggcagccccgcccgttcggtgggggtgctttcccagatgaccgagccatcccgcttttcgcccagcaggtagtagccctcctgccagatgcgccgaagccccgaccatttttcgggggcgatgctatcggtgcggcagagagccccatggctccatttaccgctgaaatgcacctgtccctcgtcatccagcccgacaaaaaccgagccgccgttctggaaagcgatgagctggcggatgtgacgccattcctccatcccctggtactgcaggaaacgggggtgcccgcaggagaggacggttcccgccccggtgagggcggcggccgcctcggaaacggcggcgatctgggtaatgtttgcccagttctttaccccggcggtgacctcctcattggtgccggcagccagcacccggcccgcggtcgtcagccccaggatgaaatcatcccccagggccagctgggtgatatgccgccactgttcggtgccctgcaccggctcgttggtatcggcccactgggcatatacgatcccggcggcggtaacggcggccgccaggccggaggactgataaagctgtgtgacatttttccaggcggaaacggcatagggctggccatagccccggcccgcggccagtacagagccatcctcgcagagggccaaggtctggtggcggccggggatgacctcccggacatttttccagtgggaaacggcgttttcaccgtgcgggctgtggccggtgtgggtaagcagggcggcttccacggtgccatcccggtacaggaagtagatgtatctttcgctgcggcggatggcccgcaccggctttttggcggcagggggcgccagttcttcagcccggcgccaaccctccacccgctgccgcagcagggagagaatggccgaaagatccaccggctggcccagtgtgacgatgctttccgccggggaaagggtatcgccctcctccggctcctccagatcgatggcgggggcgtaggaaagatcggcgggaagataggcgatgagctcctccccctccagctcaataccccggacatcctcgcagaggatatccccgctgtggtagccggagccgaacacccgcagatagccgttctgatagaggacggcgagataccggcggggcacggcggcaaagtccgctatcttctggcggaagcggttgggggcgataatatcggtgtaatccccgccgaagaaatcggccgagatggaatcgcggggctcgctgcacaaaaagcggccggtgatcttggaaagggcgacccaggtggaaacaccgtagggattgtaccggacaagggctattttttgcacgcgctcccgcgggcgctggatggatctatttttgcggtcaaagagggtgacggtgccgtttttttgcagcagataggccaccggactgcaatgccccggcagcgccgaaccgactgcttcctcgatctccccgatgccatccaatgccgaaagggcccccaccgcgcggaacatttcatcctcgcagagggcgccgaagccatcggtatcccagaaaacacgggcaacaccctgccacccggcagccggggcatattccccggcattgccgtagagcagcaggcggccataggtggtaagggcggccgccatgggcggctcatccccatcgtaatcatagatgcgcagatcggtgagggtgcggcaggcggccagctgggaaagcagccgccgccactcctccgcaaagcaggcaggccggccaaattcggtcagctccacggtgccatcggccaaaaggcgcatgtggcagaagtcattgcggtaggtgaagggatcggcgccttcggtttgggtgtagaccgggtgcagcggatcgaagccgcccgctgcgccgcccatttcctcccggctgatgagcaggacccggtcgagggaggggtcattggcgaaagatttcattggatgccatcccctgtgccgttttggtagctgtaatacagctggtcgcccgcggcggattcattggcctcctgctggctgctggccatacgggcccggccgctgcccgcccaggcaatgagcttattgatggtctcccggaagctgaccgagagcggaatggtgctgtggatggcggcgaggatatcctcggtggtgaaatcccgctgctgagagaaagcctggaacatggcgtcattgatgacctgttcaatttcggcgccggagaagcccttggtctctttggccagggcggccaggtcgtaattcttgacggcgatatcccggcggcggctgatgtgcagccggaagatctccacccgttccttttcggtgggaagattgacgaagaatatttcatcgaagcggcccttgcgcatgaattccggcggcagctgctcgatattattggctgtggcgacgatgaaaacgggggatttcttttcctgcatccatgtgatcaaactgccgaacacacgggcctgggcgccgctgtctccctgcacgccgccgatgccggcaaagcccttatcgacctcgtcgatccacaggacgcagggggccatggcctcggcgatctggatcatttcacgggtgcgggcttccgattcgccgacatagctgcccatcagccggccgacatccagccgcaggagcggcatgtgccactgctggctgatggccttggcgcagagggacttgccggtgccctggatgccgacgatgaggacgcccttgggatagggcaggccgaactgctgggcctgctccgaaaaggccatgccacgggtgatgatccagcttttcagggtatccatgccgccgatagagcccatcgtttcctcggcattgaagaattccagcacctgggttttgcgaatgacctgttttttctcctccagcaccagctggaggtcattcagcgagattttaccgctgcgggcaagcgccttggagaggattgtcttgacggtggagatggtgaggccctggaaggcgcgcacaaactgctcgaagccctccttatccatatccaccacgacattctgggtgatattggtgatgtactcccgcagctccggcagggtgggcagctggaattccagcacgctgaccgaggaggtcagctcctccgggaccttatacaccgggctgacgatgaggatgctcttctgctggggcttgagctgggcggcaaggttttttaccatgcggcagaccatattgtcctccaggaaacggtggaagtccttgaggacatagagaatgggggtatcggcgggttctttggcgatgaaatccagcacggcgatgggattgcccttgcccacggccacgccgacatcaaagccggaggcgaaatcccagctgacgacccgcatattttccagctcggcggcgcagtccttcactaccgaaaggaggcgttcctcctcccgggtggtgacatacagcacggcgcagcgggcgcggatggacagattgaattcttcacggaagttcatattttttctcctttcgggaaagggagtgtaagtgcgatgggatgtaagcggcgaggacgagggaaaatcggtaaagggcaaggcgccgccgacgcgatactcttgtccggcgaaaggcggactgatgtatcgcgagggggcaacgcagccatttgcgattttcaccggccgaagctgcagaaattacaggagggaaaggcccagcgaatgggcaagatctgtaaagccgcgcaggcattccggggggacggtatagggcggcggcagtacagcggcggtattgccctccgggacaaaatccgggaggagggacaaggggtagccatggggattattttgggccagcaggcggagggtgtcctcagtattctgccattgccccggtaggataagatgccgcagcagtacaccactttgcaaaaggccgaccgcatcatagcggttggagccatagcgggcggaaagcagggccagattggcccgggcatgggcgggataagccggaacggcggaaaggcgctggcccaaggcatcatcggcgtatttgaaatccatgatataggcctgaaaataaggcagcaggcgctcggtcagggcggccggagcatagccattgaaattattgcagagcgggacagtaaggcccagcttccttgcgatggcaatggcttcgatgacctcgtcggcggagggttccacattggcgaggctgatatgactgacgccccgctgctggagggaaagcagcagctccgccagctgacggggggtgtaagtgacaccattgcccccctgggagatgccgtaaaccagacaataggcacagcgcatatcgcagccggaaagatagacgaccccgcagccggtaccgccgctgatgcagcgttcctcccggttgcggtagaatttacccaccttcataggcggcccagcctttccagcagggggaggtagtcctcctcccagacggagcagcgcacttccccaccggcgatgtagagggtttccggttcggcggggggcagcatgtggcatagggccgggtactgctcatccggcggggtagcaagaaaacccacagggctgccggggggcggcgggacctgccccaaagccagcaggcggccatggtttgcggggatcacgacgctttcccaattggtgaccgagaggtagtagatatcccgtccggaaatggctgcagcgatcgtttccctatcatccgagggagtaaaaaagcgctggcccggcaggacggggaccatcatctccggcgtgaccattacctgcaccggcagggacaaaaagggagccagccactgcggttccatggaaccgagccacagcgcagacgccatgctgcctcccccctctcctgacgctttggcttagaagcggtttttctcctgctccttttcctccgcctggtcaaagtattcgggcttgagctcgacggaaagctccacgcccagcttttcgacggtttcctttaccagctcccggcaggccgggccgcggacgccattgacctccacggtgatcttgccatccttgccgatgaggtaagttacagtctgttccgccataggtcacacccaccttcctaccttgatgcggacggtgccatcgggcagggtttcctgctcccgcacctgaaatttgccctcctgttccacggttttgcacaggagcagcacagcgtacttttgcagcagttcatcccgggtcttttcgaaatcgccgggttcgagattggaatggagctcggcctcgccatccacaaatttgaaagccataacgcggttgacggcattgacggcgatgacatcgcaggtattgaaggtcccggcaaactcgtagttttccggaacctccgccacgcggcgcaggccgatggcccgcagggcctcccccagtacatcgatatcccggatggcgacctgtaccttggaaagatgcgacacagcggcacctcctatcatttaatactatattactcttatatcataggacaattcgattgaaaaatcaaccataaattcaggaataattcttgattttgcgaatttttcggatgagatttggcgatgcggaacaaaagcccccgccggacggcggggacaaaggattatttgaccagttcggcaaagtgcttgatgagataatcccggaagaggatggccgccggggaaaggtagctgctttcccgccaggaaagattgatgtagcggcggcagtggggggtggaaatgggtactagggcgatgtgttcatcctccatatcctgccaagtgaggatgggaatgaaagagatgccgatgccggcgcggattagctcacggacggtttccgggctgtcgctttccaggacgacattgggatcgaagccggccattttacagtaggcatcggtgatgctgcggagatttttgcccttttgcagacagatgaactcctccttggagacctgatcgagggtgagggaatcgaagtgagccagcggattggtgaccggcagcgccaggcgaatctcctcttcgataagggtagtgcaataggggccggaaaccggctggctgcccgcgaagagggtgagatcgcagctctggccactatcctctaccaggtcctcctgcaggatgtgcagacggatatcgctgtgttcttccttaaagccgcgcaccagccgcgggatgagggtggaagcggcattcatggagaaggtgacattcatgacgctgttttcccgggcatcgtcgatctcccggtggatggcctccagctccttgaggatgcggttggtgtgattgagaacaatgatgccatattcattgagctcgatgcttttgcccttgcggttgaagagcttgaccttgagctcatcctccagcatgctgatggttcggctgagagaaggctgggccacatgcagttcctgcgccgcctttgtgatatgttccagttccgctgtttttttgaagtaacgcagatgtgtgatttccatgaagatacctcgtgcaatgtgcatatagcgtgcgtgttattgatcttagtcatattatatattttacattatagaaagtcaatgctatactaaagcttaacatgggctattaggccgaattttgttgagagtgaaagtgaaaggtggttctataactatgtcctgggataatcagcgccgttccaaggcggaacgactgcaggcggccgctgcgctgtgctgcggcaaaacagtagcgaccggcgatatcgtcaagctgatggaggcggtcattcaccccggcgataaggtggtactggagggcgacaaccagaagcaggcggcgttcctggcggcttctctggcggaggtcgaccccaaggtcatccacgacctgaccatgatcattccctccatctcccgcagcgagcatctcgattatttcgagaagggcatcgccggcacggtggattttgcctttgcgggcacgcaggcccagcgcctgagcgagatgctggccgagggcaaggtgaagatcggtaactttaatacttatttggagatctatgcccgcctgtttgtggatctcatccccaatgtttgcttggtggctgccgacaaggccgacaaggacggcaacctgtttaccggctacagcaccgaggaaacccccacgctggtggaggccgccgcctgcaagagcggtattgtcattgcgcaggtgaatgagatcgtagaggacctgccccgtgtggatatccccggcggctgggtagatttcatcgtccctgccgataagccctaccccatggagcccctgttcacccgtgacccccagttcatcaaggatgccgatatcctgatgggcatgatggtcattaagggcatttacgccaagcacggcgtacagagtctcaaccatggcatcggctttaacggtgcggccatcgagctgctgctgcccacctacggcgagcagctgggcctcaagggcaagatctgccgcaactgggtcctcaatccccatcccaccctcatccccgccatcgaggcgggctgggtcgaaagcgtttgcgccttcggcggcgaagtgggtatggaaaaatacaccgaggagcgcagcgatatcttctttaccggtgcagacggcaccctgcgcagcaaccgtaccctggcacaggtggcggggctttatgccatcgattccttcctgggcgctacccttcagatggactactacggcaactcctccactgtgactgccggccgtctgagcggctttggcggtgcgcccaatatgggccacaaccccggcggacgccgtcacagcagccccgcctaccacagccttgttgaaggcaaggacaccctgcacggcggtcagaagatcgttattcagatgctgaagagcagcggcaagaagggcaataactttgtgccggagctggatgccatcgccattggccgtgacgccggtatggaggccccgcccattatggtttatggtgaggatgtgagccacaccgtgaccgagcagggcattgcctactgctacatggctgaggacgccgaggagcgcaagctgatgctggcttccatcgcccagggcactccctttggcgagatggtgaccaaggagcagatcgaggcgttccgcaaggcgggcaaggtggcctatcccgaggatttgggcattgaccgtgccatggccaccaaggacctgctggcctgcaagaacctggaggagatcgcggagtgctccggcgggctgtatgtggtgcccgaaaagttccgcaagaaagactaagcatactcctttcacgataaagcatagagaagggaaatcccccggccgggtgtggtcgggggatttttcttggattgggataaatgggcaggcggggcgcaccggagcggggagggccgcccggagcgaaacggaggtgcggcacaacaaaagcggaggggcgccccgccggtgggtcacagcagggagtggcgccattcttcggggccgggagcctgataatagtagaactcgctgagggtgggattctcaaagacgcagagcatttcgggaaaatcggaagtaaggtggcggcctttcagttcctcgcgggtcagccaaagcattttaccttccgaggaggaagtaagcgtaccagtgaagcgggtggcacggaatagcagcaccacatagcgggcaccatcctcccgtgggaactgcttgacgccacagagaatgggatcctgaatggtaaggccggtttcctcctgtacctcgcggatgaccgaagcgacgaaagattcgccgggttccacatggccaccggggaagcagatgcccggccagctgggatcggtacgatcctgcacgaggatacggttctcggtatcggtgatcatgcacagattggtcaattcacagcgctcggtagggtgtgacatagtaagagaagctcctttattaagtatagcccaaaaggcctctgacgctgacctccccgctggaaacggtgcggcgggaaccatccggcagctcaacgatgagaccggcatcgggggcaatggcaacggccagcgcctcatactggccggtgggactgatgacctccacccggcggccgatggtacagctgcggcgggtcagttccccaatcaggttttcggccggttgggaaagaatgtgctggcggaggaagaggtcatccaggcgggtgatgataccggcggcaatggcggcccggggaacggcagcacccgcttcccgcaccgagatggctttatcccgcagctcctcggggaaatcctgcggctgctgggtgacattgacgccgataccgatgaccgcgccattgatggtgccgctttcggcatcgctggtgagcttggtgaggatgccgcagaccttgcggcggtcgaggatgatatcattgggccacttgatggcaggggctagaccgtgttgctccagcacctggcagacagccaacccggcgcagctggtaagcaggctgagagcggcagggtcgaaatccgggcggagaaggtaggaaagatagaccccctgcccggccggagaggcaaagctgcggcccaggcggccgttgccgtgggtttggcgatccgccagcacaacagtgccggtgggcgcgccctccagggccagctgcatcccgcgggtattggtagaatcggtctcctcgtagcaaatgacggtctctcccctgccctgcggcaggtactgctccagcagttcctttgtcataccatccggcagggcagtaaggcggtaacccagccgggtgaccgattcgatggcatagccctgttcccgcaggcggcaggcggccttccacaccgcggtgcggctgacccccaaccggacggaaagctcctccccggagtggtactgggtacggtcctgccccaactcccgcagcagctcggcggccaaatctctttttgccatgatgaagttcctcccttttgcggacagaatgtaaactttccgttaaataacaaatttttgggctcctgctgccggtgggcagttgaaaatccccaatgaaaagtgataaaatcagtataattcaatccggacaaaaaggcaaccagaaatgagccgggagagagaaagagggcgacaggatggcatttgtggaaatgaaggatgtgtataagcgctaccgcaccggggaaatcgtgacggcggccagcgacggcatcaattttaccatagaaaagggcgaattcgccattattgtggggccctccggcgccggtaaaaccacggtgctgaacattctgggcgggatggacaccgccgatgaggggcaggtgctggtggatggaaatgacattgtgcagtacacccccaagcagctggtcggctaccggcggcatgatatcgggtttgtgttccaattctataacctggtgcaaaacctgacggcgctggaaaatgtggagctggcggcgcagatctgtcatgatcccatcccggcagcggaggccctggaggccgtggggctgggccaccggctggataactttccggcgcagctttccggcggcgagcagcagcgggtttccatcgcgcgggcgctggccaagcggcccaagctgctgctgtgcgacgagccgaccggcgccctagactacaataccggcaagcagatcctctcgcttttgcagagcgcctgccgggagggcggcatgacggtgatcgtagtgacgcacaacaccgccatcaccccaatggccgaccgagtcattacgatacgaaacagcaaggtcgccagcaatatttataatccccatcctgccgatattgccacaatagagtggtaagaaagcgggcggcggaaaatgcggggagggcaaggcaggggccgcaggcaggctgatgcccggtagagcgaagcggaggcgggcttatgcctgtcaaggcgccaacacagccatcgcccattttacggtgtccgccaggcgggaaccggcagaagccaaaaagaaaggagggcatatttatgacggaagcattccggaaagataccatgcgcaccatgcgtaaaaccatgaaccgtttttgttccattttgctcattgtggcgctgggtgttggcttctttgcgggggtgcgggccaccggtgatgacatgcgggataccgccagcgattactatatcgattacaacgctatggatgtaaaggtgctctccactttgggattcagtgaaaacgatgtggccgccgtagcggcggtggatggtgtaaagcaggtttatgccgggaaatatgtggactgcctgaccctgtgccacgataacttcttgacgagggtgttttccctgccccagaacccggatagtcccgaaaccatgaaccggctgcgggtactggaagggcagctaccacaggcggcggatgaatgtgtcattgatgagaagatacagtataagtaccactttgaattgggacagacgctttctttgggcagcgccgacccaacagatgacctggaaaatgagctggagcacaccgaatataccatcgtggggatcgtcaattccccgatgtacctggatatgaaccgccgcggcagcaccacggtgggggatggctccctggacgcctatatttacgtgccggaggagaactttaccgctaaatactacaccgaactgtatgtgactgcggagggctctggtgacctaaactgctacaccgaggaatatgacaccctagccgcggcactgaaagatgcgctggagccggtgggagaagcccgtggggaactgcggatgcaggagatggcggactatctgaatgaaaagataccggaagcacgggacaaaatagccgatgccgaagaacagctggctgatgccgagcagcagctgaccgatgccgccaacgaattggcggatgcccgcaagcagatcgaggacggggaaaaggagctggaggacggccgggccgagctggaaaagcagaaaaagcagtatgcggaatacgaaaagaaatacgaggagggcaagcagcagctggaggccgccaagctgcagatggtggccgtagatgccgccaaggcgcagctgaccgccggcaaggcgcagatcaatgcgataatggggcggatggcgaatctctcggaagggtcggtgctgctgcccatcctggcagatagcttggcccccacgctgaacgagttgaccgacgccaacggaaaaaagctgaacctgggggataagctgtacgatgccgacggcaatgtgaccccggcaacagtaaaggcgacccaaaccgcagtgaacgattatttttccaccatggaaaaacaaataaccagcgcggccagccagtacgaaagcggcaaaaaagagctggaggacagccgcaaacagctggatacctataaatccgagctggagaaagccgaaaagcagctgaatgacggcgaaaaggagctggccgaagcgcgggtgaagctggcggacggcgaaaaggaatttgaggagaaaagcgccgatgcccgccagaagatagcggacggcaagaccaagctgaaccggggcaagctgcagctggcggatgccgaaaaaatgctggaaaagctctcgccggcggagtggtacctgtatacccgcaaggaactggcactgggtgtgggcgaatttggcgatgatgccgcaagaatcgataacatttctaccattttcccagtattcttcctggcggtggcggcactggtgtgcctgaccaccatggcccgtatggtggaggagcagcgcactgagatcggcacgctgaaggcactgggctataccgaccgggagatccaaaagaaatatcttatctactcgctgagcgcgacggtactgggcagcgggctggggctcgccgtgggcttcaggctgttccccaccgtcatttacgatgcctactgcatcatgtacgacctgccgccggtggaagccccgttccattggggcgtggcggccatctgtgtggtggtagcactgggatgcgtcaccctggtgacctgcaatgtgtgccacggagttctcagtgagatgccggccaacatcatgcggcccaaggcacccccggccggacagcgggtgctgctggaaaaggtgccgtttatctggcggcggctttccttcagccataaggtcacggtgcgcaatctgttccggtataaaaagcgggtgctgatgaccatagtgggtatcgcgggctgcgctgccctggtgctgaccggctacggcctcaaggacgccatcaacgacatcgtgcagaaccagtttcagaaggtatttcgctatgatctgctagcagggtattccgccgaggatgaggcagaggagcaggcgctgtttgaccagctggaaagcgaccccgatattaaagagtggatgccgcagtaccgggcggccatcaccgcagtggatgaaaggcacagttacgaggtgaacctgaccgtgagccaggactatacccggctgaccgactttatcagcctgcaggagcgggtgagccgcagagtgctgactcccgaaaaggagggggccatcatcaccgaaaagctgggcaccatgctggggctgaaagccggagataccctgacgctgcgggacggcgataaccggacttatgagctggccattgccggagtgagcgagaactatgcctcacactttgtctatatctccgcggaatactatgaggaggtctttggcaaggcgctggaatacaataccgtgatagtggacctggtggaccgggacgactgggccgcggcaagcgaaaagctgctggcgggcggcacggtgcagatgatctccagcgatgcggagctggtggagcaatacaaaaatgtgaccgataacctgggctatgtagtggcggtgctcattgtttcggcgggacttttggcctttgtggtgcagtacaatctctccaatatcaacatcaccgagcggacaagggagatcgccaccttgaaggttctgggcttctacgatggtgaggtttccgcctacatctaccgggaaagcgtcatcctgaccatactgggcaccgggctgggcctgctgctgggcacagcgctcacccgctttgtggtggcaacagccgaggtagattccatcatgttcgggcggagcatctactggccgagctttttgatggcggcgcttatcaccttcctgttctccttcctggtgaactgggtgatgcactaccggctgaagaagatcaatatggtcgagtcaatgaaatcggtagactgaaaaacatgcagaaagggcgtcccgctgatgggacgccctgtttttcgctttgcgcttatatctcctggccgatgtggctgcggatgcgctcgatgagcatatccagcgcgacaagattgtggccaccctgcagcatgatgatatccgcccggcgcttgctgggctccacatactgctcgtgcatcggctttaccgtggtgaggtactgctccaccaccgattccagcgtgcggccgcgctcccgtacatcccgcaggatgcggcgcaggatacgctcatcggcatcggtatccacaaagattttgatatccatttcgctggccagctcctcatcggcaaagatgaggatgccctccacgatgatgaccttggtgggatgaacctcctcagtgcggtcggtgcggttatggatggaataatcgtataccgggcagtggacggtatggcctgccttaagggaacggaggtcctcgataagcagggaggtatcaaaggaatcggggtgatcgtaattgagcagccggcgcttttcaaagggcagctcatcgtggcgcttgtagtagctatcatggtgcagcacgcttacatctgcgccaaagtattcctgcagcttttcggtcacggtggtttttccgctgccggtaccgcccgctattccgatcaccatagtattcataaaatattctctcccccggttttttcttattctatcatattccgacaggcttcgcaacggctggggccggactttttgtgcgaaacggcaaaaaactctcgactgccgggggcggatatggtacaatgcgaatagagaaaaaattaaaacgcaaaggagaaattgttcatgtctacaccccataatgctgcccaaaagggccagatagcccccaatgtactgatggccggcgacccgctgcgcgcccaatttaccgccgaaaactacctggaaagccctgtatgctttaatactgtgcgcgggatgctgggctacaccggcacctaccatggcgtgcctgtttccattatgggccacggcatgggtatcccctccatcggcatttacagctatgagctgttccatttctacgatgtagagaacattatccgctttggcagcgccggcgcgctgcaccccgacctgcatctcggcgatattgtcatagccgaaggcgcctgcaccgacagcaattacatggcacagttccagctgcccggcacctatgcccccatcgcggattggaagctgctttccaccgcggccaaactggccgaggaacggagcctgaagcatatggttggcaatgttctctccagcgattgcttctattccgcccacccggagcgcaccgacctgtggcgccccatgggggtactgtgtgtggagatggagatatctgccctgtatgccaacgctgcctatgccggcaagcgcgcactgggcattctgtccatcagtgatgtcatcggtaagaacgaagaactgagccccgaggaccggcagaccaaatttaccaatatgatggagctggcactggatacggtgaccagcctatgagcggtgagcggctgaccgaccatcaaaacggcgggctggaaaagcggacctggatcctggtcgcggtgatctgcgccattctgttgggtgtttcggccatcatgtttgtccctgtaaagaaggccgtggatgaaacgctgcccgccatgatagtggaacaagaaagcgcggagatccattccaccacactgacactgcgcggcacctggggccaacagcgtatgggaaaagcggctatgaccttccagggcgtggtgggcaccgccgcgttggactataccctgtgggacggcatggatgagctggactttaccctgagcggagaaggccgggagtacggcctgttgggtgggttcttctacaaccacttttataccgaagaccacggggagggctatgggtggctgtttaccgaccatgaccgaagctgctacatcctggtgaccgggctttttgatgacgacaaggaatacaccatagcggcgccggcaagcaatgtggaggaggcgcgggccatctgcgaaaagctgggtgtctatcaggatcgttttgcccgggtaagctgataaggctctatttccaataaaataaagagcccccgaggggctctttattcttgcccattattcctgctggtcatcctcttccaggttatccagtgcatattccacacagatcacaattagcttattcagtgagatgtttttggcatcgcacaccttttccatccgatccaccagttttttgttgatacggaaagtacggttcacatattcatctcgttctattctcagcatatttatcacctcacccctattttagggggcaaagtggctacattatacactgatttattagtgtaatttacgctttacatatgctgtactttatgctatgcttatggtaatgcagtggcagcgccgccggaaccagtcgctgaggttcctcctcttattggtgggcacttccatttgcatcataaaaagccccctatgggggcttttttgtttgggtagagcttgcgacagctatcaccgcggaaggccgttctcatcaaatttttcccggagcttcttttccacgatggcaatggaaagaaacagggggatcatctgcaacacggtaataacgctgcccaccaccccaatgtggtcggtgtcctcccccataaacagcagcatggctatgacggtaagcaccagcatggtactgccccagcgtcgccacaacagaccacactcccggtgggcgtagtcccaagtttgctggttcttcatggatcggcgggtgcggtagccgacgatagaattaatggttttgaatttaccaagacgcatggaattgccggctataatcatgataatggggatcaacagagtgcagcagaacataaagatccaaaagcccatgcttacttctcctttttgcgggtttcccaataggtgcgggctgcctgctcggtcttgttatcgccatagtgataataccgggtaccaatcaggtcatccggcaggtactgctgcgccacccagtgattggggaaatcgtgcgggtagagatagttctggcccttttgctccacctcggcactatcatagtggacattttgcaggcagcgtgggaagccttgtcccctgcccttttgaatatctgccatagcggcattgatggccatgtaggaggcattggatttgggggctgtagccagcagcacagcggcctccgccagtgggatgcgggcctccggcaggcccagctgcacagcggcatccacacaggcttttactatgacaatggcctgtggataggccaggccgatgtcctccgctgcaatgaccagcagacggcggcaaggagaaagcagatccccggcctccagcaggcgacccaagtaatgcaccgcggcatcgggatcggagccgcggatggatttttgcagggcggagagaagatcgtagtgctgatcgccctcccggtcataccgcatggcactgcgctgagcggcctgtttcgcgtcctccagcgtaatgaccggccggccggtagtggccatcgcgcccagggcacagatctccagcgcattggcggcctttctcacatccccgccacagcaggcagcaatgtgagccagcgccccctcctccacctgcagctccggggactgctgccgcagcttttccatcgcactttctaggtagcgttccacctcggcggcatccaccggcttgaactcaaaaacggtgcagcggctgagaatggcattgtagacatagaaataaggattttcggtggtggaggcaatgagggtaatggagccatcctcaatgtactccagcagcgtctgctgctgctttttattgagatactggatctcatccaggtacagcaccacaccgcccatggcatcaaagccgcctaaatccgcaatgagggctttgatatccccggtggaggccgtagtgccattaagacgatagagctttttgcccgcgcccgccgcaatgatgcgggccgcggtggtttttcccaccccggaggggccgtaaaagatgagattgggtagagtaccgctttgggcaatgcggcgcagcaggccattcggccccagcaaatgctgctgaccgaccatttcatcgagggactgggggcggatgcgatccgcgaggggtgctgccatgggaggtacctccttgggatgggactgtgcagaatccgggtggggcgccgcaggcgctccggctgcgccggagccggcggccttcggccgccgaagccgcttcgcggcttgcctgcggcgcccccgtgctgaaaaccttccttctgctcctattttagcacactttgcggcatttgggaaccatataattcgaacaaattttcgtttttccgataaaaagtaccgccggtctccccaaatgggagatcagcggttaatttccttgcggtcggtgcggcccataatgtaatccatactgacaccgtaaaaatcggccagctgcatcagcgtttcggtgggcggcacccgctcgccgttttcgtatttggaaatgagcgcctgctcgatgccggtctgcatctgcacggcgatttgggataaacctttttcttttcttagctcttttaatggggccgacattctatacatcacctaatagaattaggccacaaaatcgacgggaaaatatgacagtttgccatattgctaaaaaatacaaggtttataatatatagtacaacaacggagggtggaaaacaaaatgctggactatgaaaagttaagccacggcctgtatgacgcagtatcgcaggccctgcggctgatagagcaggaacagcagcactgcgaggaagcctgcatgcaaagcggcacaccggactaccgggcgctgtattttcacctttttgcggtcaccgaagcggtgcgccaccggctgtccaaaatagaggatgaataaagcaaggcccctgtcgtgctgcaaagccgggcaggggtctttcgtatttacgcttccgggtcaaatcccacagtggtggggaggccgttccaagtggtgccatcggagcggtaatagaaccactcgctggcaccggtatcactgcgaatcatttcaatggcaaatacctggccggtttctacctcgccagggtagttattgtagggcagcacatcaccggtcagcgcggcatcggcaaagtccgcataggcattctccagccgccaaaaggtgcggctttggtactgctgcgaccacacgctggcatcctccccgcccagccaggttgcagtatagtgctggcccgctacaataatgtccatctcagtgaccgcgggcgcagggagcttggaaagatcggtgcagtgcagcttatcgccatagtaggcagccagctgcttggccatgctatccgccgtaccgccccagaaaagcgcggtaggatcggtgtgggccgcgccgtagatgcccataatatccgtcccggcaggcagtcgctccaccgccgcgataaaattttccaccatggcgttttcacggtaggtatcctgcttttcctcatcccgctcgccatagaagtgccgcccctggatcacgcaggcatcggcacgcttatattcctcgctggtcagctgaccctcggcacgcaggtatgcctcatagcgtgcgccggtcgtctcgtactgatgcccgatatcggtaccgataaaaatcgtttccgggcagtccgccttgatgctgcggtagaaatccagaaccaactcattataggaaagggagccattccaatcctcgtaaacctctaacagaatggtatcatcctccgcctgcatccacaggttaaggtactgggcggtgtaatagggcagctccacaaaaagatagcgcaccccacgggcatagcagtccttccacagggccagctccttttgcagcagatgctcattggcatggtattcaccgtacagataaatttcaccgatttcttcggggccggtcacagtagttttatcaggagcttgcggctgtggggcatcgctgccgcaggcggtcagcaccagcagcatcaccaccagcagggcggccaccatatgatacaatttgttatatttcatctttgttctccttattgtatacatcaatcaaggcttgctttccagttctgctcagccgcttgatggccgcctcccgccgcagggcagccggtttatccagggtctcctcccggtagcgcagcgtcaccggcccacggccacgggtatatttggcaccgcggccggcattgtgcgccgccagccgccgggggatgtcatcggtacagccggtatacagggtgccatcccggcactccagcacatacacccaccaactcaccgcacatccctccctccaacagataataaaaaaccgccacagtggatagcctgtggcggaatggcgcgctgtaagggattcgaacccctggccttctggtccgtagccagacgctctatccagctgagctaacagcgcatttgcctttgacagcttaattatattaccacatcaaaaagaaatagtcaattgcttttttgcgttttttgcgaaaagttttgcttttttgccaatcgcctttctccacacccttgcattttcccgcggagtatagtagaataaatggcgttacatcatatggagaggtatcgaagtggccatgacgggactgactcgaaattttggcagaagctggggatttcgtccccctgattctccttgatattcctcaacacagaaaatctcaaaatcgaatattttttgccgtctctcctgttttctctccaacgaatttttgagcaaatttctggaaagaaaaccggacgaaaatagacacggagagttgtccgagtggtcgaaggtgcagcactcgaaatttcggcggaatctgtgaatttcgtccccctgattctccttgatattcctcaacacagaaaatctcaaaatcgaatattttttgccgtctctcctgttttctctccaacgaatttttgagcaaatttctggaaagaaaaccggacgaaaatagacacggagagttgtccgagtggtcgaaggtgcagcactcgaaatcgtgtcggtcgctttccggggcgacctcgcaaacccttgatacttcgggcttcttccgcttttctacactttttcaaaactgaatatctacggtttttctacgctttgtctacgatttctacacttggttctcaatcagccggaaacccgcaaagccttgaaaatacagcatggagatgtatcgaagtggtcgtaacgaggctgactcgaaatcagttgacgggtcaaaccgtccgggggttcgaatccctccatctccgccagagcctgcagtggtgattccactgcaggtttttatttatgccagctgttcctctttctcagggcggttgaacataccgttcatggcgtttgcagaagcctcttgtgccgaatagtcgagatgtgcatagatgtctgccgtggtggagaaggtactgtgccccagccagatttggatctgcttcatggagataccgttgctgagaagcaggctggcacaggtgtggcgcaggtcgtggaagcgaaccttgcgaagcccgtacttctcgatgagccacgagaaatgctccgttacatagttcgggcgtagaagttttccacactggtcaacgcagatgtagtcgaggtagtcccggcagtaactttttttgaagagtctccggtacatctcctgcttctctttctcctccagcaggatgattcctactgctggaatcagaggtagtgttcggaagctggatttggttttcaggacatcctcgcccatcgggacgaactttccatccacctctgcttcgatgaccttgtgactgatggagatcgtcttgtgttccatgtcgatggcactccaccgcagtccgagaacttcgcttcgccgcaagccatagtaggcagcaatttttacgcacaattccagcgggtcaccagacactgcgtcgaacagggtaagcatctcttcctcgctgtagaagctaccgtggaacacattcttcttgggacggtctaccttgtcggcaggattcttgagcaggatatccttcttaaccgctgtctgaagtgcctttcggataattgcgtgataatgaatgaccgtgtttgtcgtgcagtcgtctgccagaatgctctggtagaagtcctcaatgtgctgtggggtcacttcccgcaactggagtcccagcggcgtgaagtatggccggattcttgccttgatcatgttggagtagctttggtaggtcgccgttgcgagtgaactgcgggtcgattgaagccacttttccatgtactcgataaacgggagcaaggcatcaggatgcgtgttctctgcaagctcctttgcttttgcctctcgatccagccgttctgcttcctcccgctcatactggagccggatctcatcaaatgctttctgggctttgcgtgcgctggttccctcgacgggaagccgcatgggtacccatttgcatctgcggcggccattgaccttcaggtaaagaaccgcatagtaaaaaccgtttttttgctgcaggcagcctgttatcataatgtcctcctattctataacaggtagtcgtattgcccgccattgacatcccaaacataccacaatgctttgggaatagctatactccaagtggagaaataccactcgacttttctacgcttttcggcaaacgacctcttgttttctaaacgatctgtcaattcggctcatgataaattgatgcggcacatatcctcacccatcaggtactcaattacacataccttcgggatcttgtaggctctgcctaccttgacgcatctgatctcctgttcagccaggaggcgatacgccagtcgtcgactgattccacccagcattttgcggaggtcatccacctcaacaacatcgggatatttttcaaacatagaactctttttcatggcaatgccctcctattttttgagtcgtaccttgcggcacaaatatgaggatcgtccgggggataaggagggggtgaatgcaggccgttcagaggattgaaagagagaagagaaaggatggcgggaaaaaagaggaggtggacgatccccatacttctgccgcaaagcagaagaggccgctccgtatcggggcggaactgctccttgcggagcggccttcttgctcttgcgttgctgcctgtattcgacactacttccccaggcaagggcggcggctggaaccgcgctggcgcgcgtcacgggagtttcacccctccgaggttctctcgaagctgcgtacaggagtatcattgtaagctgacggggtcatggcgaagcagcctgccaaagctgcatttgacctgggtgggtatcgctctgcaccttctattggccgtcctaatatgcggagaatgctccgcacaggtggtcctcgcgcacccggtctgacgctcgcgccgtcagcaaaggtattccagtcaccggatatgaccgcctgggcggtgtttttcaaggttcagagggatcatgaaaaagatcccctcatgtggtaggcagcgagaacgcgatttttagaaccatttttcaaaatttcttgaaatattttttgagttgttgaagttgcttaccgacagctctctgggagaggcccatttccgctgcaatctcctgctgggtcttgtcctcaatgcaatacttggtcaagagctccttctccgaaatcgaaagccttttcagcaccctcaccaaccgctggtcaccgattccctctatccagccgtaccttgacgccgtcgtgtaatcgtcccagcggctgaccgattccaaaaactttttcatcaatgcggacttgtcctcctgctcggcggaaggctcgtcaaagataccgatgcccaagtcctgcgtatgaaggcgatagatcctctcctgtttgaatacctcccaatcgaagtcatgcatcttctggatggcggcatcggacatcccggccgccctatactcacgccggagtcttgcccacagcgtttcaaacttcttcttttctgccgcataattaaagcccatatatggttcctccgtattctgaaatttggttggctgcaaatctcagaaacgggtggcgggccgcggcagcggggtcgcgcacagggtgcaaaaaagcccacagcgacaccgctgtgggcataaggatattcgagggtaacgatggcggacggaggcggggtatcctcaaaagggcgcaaaaagtcagggcatccgatgcccggccataggtgaatgaaggaaggctgccattcggcagcgacgacagtaccgcggatgtgaggataccccataaaaaccgcctgtcctggcattgagccaatgttttttcattgccgtgcaagtgaggcgcctgcggataagccgggagatcacggcagaaaaaaggagagattgcgatacagcaatctctcccgctttcgacatgatggttgttccgttagcttggacagggggtgcgtcagctcttatgaccgccgcatcgcctgcagtcgaacgcctgccggatcttttccaagggggtatcgtattccgttttggtctttttaaggcatctccggttctggagcaaggcgcacggtgaagtcctgcgctatagcaccctccggcagcagcttcgccatgaggacgagccgctgattgccggtattgtactcatcgtacttccggcagcaggtggaaagggtcagcacggtgtcctcctcgccgaaggttacaccgtcaaagtccagccagttcttctttgccacctgctcaaagaaatttgtcagctcctcacctgtggggtcgggagcgatgtaatcaaagtcaatatccgtgatgaagcaggccgtgatctggaagaccatgtcctcgcctttcaccgagaggtagatatacgggttctccttcacatagtccgcatccatataccgatggagcttcgtgagc

SEQ ID NO: 1351 - DNA, 6257 bp, Unknown
  16S sequences of unknown bacteria
ctctccgttgttagtatcattttaccatgaaatcgcttcgctcgtgtgaacattttgtgaaaaatgtcaatttattacaaattaatatacacaaagagcatccgattcttgccgctgaggtcgcgaagcacctcgatgcgggcatctggaaaatatgacgcagccagttcctgcagccgctcaccttgatcatagcccatctcaaaggccatcatggcccgatccttgaggatcagatgcgcgcgttcaaagatccggcggtaaaaatacagcccgtcttctccgccgaacagcgccacatgcggctcataatcgaccacgctgtgttccatctgctcatgctcagggatatacggcggattggagatgaggatatctacgcggaagcctcgttcgatgaatggttcgagcatatctccgatcaaaaaatccacatcggcttcattcgccgccgcattctgctcagcgacccggatcgccgcttcgctgatgtcactgcccgtgacatggatgtttttctcttccttgctcagggagatggcgatcgcgccgctgcccgtgccgatatctaccgcctctgcccgctgtccggcaaagtattcatcatacccagccaggatgttggcgaccagctcctctgtttccggacgagggatcagcacatcttcattgaccgtaaagcgatagccatagaaccattcaaatccgagcacatgtcccagcggctcgcctttttccatgcggcagatgccctgctcaaaccgttccagcagctcaccgggcacttcctcatcatactccatatacagattatgcgcatccaggctggccagttccagcatgagcagctgcgcagcctgttctccctgtcctgcctcatacaggcgctggcgcgcttgctgcaggaccttgcgataggtcggcattactgctgtcccgccagcttggcctgctgatccgcgctttgcagcgcgtcgaggatatcgtccagcttgccctccatgacacggtccagctgctggatggtgaacccgatgcgatggtccgtcacgcggttctgcggataattataggtgcggatcttctctgcgcggtcgcccgtcccgatcttggaacggcgctccatgccctgctcctcttccagcttgcgctgatgctcttcatagacacgggagcggatcgtcatcaatgccgtcgcacggttttcatgctgagagcggccatcctgacacttgaccacgatcccggtcggcttatggatgatgcgcacggcagaatcggtcttgttgatgtgctgtccgccggcaccgctcgaacgcatggtctcgatctccagatcattcatgtcgatctcgaaatcctcttcttcgatctccggcgtcaccagcacagttgccgtagacgtgtggatgcgcccctggctctcggtcttcggcacacgctgcacacggtggctgcccgactcaaatttcagccggccatacacgccgtctccgctgatcttgcaggataccagggagaatccgccggcatcgctctcatccatctcgatcgtctccacgcgccatcctctggactcggcgtatttggaatacatgcggaacagatctccggcaaagatgttgccttcgtcgccgccggccgcgccgcgcacttccagaaaagcattgtgcgaatcgttagggtctttggggatgaggagcacttccagcttttgcagcagctcttcctgcttcggctccagttcctcgatctccatcctggccatctcccgcatttccttgtcttcctcatgcagcagcgtcttcgcctcttccagcgcctctgatgttttccgatattctgtatatgtctccaccacctgagtcagctctgcctgctcacgtcccagcttcgccagctgtctgctgtctgaagcgacctcgggcatcatcatcaggtcagtgatctcatggtaacggttgaccatgccttccagccgttcgatcatcacgctcatgcttccatcctccttgctccttcaaaacaaacgaatatactataccatgttcccctttataaggaaagaattttcccggcctcagcgcgtttttccccgctccttctgcgcgatgagcgcttcgatcagcgtcatgcagccctcttgttcacagccgggcacgatcagctgtgcagcctggcggcattctgcgctgccgttttccagggtcacgccaaggccgcttcggcggatcagctgcacatcgatgccgccgtctccggcccagcatatccagcaccgcttccaccgcggcggccttgctgcagccctgcggcgtgatgtcgatgatggtgtcggtgctgcgcaccacctgatatgcgccgatcgcttcgatgcgcgaggcaagctgcgcaaagaccgcgtccagctgtgccggatcagcggaaacagagcatttccacagctcatccccgatgtgacgctgcggatggaaggtgaacagatagtctacctcgcagtttttccagtcgaggatgaagccttcgcgaaagccgctggccaccatgcctgaaggctgagcgatcgccagatcgacattcagccgcagtgcttcctcccacatgcgcaggccatcttcccgtgccatcgcatgcacgaacaatgtcttcttttcccggacatcataagccagcgtgccattctgcgcgatgacatagccgccatgctcttccatgccgatctgcaaggcaaccggcagcacgccttgaaatacgcgcgcagaggcgaggatgatcatcacgccaagctcctgcaggcggcgcaggccgttgcagacacgttcactgacccggatccctccgcccgggttcatcagcgtaccatccagatcacagatcagggtacggatctctctatcaatcttcatttgtgctcctttcataattttgctcctttcataatttgctgcggtaagtgcgcggactttcctgatagaagcggcggaagccttgttgaaatacagctggtccttcatgccgaccgcctcggcgatgtccttgatcttcagatgcgacagttccatcagcttggccgcatgatccatcttcttgcggttgatgtactgcatcaggttttctcctgtctgcttcttgaagatgcgcgaaatatggatcggcgtgcgctgcaccgtgttggcgatctgctccagcgtgatcttctcaccgagatgcgcatccacatactgcatgatgtccagcaccgtcttggaatatgtcccctgtgcacaggtgcctgcccatgcctcagcatccttcatcacctcgatgaggtcatcctgcagctgtctgacggtctctgcccgctcaaacatcagctgcgtacggcccgtcatcagcgaatgtcttccaccggtgcgcgccagcagctgctgatccatcgcatgcacgatggagcggcagtaataaacgacatccgtcggctcgatctgccgctctttcatctctgagagcatggtcacgatgagctcgcggcagtgggcgaaatccgagacctccgccagcttgaccagcgtctccttatagcggatgctcccaaagtcaagtgaacaaaactgcatctcatcccgtttcatcacacagccatccccgcagtaaaaccggtcatgatgatgtttggcatacccattgtagagatcgataaagtcctggcagccctcacaaataggggaaatgctcaaggaaacggtaagcgggagacattttctgaactgttcgctcagcgtccgggcacactcgagcgccatttcctcatcctgttttcggatgatgatcgtcccggaatgagcggtggaaaacaacaccgtaaagctgccataaacctgcatgacggaatccaccaccctgccaagctcccgtctcaggtgtctgcggtcattgaacagcccgttggcatacgtcctcttcacattgtccatccgaaagcagatcatgcggtattttccctgcagacaggaaagctcatcccgctgcagcagcggcatcagcttttccgcttcagctgattcccctttgcggatcaagcccagcagatgctccagctcatcccgccaatcttcccgccttgcctgcgcatcatggctctccctgatcatctcgaggttctcgatcagctgcgcaccgctgaacatgcctctctctagataatccatgcatccgctgcgccatgcgctgcgcaccgtctgcatatcgctgtcattggaacagacgatcacatgacaatccgggctgcacgccttcagctgtctcagcagtgagatcccatccccgctgcgcagccggatgtcggtaatgacaagatcgtgacgatgctcacagaaatgctccatcgcctgtgactcactgtcacaatatgaaatgatttcgaactgatactgttgccagggaatcatatcccgataaattgtgtacatctgtttgcgtttatccacaatcatgacactgtacatagttctgctcctttcctcatgacctcgtatatggaatattagcacatcccctgatggattgccacaaaatgcccaaaacatgtctgatattgtcaaatatcttccaaaaacaggatttttccgctgaatctccgtttcaatacagtctggaaaaatgctatactatataagggtacccgcgcgtgaggcgccgggtaaagcagccttgccatatgtcgatcttgcgccttgcgcgcataagcttccggaaagaacggcatgaacccggccggtcactcatgcctgctttctgaaagttggatccagcgtccggaatgccatccaaccttccttgacgcaatgctccatgatcggaatacggcatgaaaatggccggctggaaaggatatgtttcatcgtgttctgttggatggttcaccctgaaaccaagaggtatttatgaacgctaacccattaaagcagattattgcaaaacagaaagcaggagaagccgtcggcatctattctgcctgcagcgccaacagctatgtgatcgaagctgccatcgaatgtgcaaagcgcgacaattcctgcgtactgatcgaagcaacggcaaatcaggtcgatcagaatggaggctacacgggaatgaagccggcagacttccgcgatttcgtcttcggcatcgcgaagaaggtcggatttacgactgaccgtatcttcctgggcggagatcacctgggaccgctgaccttcgcatccaagccagaagccgaggccatggccgatgcgcgtgagctcgttcgctgctacgttgcggcagggttcaccaagatccatatcgataccagcatgaaggtcgcagacgacgatccgaatacgcgtctcagcgatgaaacgatcgcccgccgcggcgctgaactggctcgcgtctgcgaagacacttaccaggaactgctcaagagcgatcctgacgcagtgcgtccggtctacatcgtcggcagcgaagtgccgatcccaggaggcgcccaggatcccaacgccggcatgcaggtgacccgtgttgaagacttcaaggccactgtcgccgctttcgagaaagcattcaaggaggcagatctggaagagacatggaaagatgtcatcgcctgcgtcgtacagccgggcgtagaagaaaaagacgccggatgcacagaatatgaccgcgccaaggccgcagagctcatggccagcatcaaggaattcccgaacctcgtattcgaaggccactctaccgattaccagacaaaatacaagctcaaggaactcgtggaagacggcgtcggcatcctgaaggtcggcccgggcctgacttatgcgatgcgtgaagcactgttcgcgctggcctacatggaagagatgatcatgcacggcaaagaggatgaacagtcccacttcatcgacgtgctggaaaaggccatgctcgctgagccgaagaactggcagaagcactatcatggagatgaaaacgagctctggttcaagcgcaagttctccttctccgaccgcagccgttactacatgccggttcctgaagtaaacgccgctaaggaaaagatgattgccaacctgcgcaaatacggtgtttctctggctgtgctctctcagttcatgccgatccaatacacgaaggtgcgcgagggcgtgctggagaacgatccggaagtgctcatcaaggaccgcatcaagaatacgatcgacgagtatctgttcgcttctcatcaggaaaaactgttctaaatatagactcagggg

SEQ ID NO: 1352 - DNA, 17227 bp, Unknown
  16S sequences of unknown bacteria
gaagcggcagccattacggacttaccaacagaaccgccgcacgcgaagataacctctgtgccttcctggtacattgtctttgccgtagccttgttggtgtcgttttcagcgaagtcgccggtgtagtggtatgttacgtctacggaatcaagaccgagctcttcggcagcggcattgatgccctggagataaccgtaaccgaacgcctgaactgcgggaactgccataccgcccatgaatccgagctttgtaaatccgtccttaacagcagcgtagccggcaagatatccggactcttcttcagcgtacattacggaagcaacgtttgtctttgtttcgtatgtagcgtaatctgcagtgtgcggagcgccgtcaagaagaatgaacttaacgtccgggtactttgtctgtgcttcgtaaacagcaacttcaaagagataaccgggagttactactatctttgcgccgccggatacagcgagatcgattgcagcgagataacccgcgtcggacgcttcttcgggcttgtagtacttatgagtgatcttgttttcttcggcatacttctgaacgccttcccatgcgccctggttaaaggacttatcgtcgatatttcccttatctgttatgagcgcgatatcgtatgttccgctgccgcaggatgaaaatacagccgcgactgtgcaaagcattgcgattgcaagtacgattgataaaaactttttcataacaatctccattcttgtctttttttagaccttgattttcacgcgcgtgaatattgactatatctcaagttgaattttactccgcgcagacttctgagaaaacagattgtaccatcatcttgattataacattttcggttcagaatttcaacactttttattatttttttcgaaatttttaatgtgaaaatccaacattattttatgtttttcgtatgtggatattaaattaaactataaattagtgattatatgcttacttctcgttcagtcaagctccgccgccgtatcaagcgctatctccatcatcgcggtgaaggtattctgtctttcctcagccgtcgtcacttctcccgtgaggatatggtcggagactgtgcagagtgcgagagcgtgctttccgagccttgccgcgttcatgtagagtgccgccgcttccatttctatcgccatgacgcccatcttcgcccatttttcggtagcgtccgcgtcgtcgttgtagaatgtgtctgacgagaggagattgcctacatggtatcttactccgcgtctttcggcgtttcctacggcagctcttaagatatcataggaagcgataggcgcgaaggttccggggaggtggtactgggaggcatagtttgagtttgtgcaggctcccattccgaacacgatatcgcgcacgtgaatgtcctctctgattgctcctgccgagccgatacgcatgatgttttcaactccgtagaacgcaaacagctcatatgagtaaataccgatggacggcatacccattccgcttgccataactgaaacacggtgtcccttgtattctcccgtatatccgccgattccgcgaacattatttacgagaaccgctcccgtgaggaagttttcggctacgaattttgctctgagcgggtcgccgggcatgagtacggttttagcgaaatcctccggagaggctgagttatgcggtgtggggtagtttgccattgttattcctccttaaagtaaattctccgacttgactatttttactattcttgatgttccgagcctgtccgctccgagctttatgaattcctcggcgtcggctatggatgagatgcctccggcggcttttatcttaagctgcggcgcgacgtgagctttgaacagtctgatatcgtcaaacgttgctccgcctttcgagaatcccgttgaggtctttatgaagtccgcgccggattcggatacaatctcgcacatttttatcttttcttcgtcggtaagcaggcaggtctcgatgattactttaagtataatgccgctcttcacggagtcaatttccgccctaaccgactttatctcgtgcagcaccttgtcgtaaagtccgtccttgagccagccgacgtttattaccatgtcgacctcgtcagcaccgtttatgacagcgtccgccgcctcgaagcactttgaagcctcggtggagtatccgctcggaaagcctatgactgtgcatatcttcacctttccgccgacatattccgccgctctcttaacgtatgacgcgggaatgcaaacggatgctgtaccgtatttgattccgtcgtcgcagatcgcctttatctcctcccacgtcgcgtcaaccgcaagaagagtatggtcgactctttttaaaatatccctgatatccattttcgttcctcctatattttttccaccttcaagtggtttttaatcgcgtttttccagcatttgtggcacattgctacatagcagtcgtttccgccgagaagcacctgcgagccttcggtaactacatatccgtcctcgcccactctcgcgtttactacagctttagagccgcatgagcatatcgtttttatctccgttatggagtccgcaagctcgagcagtcttttgcttccggggaaggtgtgcgtctggaagtcggtcctcagtccaaagcagagcacgggtatgttttcttcgtccactatgtcgcgcagctcgtctatctgctcgggagtgaagaagttcgcctcgtccactatgataacgtcgtccctgccgtgcttgtcgaacgcttcttttatgctctcgttcggagatatcacctccgcctcagccgtaagccctattctcgagcggattatattttctccgtcccttgtgtcagccgcaggttttatcagccagaccgtcatgtttctttcttcgtaattgaattttgttataagagcctgagcggtttttgacgagcccatagctccgtatttaaaatacagctttgccaaatcagttctcctttgcggcttcccatattcttattccattgattttatcgtttatcgagccgttttcgtttgctttgaatccgtgcgctgtgagataatcctcggcttctctgaaccacacggtgagcttctctctgtagtggcagtccgaggtcacgataattctgccgccgcgctcgcgtatctcgtcaagtatgaatcccgcggggtaaggcagtgtggttaatcccctcgcgatagctcctgtgttgagttcaaacaaatcgcagtatttcatgcattcccgcacgccctctaacgccgaggcaatgtagctctccgtctcgggtattgcacaatactttgtcacaaggtcaaaatgtcctatgatatccgttctgttccgtgcgacgttgtccgcgaccttttcaaaataggctttcgcgaagtcgtctgtacttccgtaaaacagctcgtccacaagctttttttgcagctcgggagaggaatcgataggaaggctcacgccgcgtcttgccatttcgtgaacggaggaaatgatgtagtcgtagtcaaaatcgggaatttccgactccgaatcctgctccactccgaggtgaatttttatcctgtccgcatattcctccgacagagcgcgcacctttttgcgatagctcctctccccctccgccgtcatgcagcagctgctctcgaccctgttattgctgtggtctgaaaagccgagatttgtaaatcccatctctatcgcggcgtcggtcatctctcggagagtgtattttccgtcggagtatatcgaatgcgtatgaaaattatggtattgcatggttctctacttcttttctgtttctataatatcggcgataatatcggcgataatatcgcacagctcggagatatcgcggatgcttttgtcgtagtcgtcggtttttccgcgtccgttctcttccccgaagccgtattttgcgtatatgaacggtattcctgcgtatctcgcgccgacggaatcgctcaccgtatccccgacatacaccgcggagtgaagactgttgcgacttatgatatccttaatgttctcgcccttgctcttgccgcttctgccggaggattcccagtcctttataacgtcgtacattttgtgggcagtgaggaacgcttcgatatatccgtcctggcaattgcttacgatgaacaggcgcaatcccatttcgcacagcttcaggagcgtctcacggacatggggataaagccgtccgcccctctcgggaagccacttattctcaaggtcgcagcttgcgttcatcatggcaaacgctttttcatacggcaggtcgggaaaaaatactcccgcaagctcttcgttcgtcagccccatgtatttttttatcgtatggatgtcaagcggaagcttcggtttcacctcgggatgtttttttaaaacctccacccatgtttcagccgtcacctcggtagcgtcccacaaagttccgtcaaggtcgaatattacgccgtccgtcatttgagcaaaagctccctgtagttttcgtatacctcggagtattccgcttcaccgccgcgcaattcgtaaagccatctgccgcagtagttcttttcttcgagcagagagataagtctctcccagtcgttcacaccttttccggggagccagtgtctttcgtccactctgtcgtaatccgagacgtgcagcgttacgattttgtccgccactgccgcgatgtagtcctcgttctgctcggtcaggctgtggttcatgtcaaagcacactctcagccgcggtatcgagtcaaggaactgcgccatttcgacgtgagtacggcaaaggcaggttctcggcaggttctcaagcgcaagcgtcactccggattcataagcagcttcttcgattttcgcgatagtatcaaccgccgccttcattctctccgcacgctcgtcttcacggtaaggctcacccgagggatgtatcaccgcgattccgatgccgccctctccagccgcgtgaagaagctcggactgcacccgcacggcgtaatctctctttgcagggtcaagcgacgccgggtcaatctcaccgaaaggagcaaaaggcaggtgtacggaagaaatattcactccgcagcttttcgcggtttttgttatctctccggcgcggtgaacaaagtccagcttgtcgtaaaacggagccaaatcccccgacgacagctcaagctcacatattccgctgtctctaagctcacaaaaagatttctcgttcattgcaccccatccgacggacagcgcgcacttccattctctgcggtcagtcatgtttttccctcgcttatataaaaagtcgtaatatatcttaccgagattatagcatattcacgccgccaaaacaaggaataaaccgttattttaacaaaataaaaaccttgtctgagctattgacaaaacggcgaatgaggtatataatttaatggagtaataatataaaaaagctatgacggaaagagtagccgcgttgttgttttgcagagagtcggtgcatggtgaaagccgataaacgtgcgcgtgcgaaaatcactcccgagcggcaaggtgagcttttggtaaaccgtaagcaagccgagacggaatcccaccgttacaggggaacaccatgacagtgcgagtggtttatgctcattttttgtgagtttcccggactatacccgggcttttttatttttacgatgaatcctactattttatcggaggaattatgtataacaaggtgcctgcaaacatgaatttcgtagagcgcgaacatgaaacgctgaaattctggaacgacaacaaaatttttgaaaagcagcttgaaacaaacaagggtaagcgcgaatatactttctatgacggaccgccgacagctaacggtaagccgcacataggtcacgttctcacccgtgtaatcaaggatatgataccgcgctaccactggatgaagggatgcgacgtacctcgtaaagccggatgggacacgcacggtcttcccgttgaaatcgaagtcgaaaagaagctcggacttgacggaaaggatcagatagagcagtacggtcttgaacccttcatcaagcagtgcaaggaatctgtttggaagtacaagggaatgtgggaggacttctccggaacggttggcttctgggctgacatggagcatccttacgtcacatacgacaacacattcatcgaatccgaatggtgggcgctcaaagagatctggaacaagggacttctctacaagggcttcaaaatcgttccctactgccctcgctgcggcactcctctttccgcacaggaagtagctcagggatataagacggtaaaagaacgctccgccatcgtcagattcaaggtaaaggacgaggacgcgtacttcctcgcatggactaccacaccgtggactctcccttcaaacctcgcgctctgcgtaaatcccgatgagatttatgtaaaagtcaaggctgccgacggatatacctactacatggcgaaggctctgcttgacaccgttctcggaaagctgaaaacggacgacgctcccgcatatgagattctcgaagagatgaagggttccgctctcgaataccgcgaatacgaacctctctacgcctgcgccggtgaagctgccgctaaacagggaaagaaagctcactttgtaacctgcgacggctatgtaaccatgagcgacggtacaggtatagttcacatggctccggcattcggtgaagacgacgcgagagtatgccgccgttatgacctcccgttcgtgcagttcgttgactccaagggtaatctcactcccgagactccctacgccggaattttcgtaaagaaagcagacccgctggttctcgacgacctcaagaaggaaggaaagctgttcgacgctcctaagttcgagcatgaatacccgcactgctggagatgcgacaccccccttatctactacgcgcgtgagtcatggtacatcaagatgaccgcagtccgcgaaaatctcataaagaacaacaacaccgtaaactggattcccgaatccatcggcaagggaagattcggcgactggctcgagaacgtacaggactgggctatctcgcgtaaccgttactggggtacacctctcaacatctgggaatgccccgactgcggatgccgccactctatcggaagcatagccgaacttaaagagatgagcgacaactgccccgacgacattgagctgcaccgtccctacatcgacgcggtaacgataaaatgcccgaagtgcggaggagagatgcaccgtgttcccgaggttatcgactgttggttcgactcgggttcaatgccgttcgctcagcaccactatccttttgaaaacaaagaagtattcgagagacagttccccgccgacttcatcagtgaagctgttgaccagacgcgcggttggttctactccctcatggctatatccacactgctctttgacaaagctccttacagaaacgtcatagtcctcggtcacgtacaggatgaaaacggtcagaagatgtcaaaatccaagggcaacgccgtcgacccgtttgacgcactgaacacctacggagcagacgctatccgctggtatttctacaccaacagcgctccgtggctcccgtcaagattcagcggcaaggcggttctcgagggtcagagaaagttcctcggcactctctggaacacctacgcgttctacgtgctctacgccgatatcgactcgttcgatcccacaaagtatagtctcaaggactgcgcgctcaccgtaatggaccgctacattctctccgttctgaacaccaccgttgccgcagttgacaagaacctttccgaatacaagattcccgaagctgcaagagcgctttacgaatgcgtagacgagctttccaactggtacgtccgccgctgccgtgagcgttactggggtatcgacatgaccgacgacaaggttgcggcttacatgacgctctacacctgccttgtaactctctcaaagacggcagctcccatgattccgttcatggctgacgatatctaccgcaatctcgtttgctccgttgacaaaaacgcgcctatatcagtacatctctgctccttccccgaagttgacgaaactctcatcgacaaggagcttgaagacaacatgaagaaggtcgttgacattgtagttctcggtcgtgcagcaagaaacggcgccaacatcaagaaccgtcagccgctctccacgctttacgttaaagcggaaggcgctgtcggactcggctcgttctacaccgacatcatccgcgatgagcttaacgtcaaggaagtaaaggtagtcgacgatatgtccgcactttcctcctactcattcaagccgaacctcaagaccgtcggtcctaaatacggcaagctgctcggaaagatacgcaccgtgctccagaacgacgattttgacggaaacgccgctatggctgaactgaaatccaccggtgtgctgaaccttgacctcggcggagaaaacgcagctctcgaagaaggcgaccttctcatcgaagttaagcagaaggaaggcttcttcacggtaaacgataacggcgtaacggttgcgctcgacacaaccctcacagatgagcttatcgcggaaggcttcgttcgtgagcttatctcaaaggtgcagacaatgcgtaaggaagccggattcgttgtcaccgaccacatcgcggtatcagtatgcggaagcgagaaggttgagagcatagtaaaggcgtctcccgatgagcttacctccagcgtactctgcgacaagctcgtgtttgaagaaaaaattgactccgacctcgaaaaagagtgggacatcaacggcgaaaacgttactatttctgtaaagaagctgtaattctttcattaatacgcataattattaaaattttggtagttaagaggcgaacttgttgttgagaatgccattaaaaaaatttctaaagctattgatttaaatcggagtttttgatataataaaggtaagtacaaaggtgcagtcatctttggcatttccctcattcggatttgccgcatattttaatattatggagcgtataatatgatatctcgcgatgttacaatacagaacaatgtaggtctccatgcaagaccggctacattcttcattcagaaagctaactcctacaagagttctatttggatcgaaaaggacgacagaagagttaacgcgaagagccttctcggcgtgctttccctcggtatcgtaaagggaatgacaatcactctgatagcagacggttccgacgaacaggatgcactcgacggtcttgccgcacttatcgacacaggctttgccgaataatttttaagttataattaatgtaagctgagcgatggtggttttctgccctcgctcactttattatgtaggaatatgcctcaaatctcaaaaaatatcgactggcttcgggaaaaatccgcttctctcccccgcactcccggcgtctacatcatgcagaacgaaaacggacaggtcatctacgtcggcaagtcacgttcgctcagagacagggtatcacagtatttccacggcgcacatgacgaaaagaccacacagatggcggcgtcggtgcatgacttcagattcatcacctgcgacacggaaatggaagctctcgctctcgaaaacagtcttataaagcaatacacccccaaatataacatccgcctgaaggacgcaaagtcttatccgtacatcagaatcggcataaaatcattgtacccgagaataaccatgacgcgaaaaagacttcccgacggcgcactgtatttcggaccgtattcttcgacctcgacagtattcacgaccattgctcagcttgaaagaactctcggcattccgacgtgcaagaagaaattcccggaggacatcggaaaggacagaccctgcgtctactaccaaatcgggcgatgcatgggagtctgcacgggagaaatatcggcggaggaataccgtgaagccatagaccgtgcggcggagatactgcgcggaggaacacaggacgtgattcgctccctcaccgaaaaaatgatgcgcgcgtcggacgagcttgagtttgaagaggctgcaagatgccgtgacgctatcgaagctctccgaaagctcggcgaaagacaaaaggctgtcggagatcccactacggaatgcgacgttatcggtctgcacatgacgaaatacgagggcgagggcgtgcggttccgcgattgcgccacggtattctacatcagaagcgggtacatcacggacagcgagcactttgttttcggcaaggacgagataacactctccagcgacatttctgaaaacgcagacgacgacggagactcaccgctttcctcgttcgttatgtcgctgtaccagtcgcgagagtacattccggctgagattctgctctcttttgaactgccggagcacgacaggattctgctttctgactatctcaccgaaagatccggcaggagagtgacaatacggacgccgaaaaagggtgcgtcaaagtatctctgcgctatggcagtgaaggatgcggccgaccactcggctaactatgtacggcacgagtccgaccgcgaaaaaactctcgtcaaccttgcgcagatgctgtgtcttgaagtcgttccccagcgtatcgaagcttacgatatctcaaacctcggcgacgagcacataactgccggaatggtggtcgcggttgacggaaagctgaaaaaatccgaataccgcatgttcaatatccgctcgactgcgatacaggacgactacgcctcaatgaccgaagctatatcacgccggctcgcgcacatcggagaggaaaacagctcgatgagcgaatgcccggatctcatactgctcgacggcggcaagggacatgtttccgtcataaaggagcttatgcgtgaaaagggagtcgaaattcccgttttcggtatggtaaaggacgagcaccacaagacgcgcacgctcacggacgaagaaaacgagctgaacattgcgcgccaccccgatgttttccgtctcatatacgagattcaggaggaggttcaccgctacaccgtcggcagaatgacaggagcaaagagaaaaacgctcaaaacctcgtctcttgagaagatacatggcataggtccggctaagtcgaagctcctgctatcacatttcggctcgctgacggcactcaaaaacgcatcggagcacgagatagctgacgttcccggaatcagccaaacggacgcggagaacatctacaaccacttcagaggacaaactaaaacgaaaaataacggagattaatatgagaatcattacaggaagcgcgcgcggaacaaagctcgccacacttgaaggagacgctacccgaccgacgaccgaccgagtaaaggaagcgctgttttcaatgatacagttcgacattgaaggcagaaacgtactcgacctcttcggcggatgcggtcagcttgcacttgaagctctctcacgtggggcggctaaggcaacgattatcgaccagtcgcgcgacgccacaaacattattatagaaaacgcaaagaaaactcatctcttcgacagatgcagaatctctacagcagactacacctcgttcatacgcggagctgccaaaaaagagaaatacgacataatctttctcgacccgccgtacaacacgggactactccacgcctcactgaaagcactgcacgacgctgagcttttcgcaccgggagcttacattgtctgcgagaccgactgcgacattccctcaaaggcgacacgcgcacgcaaggacgaagaaatcaccgcggaatatataatgaaggacgttttcggcggaagcgagagtctgaaaaacgagtttgaagttatccgttccacactttacggacgcacgagaataactcttctcactccgaaaacaggggacgccgaatgagacgcgctgttataaccggcagctttgacccagtgacgtccggacatctcgacctgattcggcgtgcggctgacattttcgatgaggtttacgcagttatattgttcaacgcggagaaaaaaagcggtatgttctcccccgaagaccgactgaagctgcttaaatgtgctatatcggagcttggggaaaatgttcacgcggatatgttcagcgggcttacctcggactacattcattccgttggagcaaagttcattgtccgcggcgcaagaaacgcaacagactacgactacgagctgggtctctcactcataatgaagcggtttgacagcgagtttgagacgataatacttccctcttccccctcactcagtgcggtttcgtcgacttatgtacgcgagcttcttaaatacggctgtgaccttggagacgctgttcccgattcctgccgtgagcttatgctgaagctgtatcacaaataaaaattcccctgcgggtgtcgttaattcaacgatacgtctcgcaggggattcttttatttagccgatgtacttgaatatctgatccatgtagtaatatctgttccaaacatcgtcgtcatcaaagccgtacttttcgaggttatacttcttgatgatggaggcgatgagtgctttgtcaccgtatgcgccgcggatgaggtcgatatatgacattgttccgactgttgcgatagtggtttctctcttttcgccgttgtcgtcaactacagcgtttgtgaacttaataaccggaatgaaaattccttcagcgcttcttacccagcctgtgatgtacgaacggagatcgccgtcgcaataccagtcgcggtaccaatccttaacgctgatgcagtccttgtcgtatgaccagtaaccgtcgcggatggtgtattcatacggtccgacatagataagtgtttcgccgcagatttcgggatgagacttgctgtaaacataaaccacaaccgcgccgtccttttcagcggtgagcttatgagaaacctgagtgaggctgactctctttgcgccgaattttacgctgaactcgaggtcgtcgtattcttttccgtcggatgcggttactgtgaactctgtggtctcgcctacgtcaagtctccagctgtcgggaacaacgtcgagcgtaggataatccttcttgcctgccatctttctgtcaacggtaacatggagcttgaagaacgggataccgccggttgtgtaaacataaacgtcggcagttccgttttcttctgctacaagagtatcgtttctgtagtcatagtaaactacgtccgtgtcggttgagtagaagtacgcgtccttgcagaaggtcttttcctgtccctcagtcatgtagaggtcgtaggagttttccttgaagtatttctcgagggcgtccttcgcgtcggctttgctgtagtacttcgcgccgtagagtccgcagggtctgccgaaagttgtcttaatctcaaaaggatattttgaagtgttgtcttccttcttctggacaaagatgttcgagccggacttgcttgaagctgtttttaagcctgatgtagaaccgaggaacacgtgatttccagtagttttctcttctacggtttcctctatagccgatgattcttttttgagggagtcttcgttcttccagatattgcctgccgaagcaagtgttgcggtcgacggcataagcgttacagccgccaaaataaacgacagagcttttactgtttttttcataatatactccggtcctttcactgatttgttattttttctttgaaaagaaaattacacctgtacaaattaattatacaacactcttgcacgcttgtcaatgggattaattatcgtttacaaaaataattatattccgccgcctgtgaattgattccgcaaaaaaaaacaggacagcctgcgatactaaattgataccgcacagctgccctgggttttaatcagttcttaaattcgattatttgttattcggtctgggtctcggaactaccacagtgagacgaagattgaatgattctgcctgcatccacttgatgtctctgagattgagcttttcgagaattgtttcaccgcctacaaataccttctgatatccggaaatgtagttcttttcggtgattattctgattctgccttcgccgtagggatttgcgtagatgctgtcctcggaaacatttccgccgagtgtttcaaccatgtagtttatgagaacctggttgtcgagcattacgttttcctggagaacttcgcagcctttgaacattgtatatccgtcgccgccgttgaggagcatatagttatgggacgcgagagtatattcagccttcgggtcgatagctttgcctgctaccataacattcttaactcttctttctccgtcaaccataacgaattcgttcttgtcgttacggactacgtgggaaggaacggtagtgtctatctcgtatgtgagaccggaaacctggaggaatccgcctgactcgcctgtgtaaggatcagcctttgtcgacattgcgccgagctcgagagcgtcaagaatctgctgtcccgttaccttaacaaggcatgcttcgtttccgaacggatgaacgttgattatctgaccgtatgtaatgtcgccggattcgatattcgctcttacaccgccgccgtttacgaatgctatgtcagcgccgagaagcgtacgataagcgtcagcacagaagtcgccgaggttggtttcacgtgtgcggactactctctttcccgtctcggggtcgtttactatgaagttgacttcggactgtgccacaactgtttcaacaagctcgttgaactgtgctgtgataccgtcaacaaattcctgtgcggaagcgtcgtcttctgtaatctcagtattaagcttgaaggtctcgccgtccgctgttattgtcatttcgccgagagccgcgagctttgttcctgtggagctgatataaacctcttcgccgttcttgtttgtgacagcttcgttttcgatagtgctgtgtgagtgaccgtcgaggataacgtcaatgccggttgtgtttgcggcaacgtcttccgatgtccacggctttgaggattcgtctgttccgaggtgagcaaggaggataaccttgtctgctccgtcggcaattgcggcgtcaacggaggtctgaacagctgcgtaaaggtctgcaccgtcgtttccttcagcgaaagagtaaatatactcgccgtcttcgttctggaaatacttaggtgtggactttgtgaatgtctcgggagtgcatactccgacaaaagcgattttcattccgccggcttcaacgatggaatacgcgtcgagcacgggttcgcctgtttcgagacttgtgaagttgcaggagaggtatttatactgtgcttcgtctgcgatttcaaggaagttgtccattccgaaatcgaattcgtggtttccgggaatagcgaaatcatatccgatatcttccatgatggatacaatgtactttcccttggagagtgcgccgataactccgccctgaatagcatcgccgcaatctacgaggatgacagtcttgccttcggactcaagttcagccttacgctgtgcaaccgccgggtagccgagaacgccgtcagctcttacatatgcgttatgaacgtcattggtgtagagcacgacaacgtcgccttctccttcagccatgactgcgggaacgagtgtcacaagcatcatgacggcgaggagaactgaaagtaatgattttagcgtcagtttcattttttcctcctgaaatttagtttagctttaacgctaagactattataacacaaggcgtcgacattgtcactatatttcttaaaattttatttattttttgcgtgtttttttataaaattaatatatgtttacaataatataaagcgcctacagctgtaatttgcagacgctttacaattatttgactatttattcgttatcgcggttcagcagtcgagggcaacgaccttgttgcacttggaggattcaaacgcggcgtcgataactctcatgcagcggagaacctctctcggcttaacaagaagctcttccttaccgtcgagaacgtttttgatgttcttgtagatggagccccagtcggtgtcaagacccttgtcggtaacttctgtttcggcaaattcatcaatagttctgatgttttgcttgcgaatgtaccagtcgttatcgttgtatgcgggaccgtcgtgctcgctgcggtgttccttagctattgtgcgtaccgtaacggagggatcttccattctctgcatgatagcaccgccgcggtcgccttctaccacccatctcggaagagctacgggggagtatgttacgacttccatctgcgctacgagaccgccctcaaacttaatgatgagcttggagtagtcgtcgacttctgcggatgcgatagagcggattgacgcgtatacggattcaaccttcttgtcgttgttgagccagagaagctggtcgagcatatgtacgccccagtcgggaagcattccgccgccgtggtccttcatacctctccagttgaacatacagccgttgccgttcgggttcatgatacgtgactcgataacgtagggtgtgccgatagtgccgtcctcgattatcttcttgatgatgcggaagtcgcggtcaaatcttctgttctggtggatggtgaagaacttgccggtaacttcggatgtagctatcatgcgtctgacctcttccgcgttcattgcggcgggcttttcgcagataacgttgtaaccgtgctccattgcaaggcaggaatagcgcgcgtggtggttgtttgacgtagctacgagaacgaggtcaaagctatggtcagcaaggaagtcctcaacgttgtcatacgccttcatgccgagagaaaccgctctttcacgtctctcttcgcgaacatcgaatactgcaacgggagagattccgatgtcgtctcttttgacggtgttgtagtgatattcagccatgccgccaaaaccgataataccgagtttgtgttccatgataaataccttcctttttggaatttatatagtttaaaaatttatccttaggatactctgaatcaatcggatttttgcgataaaaggctgaaatataggggcttttgtcgcaaaaataa

SEQ ID NO: 1353 - DNA, 4321 bp, Unknown
  16S sequences of unknown bacteria
aaaagaattttcgaagattttcaaagcactatttaattatcaaggttcatgtttttctgttttgttgtctcactgacaactctgatagaatatcatatcttgttatattttgtcaacaacttttttaactttttttataagtttttataagctgtgatacttaacaaaacaatttatctttcagtctgtggctgctctcgcaaccagctcgattatcatagcatcagagccatcgattgtcaatacccaattttacatttatttacaaattttttattcgctctttatatgactttaagcctcattcttgtcatccaattcaaaccagaattctacaccattgtcgtagttgatcacgccatactgctgatgcatggactccatgattgcttttacaatagaaaggcctactccactgcctccatactctctggttcttgccttgtcaactttatagaatttgtcccagatacgtcccacatcttcctctggaatcggttttccggtattgaatacaccagctctcacatgtccatcttgtctctggatcgtgatcttgataattttctccccatccacatgattcaatgcattactgatatagttattaagtacctgctccatcttgaattcatttgcccaggcatagactggctcctgcacatcatacaccagcttcacatccttctgttcaaagagcacctgcatggaacgaagcatattatggatcatggaagccagatcaaaccgttccatagtcaccacttcattgccaaattccagttcattgagagtcagcagattcttcaccagcttgttcatcttacccgcttcatccatgattacatcgcaatagaactcccgactctccggatcgtcgttgatacactcctttaatccttctgcatacccttgtaccagtgcaatcggtgtcttcaattcatgtgacacattggagagaaattcttttctcatctcatctcgcttctctttctgctcaatatcccgctgcagttcgttattggctgtcttcaattctgagatagtcttctccagggtctccgataactgattcatatgatttcccagaaaaataatctcagaatctcttccgccttcaaatttcacatcaaaatccagatcactcatacgttctgatagccgtgccagttccaggatcggttcggaaatacgtttggacacccaatggatgataaatgcgccaaccagcaatacgatacttcccacatagatgagaaaacggtttgccaaagacacactttccctgatcggttctaccgctgtccggataataaaaggttctccgccgcttaacacacctgccattttcagatatccaccgtttggtgaatccctgttcacactcatcagatactgatcattctctgccagaatagatttctgattcggccgtattcccaacacatattcatacagatcccgctgtagttcctccgaatcatgaacagatgtcagccttgcccgtccattttgatccatgacaaacagactgatattatcggtctcacagattgtccgaagtccagccagaaatttttcgccgctcagattatcagccttcgaagcttcatccatatattcataagcttctttgattgccatgagtttgttctttatatagtagtcctgcaggaaaaaaatatttgccacccagcaggccgccagtgccacgatcaggactgccgagaaaataatagtcattcgggttcctatggatctcacttttttcactttatttttctgtctttgttctgtatgcatacttccatctcccgtactgaaaaaaggcaaagcaccgaggcgctttgccttttactgctgtattttattgtatcacatcacagaaaaacgtctatgattttcacaggaatttcatattccttcctatgaagaacaaaactcatgattatgaagcagttcatgttcttttcctttgaggaatccttcgtacagagacatgatcatcgggttttcatcactcttcttgatcactgccacattatctgcccgatagatgccttccgttctggctgccttggtacggtcgcctgccagtctcggctggcctccacccataatacagcctctgcggcacgccattacttcgatcagatggtaattcttctctccgctcttcacctgctccataactgctcttgcatttgccagtccactgacaacgcagatattcaggtcgattccctcataaggaatggagaactctctgataaatccaccgtcacgaacaccacactcggcaatagcttccagtgtttctttgtcatgtcctggtaccagtcggcggatcaccgcctcggttactccaccagttacgccaaagatcacacctccaccggaaccaaatccaaacggaatatcagaagactcgggctccagttctgcaaattcaataccggtcatgcggatcatatcgatcagctccgtggtagtaatcacataatctgtatcctgttctccatgtgtgaagctgttaggtctctttgcctccatcttcttagctgtacacggcatgaaagaaaccatcactgtctttttgccttccggattgtttgccggatcgcggaaccattcttttgtcactgctgacatcattccctgtggagaacggcaggtagatacatgttccttatattccgggaactgatctcccacaaatttaacccatgccggacagcaggaagtcagaagcggaagcttctcgccagttttcaggcggttcaggaactccgcagattcttccatgatagtcatatcggcactgaatgtagtatcatatacttcatcaaatccaatacggtgaaggacattgacgatcttgcccatgacactcttaccctttggcagaccaaaggcgcttcccactgccacacggacagccggtgccacctgtgcgacaactctgacatcaggatcagccaaagcttcccatactgcctctctgttgtgacggatactgattgctccggtcggacagaagatctgacactgaccacagtttacgcagtctgtcgcagcgatctctttgtcaaatgccggcataaccatagcttctgaaccacgaaatgcaaaatctaatgcgcctacaccctgcagttcgttgcagacacgaacgcaattaccacagagaatacatttattcggatctctgacgatagacggagaactgaaatccagtggcttctgttctctgtaattgctgtatcgtacagaagtcacgccaaaacggtgtgccagtgtctgcagattacattcaccactcttaacacaggtcgtacagtctctgcagtgagatgcaagcaaaagctcaatgatcagttttctgtatttttttaattttccggtattggtgtagatcaccataccgtctcttggttcttctgagcaggaagcaaaagttcttcctctgtcatcctctactgtacacagacgacaggctccaaacgtggacaattccgagtgatagcataatgttggaatatcaatacccgctttgcggataacagtcaggaggttcttctcatcggtaaattctacttttcttccatcgattgtaattgttcccatattcgtcccccctatgcttcaatatagacagcgtcaaatgcacagttatccttacatgccgaacacttgatgcacaggctcggatcaatgtggtagctctccttacgcacacctgtgatagctcccaccggacagttctttgcacactttccacagcccttacagaactctgggttgataatgaatctgcgcattgcctgacagacttttgcacgacacttgtggtcacggatatgttcctcgtactcatcgcggaaggtcttcagagtactgagcaccggcagcggcgcactcttaccaagtccgcacagagccatgctctggatcatctttgccagttcctccagacggtccagatcttccatttcgccttcatcattcacgatccgttccaggatctccagcattctcttggttccttcccgacacggaacacattttccacaggactctctctgggtaaagctcatgaagaaacgggcaacctctaccatacaggtattggtatccataactaccattccaccggatcctacgattgcatcgaatttctttacagagtcaaaatccagaggctcatccagatgtttctctgtcagacatccaccggaaggtccaccgatctgaactgctttgaactgagcaccatttttgagaccgccaccaatatcaaatatgatctggcgaagggtac

SEQ ID NO: 1354 - DNA, 14204 bp, Unknown
  16S sequences of unknown bacteria
ttgccctccttgtgtaagggagggtggtgtgagcgttcagcgaacaccgggagggttgattgaaaatctgtaaacctatgaaaaatagccaatcaaataaactgtaaaatcggctctctttgatatacttgtttaattgtatatcagcattttaaacctaacgaattgcaaggctctccggcggggctgtttacttttaatgctgtttattcgtattcgataagatataaacaggttttctgtcggcagggcaaaataaaaaatcccaagggagttgcttgggattttcggtgttattcgtcaaaatttatatttattcaataagctgataaacagctggcaaattaacctcttgcggttttaacctctgtcattgcctcgatgccgtatgttatgccgtcgccgtcaaatgtgttgtacatataaattctgtttttcaaatcatctgtcaacacaaccaacgggctgtttgcaaggttttccggcaaatagtcaacagcggctttgttaaagcaaacataagggaactgttcaataagttttgcggaaatttcaggtctgagcaagaaattcaagaacaattcagcctctgttttgtgctttgttccttttaaaattacgaatgtatccattgaaagggaaactttttcgttgttcaaagcaagccgaattttatcattttcttccatggcctgaacaatgttgccggagtacatataagcaatggcggcttcgtttcttatcatggaatcacgaacatctgccggcaaagcatatgccttaacatttgagttaagatttaaaagccattctttggccttttgaatttggtcatagtcctgtgatgtgccgtcaaagccgcaggccataagaccctggctgatattgccctgggtgtcgtcggacataagaatttcgcccttcaatttgtcgtttgtcaaatcggagtaactgtcggctttaacccccaaagaagaaagtctgtcggtgtttgcaacccagcaggcaactgtgcccatgtaaggaacggtgtatttttcatccgggtcaaattccatatttctgaaatccgggtcgatattttcgatattaggcacattgttccagtcaatttcttccacaaggccgttttcaaccattgcctgaatgtagaagtttgacggtacggctatatcgtacataccgttgttgccggccatgagctttgcaagcatttcgtcgtttgactcaaatgttgtttcaacaacttttatgccgtattcctgttcaaacagatccaaaacttcctggctcatatattccgaccagttgtaaagataaagctgttttgcgtagccgtcggctgttttttcttcctctttgcccccggagcaagctgtaaatgcacacaatgcaagagcaaagcataggataagtgaaactatttttttcattttttcctctttccgtgtgtctgtccacaccgcagtttatattttcttaaacacacattggccgccgacataggtttcggcaacttcacaggtgtataattcatttttcggtatttcaaaaggattttttgtcaaaatcgcaaaatctgcgtctttgcctttttcaaggctgcccttgcggttttcaagtcgcatttgatatgcgcccccaagggtcattgcctgcaaagcgtcctcaacagaaatacactcttttcccccaagagggggatactccgtaactcccggctcggttctgtttaccataaggtgtaaggcgtccattgaacggggagggaatgtaacagggaaatccgatgcccggcttattttaacaccggcgtcaagaagggttttcattgggtattcggcctttgccctggcttccccaagaaaaggtttttccaattcattatagtaaattgggctgtaatagtgccaataggggtttgtgcaggcgattatgttattttccgccatttttcccgcctgctctttatctgcgatttgcagatgaacaaggcagttgcggaaatctgttttgccctttaatttggccgtttctctttgggcgtactcaatggcggagattgacatatccgttgcccggtcgcctattgtgtgaatatgtgtgtccagcccggacatttccgcttttaaaattgcgtttttcataaaatcaaggctgtacataggccggccgcagttgccggggctgtcgctgtaatcatcacgcaggtatgcggtgtggcactcgataacaccgtcaacaaagagctttaaatttgtaagtgagacattttggcaattttcaaggctttttttgatatttagcatatcttcaaagcagaaggtaaaatcgtcgccgccctctacggaatagcccaaagtaattgtcataagcagtttgccccggtcgtcaaggtacttgtatcctgccgccctttcggcataatctcgcctgcaatcgtacaaaggctcaaaagccatggtaacgccgttttcaaaggcgatttgctgataacgctcaatagcttttgcataatctttgcagtcaagcttttccaaaactttggcggaaaaatccattgccgcctctttaagccagccggttgcctttccgtttggatagcggactatttcgccgtttgccgggttgggggtttcgtcggttatgccggcaagctccaatgctttggtgttaagccatcttgaatggtggtcagaggctatcataaccaccgggcgttctttttcaacccggtcaagaagccgtgcggtagggccggtgctgtcgaaaatgccgttgtcatagccggaaccccatataactttttcctgccggtgggttttgataaaatcacggattttatcttggtattcctctacgctgtgcaggttgttaagggttacgccgaagacggtttccgaagtacaggtgatgtgtgcatggccttctgcaatgcccggcattataaaaccctgttttttgataatcggggcggcaggcaaaatattttttgccccttgcaaatcacctatatataaaatttttccattttgcagagccatggcctcggcaaatttcatatctttgtttgccgtgtagatacagccctgaacaatgtattccttttccaattaaaatccccccaaaggcaacaaaaaagcaagcaggcgtttaaacactgcttgcaaaaaatcaacttgaattaaatctaccaagccgcctgacaccaatcatattattgaccgttttacaagttattgtgtttcctaaacaccggtttatagtaaccaacttacaaaatttgagcttttaactcaatcaataacgcagtttttacactgcaatcggcatttgacccggctgtccgtatggccataacccacaagggtggtcgatttatttttaacaaattgatattatcatacaatatgaaatttgtcaatatttcttagaaaattatttgttaaattattgaaaatttattaaatttatgttataaatcagttgtaagccttataaaagtaaggtttaaatatttctataaagggagattgctgtttgaaaaacaacaccttggagattgtgatgtaaccgagaggttatattacgtcaatgcctctcggaaattttggtttttattacgaattttacgggagattattatgaaaaatataaatatacgcattgaaaacacatccgattggaagaaaaccgagaacaccgtaagggagagtttttggaacctttaccgccccggctgcaccgaacattgtgttttgcacaaactgagagaaaatcgggattttattccacagctcagttttgttatggaaaaaggcggggagattataggccaaaatgtgttttttaaagcgagtttgcgcaccgatgagggaaaagaaattacggttttcaccatggggcctgtttgcgttttgtcaaaattccaaagacagggtttgggggaatatttggtaaagaaaacccttgaaaaagcaggggatttcggcgtaaatgccgtatttattgagggaaatatcgaattttaccgtcaccgggggtttgactacgccaaaaattttggcataaagtatgccggactgccggagggtgaagattcttcattttttctttgcagggagcttattccggggtttttaaaaaatattaaaggcacatatttcacaccccaccggtattttgtgaccgaccgggaagcagaggagtttgacaaggcttttccgccgaaagtgaagaaaaaattaccgggacaaatttttaacgatttataatttaacttggatattgccaccgtagcggtggcaatatttatttttaaatatgccgcttttaggctgtttcggatacggatataccgaaagagcctgcccaaaggatagaagattaaacaagtggggaaaagggcaacagaaaaatccctcccgatggagaatatacatcgggagggatttattatgccgagaaattgtcaaatgcaaattttattcgggtttcttttctgcgttttgatttatattttcttttgtatcctgtttattttctgtggcggaattccgggttttttgggcttttttgctctttgccttttttataacttttttaatgataacaatcagcaaaagggcaaccgcaactgctattgcaattataattataaatgtaaagtccggggcaggggttgttacaaccgctattgtaaccgggttggaacttgtcttaaacacaaggtaactgccgtcgatttctgtttcaagttctttaaatcccttttcacctttttcatatatcttggtgtatttatcgcctaatatgcgaactgtgtgaatttgattttgatccgggaataccaagctaagctgttgtaccaccgtttcgtcttcaagtggggagtaagtgggggtcaggtcgtttaccataagccgggcgccccggtcaaagttgccctctgcaagaataaagggtttatcttcttcgtcatcccggcggcggtattcaatggtgcgcaaaacatcaacataaaccgcctcaacggttacattttccgttgccacatggttaaattcccgccagtgggcggaagtgtcctctttgcccggaatagccggtaagtcatcatcggaaataatatccccgtattcggcgtctatttcatctattgtcttgccgtcaacggtaaagcgatatgtaaggtgggtcatagtctccggcaaatttttaattttaataaagtcttcgtatgccattgaccgggctttgccctcataacttatttcgtctattgcgccgtttacggttttggttttaaggtagcagttattttcaatttccgcatcatctgccgtgttaccggctattgcgccacggttttccccttgggaatcaatggttatcatggcatagttgtttgaaagattgttgccgtaacctacaatgccgcccacattgttattggcacgaacagttgttttcacatagcagtttgttatgtcgctgtttgcaaggcctgcgataccgccggcacagtttacatctttactgtcaacatctccgtaggagtaacagtcggtgattaaaccaacttcttcaaagccggcaatgccgcccatattttctttttttgcggccactttgccgtagtttgtgctgttgtaaataactgatttaacattcattttaacgctgagggagaatgaacccacaatgtccaaatcgtcctcagggtcaaggtcgttttcaaaggccatagcccctgcgataccgccggagtttatatccgagaaaatttcaccgtagtttgtgcagttcataatcttgccggattcctctgttttaaccgacagcttgctgtcatcggtgataatgtcatcttttgaaattgacatttccgataaatccgcaacggtgtttgaaaggtctgtaacccggctgtttaatgcgttggcgtttttgacctgagtatctgcctgccgggaagttttgctccttatgctgtcaaaagaggagataattgattttaaatttgccgtcaaagcgtcggaaagggcgttaattctgtcatttgaacttatttctatcgaccgtgtttcgccgccaaagctgaaatccgggtcaagaggtgagtttgggtctatgggcagagtttgagagccgaatgcctcgttcaaaatatcattgatattatctatggcactgttggctgcggaatggatattgtcgtagtcggcttttattgaatcggaatagctgtctgcactgtttattgcgccttcaacggttttgttaatggtttcaatctgtctgcggattttctttaaatagtcctcggagtagataatgtgggagaaaggctccatctgccccacaatgccgccggcttcttttcttgcctttatatccccgtagttagtgcagtcgataacaagaccggaggaagaacctgcgataccgccgatattatagccgatgtgaatgtagcctatatcgtgggtgttttgacatgagcgaataaccccggtgtttctgcctgcgatgccccctatatcggtggtgctgccggcggcactgcttatattgcctatgtcgcttacggttatgtcggaaaggtttacttcattttcgtcggctgtggtgtttgtaagtgcgtttgcggtgcaggcccgaattatacctgcgtttgtgccggcaatgcccccggcgcagttgccgccgcttacccggccgcttacgctgcagccgttgattgtaccgttttcggtatttataccggcaataaggcctatattgcttgtgcctgtaaccccacctttaaatgaacagtcggttattttgccgtcgtttttgccggcaaaaccgccggcgtaatcgccgctgccggtgggctccacatagccctctaagttaaggtttgtaacttccccatctttggcaagatacctgaaaaaccctgagtaagagccgttgtagtgtataaaaagcccctttattgtgtgaccccggccgtagaacttgccgccgaaaatcggcacgccgtcaaagtccatgtgggataaatcaatgtccttgtcaagatacacctttaaattttcggaataggaatcaaggtgacaattttccgcaaattctttcagttcctcccgggtggaaatgtgaatttcccttgcctgtgttgttttggcattttgtgtcggggcggcaaaagccgttagggttgccaaaataacggtgaaaaccgtaagcaaaaaataagataatttagttttcttcatcttttttgtcctcccctttggccgaatttttgttttcctttttagtttcatcggcgggtttttcgtcgggtttttcggcgccgtcacctaaaagttcgggtttttcttcacctgtggttgacatcaaagcattgagctgacctgtgagaacgccgtttacatctgcatcaattacgccgtttacatagccacggacacgaccctgaatgtaaaccgtaccttttgtctgccggcggttgagttttgaaagacccttcatttcaaagctggtgcgctctatgatagaatcccctaagagcaaaatctggggcaaaacccctaaaaccaaaacaatggaaattattgtgcctctgcccagacaagtgccgattgcggcgataaccgggtttgttgtaagaacggaaataagcaccccggccaccgcaagaattgtaccggaagtaaaaattgtagggaatgaaacattcaaagtttcaatcatagcgtcttttttgtccaatgtctgtttaagctcggtatagtgggaagaaacaacaatggcgtagtcgatatttgcacccatttgaattgagtttactataaggtaacccaaaaagtacaaaggtgtgtttgcaaggtacgggaatgagaagttaatccaaatactgccctgaataacaatgataagcagtacaggcaagcctgcagattggaatgtaaacaaaagaatgatgataacaaacagtgcggacagaaccgaaattataaggttatcttccgcaaaggaagaacccaggtcaacggcggaagtggagttacctactatgtagaaattgtcggtgtaatatttgcctacgatttcgtgcatttttgtaaggaaccgggcggtttcccggctttcctcaggcagtgtcaggtagacaaccatacggctgtaatctgtggattgtagctgtaactgggctttttcaagctggtcaaacaaatcgtccaaagttttttgtgtatcgttgcccaagtcgatattgccgtccttcattctgtcctttacaaacataaacatatcgtaaaggggaactttgtaagagcctacgccgtttaaaagccggccgtactggctgttttcgttggcgtatgctgtgtacaaaaggcagacaacttcatagtccatatcaaccatttcactgaactgccttggggtcaactcacttgtcaaaacataatcgtccattgcttcaacattggaaagcccttttgaggaagaaacctccgggtatttgtccaattcttttaaaatttcaccctcggatgtgtaatcgccggcgggaactataatggcaaccatattttcggtgccgtatgtcttttttattttttgataggcaatttgggattccgactgcttaaccgttgtcaaatcggtgtaagagtaccggtaagggcatttgtttgaaaaataccggccgaatgcgataaccgcaaagaagatgaaaggcacgattttatatgttttaacatcgaacttgcctattgcggtgattttaggaacaaggtctttatgtacggttttgtctatccggttgctgaacagaataagcaagcccggcataagtgtgaaaaccgacaaaagggaaagcattatggctttaaccaaaacaaccgccatatctcggcctattaaaaagtgcatgaaagccagggcaaccaaaccggcgatagttgtaagggaagatgaggaaatttccggtatggcctttgaaagagcgtcaatacaagcctctctcggggcttttgtcacatgttccgcacggtagcggtggcataggataattgcgtagtcaatggccaaagccaactgcaaaacaaccgtaaccgagttggaaataaatgaaattttaccgcataaaaagtttgtgcccatatttaaaagggcggcggcgccaaaagttaaaatcaaaacaggaacttctgcgtagctgtggctggttatcgtcaaaacaaccactataaccacggcggctatggccacaataacaagcatttcgcttgcaagctgtgccgaagaatcttccccaaccgatgaggatacatagctgtcatagggggctaaaagttcttttacctcattcatggcgtttacggaaatatcgtctgcttcctccccgtcaaaagttatgttaaacagggcggaggaatcgtggtaatgttcctcggtgttttcaaactccacagatgttaccccgtcaaccgcctctattttgtctttaaggcggcaggcattgtcataagtgatgtttgaaaccattattctgcctgagccgtaggttacaaaattggaattcataacatcaagaccctgtcttgtttcggtgctttccggcaggtatgtggtaatgtcgttttccacctgaacccaatttcggctgaaaaagcagaaaacaaaggcaaaaatatacaaaaggaaaaataaattcctcttgtcaacaatgaaagtggcaagggcttttacgccgccgcctttttctttcacctgttcttcgtcatacatacaataaactcctctcgttttacccggtaatcgcctaatatagtatacatattataacaaggcaatctgtgatacatcattataccacagtgaaaggaatttttaatatacaaaattgaaaatttgtcaaaaaatctgtgattattctatgatagatttttgacagttgtgtaaattttgcctttgccgattttatatgcaatatctttgtttaattgacaaaataattgccgaatggtaaagtatttcaatacacaataatttatggagaaactgtatgaaattaacaaaagaaaaaatgctacttatcagctttatgctgttttccctgttttttggggcggggaatttaatatttccgccctttttagggcagaatgcaggaaataaaaccccccttgccatgttgggctttttgctgacggcggttgttttgccggtgcttggggttatagttgtggcgcagtttgacggcttggacaagctggccgccaatgccggcaaaaaatttgccttggtttttacacttttaatctatctttcaataggccccggccttggcataccccgtgccgcctctgtcccttttgaaatggcggttgcgccgtatcttccacagggggcaaacacaaggttgtgcatggttatctactcactggtgttttttgttatcgccttttggctgtgccttaatccgggtaagctggttgagcgcataggccactttttaacaccgtcactgctcacccttttgcgggttttgtttttcacatttttatttaagggcaatgtggacattgcccggccacaggcggcatacgcaggcgccccctttttaaagggcttttccgaggggtaccaaactatggataccattgccgcgttaaacttcggcttggttattgccataactctgcgctcattcggcataaataatgaaaaggacttaataaagcacaccgtttatgcgggactgtttgccggcagtattcttgccatggtatatatgatgctctcttatatgggtatgtgcagttcaaatgtgtacacaattcaggacaacggcgcatggacattgcgcaacattgtctatcagctttacggccctgtgggtgcttatctgctggcggctatattttcccttgcctgtttgactacctgtgtggggcttataaactctatttctcaatatttttctgtcctttttaaaaagataagttaccgcaaatgggtatttatcatagttttgttttcatttttaatttgcaatttggggttaaacgccattctcggcatttcaattcccatacttaacgcaatttaccctgttgccattgttttgattattttgggcttgacccaccgctttaacacagggaataaatttgcataccccatggtaattgcaggcacaagcattgtaagcgttatttacgcattggacgaaacaggcttttctgttggatttatcaccgatatatgcaagaaattgcccctgtactccatgggcttctgctgggtttgcgtggctgcggttatgtatgtaatcagcctgttggcgtttaaggtgaaaaacaaaaattgatttatattaaatccgcctcacaggtgaatttagtaaaatttgaaaggaatttttaatttgagtatattaacggtagaaaatttatcccacggtttcggcgacagagccgtgtttgaaaatgtgtcttttcgccttttaaaaggggaacacataggccttgtaggtgccaacggagagggcaaatccacttttatgaatataatcaccgggaaattgaccccggacgagggcaaaatagagtgggcaaaaaatgtaaaggtgggctatcttgaccagcatgcggttttaaaacccggaatgacaatacgagatgcccttacatctgcttttgacgacctttacgccatggaggaaagggcaaaccggctttattctcttatgacggactgcaccgagggggaaatggccgaatacatggaggaggcaggcacgatacaggatttgcttatggctcatgatttctatatgaccgacgccaaggtggaggaggttgccgccgcactgggcttgggagaaatcggccttgaaagagatgttacacggctttccggtggacagagaacaaaggttttaatggcgaagctcctgctggaaaaaccggatattctccttttggacgagcctaccaactaccttgacaaggaacatatagattggcttgtgcgatatttaaatgattatgaaaaagcctttattttgatttctcacgacataccttttttaaattcggttgtaaatcttatctggcatatggataatttacagcttacaaggtatgtgggggattatgataactttacagccctttatcggcaaaagcaggcccggttggaatccgcctacaacaggcaacagcaggaaattgcccggcttaaagattttgttgcaaggaacaaggcgagagtatccacaagaaatatggctatgtcaaggcagaaaaaattggacaatatggatattattcagcttaaagaggaaaagcccaagccggagtttaattttaaatattcaaaggcaccatctaaatttgtatttacctgtaaagatttggttatcggctaccaggagcccctttcacagcccttaaacttggagatgataagaggagagaaaattgcccttatcggagcaaacggcataggcaaaaccacccttttgaaaagccttttggggcttataaagccctatggaggacaggcggtaatgggcgactatacggatataggatattttgaacaggagagcgccggggacaataacaacagctgtatagacgagctttggaacgagtttccctcctttactcaatttgaaatccgtgccgcccttgccaagtgcggcttgggggcaaaccatattgaaagtaagatcagggtgctttccggcggcgagcaggcaaaagttcgcctttgcaaacttgtgaaccgcccctgtaatgttcttgttttggacgagcctactaaccaccttgacccggtggcaaaagatgaattgaaaaaagcccttaaagaatttaagggcagtgtgcttatggtatgccatgagccggaattttatgaggactgggtaagcgatgtttgggatttgtcgaaattcaccacaaaaatcgtttaatttaagccggactttctataatctttctatgttaatgttataatataataaataaagaaaaatctctgtcatttcctttgtgaaaccgcaaaatttgcggcacacataaagggtgacagagatatattttatttaacaggtgtttggggaattgccggttgactttggttttgaggggcttcttctttatccttggcctccggcttatggttttccagtttgttgcggacttcctgcattctcaaatccataaggctgattatttctgcgcagtttaccaattcatgggaaagttcctcctccaagtccgccggcagggtctttttatagcgtaatttatgctctaagctccgccaaaagtccattgccattgtgcgaatttgaacttcaaccttcatatttttcttttcgctccgcaaaaatataggtatttccactattaaatgcagtgaacggtatccgctgggcttcgggtttttaatgtagtctttgcgctcgattagcttaacatcgtcctgcattaaaaagtattcctctaatttgtaaacatcttcggggaatgagcaaataaccctgacgccggcaatatcggtgatatgttcttccagtgaggacaaagttaatgggatattttgctttttggctttcctgaaaagactgtctattgattttattcttgactttatgctctcgatagggttgcggtcgtactgaatggaaagttgctcgtttaaaacattaaattttgtttcgacttccatggctgcgcagcgataacaggcaataagggtttcaaagggctctcgctgcatttgcaccatatctaaaattttgtcacttaataagttgcctgcgatgcgagatattttttctgatcttgttaaatcgtctatattcattataaattttcctgtcattattttaatttaactatatgataccaaaatattttgcataatttgtgacaaaacaaaataaagcactttttgcggcaaacagccaaaaaagagcgataaatcgataaaaattgaaagaaaaaggcgaaaaaggttgcaaaaagcccaaaaaatgatgaaaaagctgtaaaaaaagtagaaaaaaggtaaaagctgcgaaaaacagttgacaatctaaggtgaatgagctataataacaaagctgtcagcgagagaggctgacgcaggaccttgaaaattgaacaataataaga

SEQ ID NO: 1355 - DNA, 8416 bp, Unknown
  16S sequences of unknown bacteria
tattcgcgcgaatacgcgcctgaaatatgagctcgacgcgaagcccatcctcgcgctgacctcctctaccgggacttccggctcgtcgatcagtatcctgcccgcggcggaaatcgcgacgcggttcttgtactcgattggcgtgagtccggtcgcgcggcggaacctcgcgtaaaagtgcgattcggaaagaccgcatagcgacgcgagcagaggaacctgcaatggctccgcgcagtggacgcgtatatagtcgagcgcaggctcaatctcccggtcgagcgtggacgcgatctttttctcgagacacgggtgcagggccgcgagtatccggaaaaagcgcgacattatctcaaaacgccgctgaacattgtggtcatcgttcaggaaaatctcatgtatgacagtgaactcgcgctcagggtcgagagaaggatttcccgacgccgcgatgagcttctcgcacggtatcgcctcgacatatgttctctgcgagttgaatgtgccggacggtatctcaaagtgtatcgaataatggtgcgacgctccggcgtatgtccacgacgagtcgtatgtcgagccgcgcgggacgtagaatatcattccgtcatcgagctgtgtgacgcgcgtttcggtgccggtcgcgttcaggtattcggtcagtgctgcatgaccttttttgatatatccgacgccggcgtagggacgcgggagatatctgaagtcgtttatcgtgccgtacggagtcacgcacatatccgatctgaaataagtgagcgagtatcgttcgagctccatttgcttcacctcgtttcgttcatattttcattataacattttttaccccggttgtcaacagaaaacgccgatgtaaaggcaaaataaaattattgtcagagaatagttgcgtttttccgtaatatcatgtcttttattttacgatgacgtatggtataatgttaatgtaaatccggcgggatacgccgaaacagaaaaggactattacaatggcaaagaccgtacttataaccggcggagcgtccggaatgggactgctcgcgggacagctctacgcgaaggagggctataacgtcgccctcgtcgacataaacaaggaagcgctcgacaagtgtgttgccgagatcgccgcttatccggcgaacgtcatcggcatcgctatcgatatccgcgactacaagaaggtcgaagaagcgcgcgataagaccgtcgaggcgttcggctcgatcgacatcctgatcaatttcgcgggcggcgcggagacccgcatctgcggcgcgagcggcgctttcttcgatatcccgattgaggtctacgatttcggcatcgacgtgaacctcaagggcgcgatctacttcgatcacgcggtcatggcacagatggcgaagcagaagtccggcgtcatcgttcacctcggctcgatcaccggcgaggagggctgcgggtgcaatatcgcttactcggcgtcgaagtcggcgctgatgaacggcgtcacgaagtcaatcgctctggcgggcgcgccgtacaatatccgctcgttctgcgtggctcccggaccggttctcacgagacccggcatggcgggcatgaagacccttgagggcagggcggctgaaccgaaggagatcgtcgatcttatcatgtacctcgcgagcgacaagggttctttcgtcaacggagtgtacatcctcgcggacggcggtcggaacatcatgagaaacaagggctgaggcatgaaaagaaaaccaacctttcttaaccagaacaagccgctcatcacctgtatgatacaggctgacaacccgaccgacgcgatacatacgatccgcgaggcgcagttcgagggcgcggacgcctacggcttccagatggaggttctgaaaaaggagttccgcaccgaggagcaggtgaagggcatcttccgtgagatgggcgggaagccgatctacgtcacgaactaccgcaacaatcagaatcagggcgacagcgacgatgagtgtgtcaaagggcttgagttcctgataaagtgcggtgcgacgctcgcggacgtgatgggggatttcttcgctcccgacccgcttcagataacctatgacgcggcggctgtcgaaaagcagaaggacactataaaacgtctccacgacatgggcgccgaggtgcttatgtcatctcatacgttcaagttcatgaagaccgacgaggtgctgaggatcgtgacggcacagcaggagcgcggcgctgacgtcgcgaagatcgtcaccgcggcgaacagcgaggaggaagagcttgagaacctccgtaccgccgaaaaactgaaatatgagcttgacatcccgtacctcttcctggcgggcggatctcacaacaagctgctgagacagctcggtccgttcctcggcgaggtcatgtggctgaccgtgcagtcgtatgacagatacgcgacaacggtacagccgaagctttcggcgatcagaagcatcgccgatcatttcgacacctattgatctgttgaatcaaaaaagagcccctgaaacctgaatattccggcaaaaaaacagcgaatgaaagggctcttgtattatgaaaggaagttctacaaatgaagaaatttattgcgctttcccttttgctttcacttatcctcggcacgtcctgcggttcaggcggatctacgacggatgagacgacaactaatactgatatatcgtccgggggggtaaccacctctgagccggagatagattacccgaagtatgacattgaccttggcggtgaggatttcaatatcctgttcttcgacgcggtgaaggcgtgcggatggtcgagcgacattccgtgtgacgtcgacgtggcggagcagaccggagacgtgctctctgacgccgtttacacgagaaaccgcaagatcgaggatatgtacaacctcaagatcaaggcttacgacagcggagacgacgcgtgggcgtgctatacggtgctcgagaaatcggtaatgtccggttccggcgagtatgacgcggcgttctgcaagcagcagggctttgagcaggcggcgggaaacgggtatgtcacgcagcttgatgatctgcttgacttcgacaagccctggtgggacagcaagtcgctcgagggcttcagcgtgctcggaaagaccctggcggtctccggagacgtcaccttcatggacaagctgagctatatcgtcatttacttcaacaagcctatggcggatgattacaacctcggagacatatatcagatggtcattgacaagcagtggacgttcgataagatgctctcgatgtgcgggcttgtctccgccgacctcaatgaggacgggaagatggacaaggaggatcgtttcggctttgccggtcagaacgacgccggttacgagttctaccagtccgcgggcgagagattctgcacgcttgacaaggacggggttccgtatatgtcgaatgactctgagcgcgcgattcagatttttaccaacatctacacgttcatgaacgacaagacgaacttcttcaaccgctcgaaggcgaatatcacggtcgcggatgccatcgagatgttccgctcgaaccgcgtgctgttcatgatgcgcccgctccagactataatggagcttcgcgctatggacgccgatttcggtataataccgacgccgatgatggattcgacgcagaaagagtactatacctcgatcggcttcacggtcgcgaacgcagtgatgatcccggcggacgtgaaggatccggctgtctcggcgcaggtgcttgacactctctcggcggagtcgtattacaacctgaacagtgtgctgtatgacatggttctcggaacgaagtacacccgcgacgacagctcgtcgcagaacctcgatatcatcatgaacaatgtcgtgtatgacccgggctgcatctacggcttcggaggaatggcggcggcgttcaacaatgtgctgaagccggatacaataacatcgacgatagcgggcttcaaggacaaagtccaggcgggtatcgacaaatacatagaaactataagctgacaggaaggcatccggaatcccgggtgccttttcgcttcaggatcttccgcggtgccggtcgaaaccgctgctgtcatacgactgcttcgacggcgggtagccgaatgctttcttgaacgcggtcgcgaagttcttcgggtcggagaagccggtcttctcggcgactgtcgtgaccggatagcaggcggcgttgaggagactccgcgcgtgctcgaggcggaggtcgttcatgaactttttcgggctcgtcccggtttcggcgcggaagcgctcgcgaaaggtcgtctcgctgacgtgcgatatgtcggcaaggcggctgacgctcagcgactgatcggcgtagttgtgcgatatgtaatctatcgcgtccgaaatcatccgtgagtactcgggttttccgttgtcgagccccgcgcgcacctcagcgaagatacggtagagtatcgacgccgtcgaatagcggtaaccggggcgtttctcggtccaggttctgaacgcctcctcgaagagcccgccgatatcgtctcccacactatgcatgacctcgaggtcgtaggacatatagttcggaattccgaggtggaagactatcatccggtcgtgcgcggcgctcctgaagtatgacaggtcgggagggaagaacgcgaggtctccgcccgccatcctgatcggttcgtctcttcgccgagaggttacgcttatctcggcgtcgctctcatagcggtaggacagcgcgctgtagccgcgcatcctgttcatgttcgcggcgttcgtttcgttgaaataaagaacatcgagcaggttcagctcgaggtcgtcctgcatgaatatcataatggttcctcaccttcatgttcatttgcgtgacataccgcctgtgatgggcggagatgttttggtgaaatagcccggaagggcttttctatattataccacatctgcctttgaaaatcaaaccttttgcgttgaaaatatggttttttatttttggaatgtgtgatataatggtttcagaccatcagtacggttgatggaatatgtaaaacctgaaaaggagacagaaaaatggcaagaagagataccgcgctccggtacttcaacgagcagaaggacattatggacctcaaggtaaagtccggaatcgagctcaaccgcaagggcagcgcgcacataaacataaagggcgagaacctccccgagaacataaccgtcgaggtcgagcagaagaaccacgagttcaagttcggcgcgaacatattcatgctcgacgagttcgagtgcgaggagaagaacaggatctaccgcgagaagtttgccgagctgttcaatctcgcgactgtgccgttctactggagcgaccttgagccggaggagggcaagccgagattcgcgaaggattcgccgaagatctaccgccgccccgcgcccgatctctgtgtcgagtactgcaaggagaagggcatcgagccgaagtgccactgcctgaactatgacgcgtggctcccgaactggctgaacaacgcgacgatcgaggagcacaaggcgaagctcgagaagcgtttccgcgagatcgctgagcgctacgcgaaggatctgccgtcgtttgaggtcacgaacgagactctccagaactgccgctcgaagttcttctatgaggacgatttccttgagtggagctaccgcatggcggatcgttatttcccgaataaccgcctgatcatcaacgattacaatatctggtggccgaacagctacaataaccgcaacgcttacttcatgcagatcgagaggcttctgaaaaacggcatcacgcacctcgactcgatcggtatgcagttccacagcttcttcccgctggcgaacgagccaaacgcggcgaaggagcgctacaacccggattcgctctaccgcctgatggatctctacgcgcgcttcggactcgctgagcagatcaccgagatgaccattccggcgtacggcgacgacgcggaaaacgaggagattcaggcagagctcctgaagaacgtctactcgatcttcttctctcacccggcgatggaagcggtcatctactggaaccttgtcgacggatacgcggcgttcgctccgcagggcgacatgaagtgcggcgagaacatctattacggcggtctcatgcacttcgacatgaccgagaagccctcttataagatgctgaagaagctcatccacgaggactggcacacgagcgaaacggtcagcgcgaagaacggcgctgtcgacttccgcggcttctacggcgattacaagctcaccgttcacgctggcgacaagaccattccggttgatttcagactctcgaagagagctaagaacgacatcacgatcactctttaataaatgaaaacgcggctgtctcacgtgtgtgcggcagccgctttgtgtgaggatatgatatggcaggttttattcctacagagaagcagcttgagttcatggactgggagttcgggatgttcttccatttcggcatacggagcttttatcccggacacgacgactgggacggactgccgatgccggcgtcggcgttcaacccggcgcgtctcgactgcggcagctgggtcagggcggcgaagaacgccggcgcgaagtactgcatcttcgtgacgaagcaccacgacggtttcgcgaactggccgagtaaatattcggattattctgtggcgcagagtccgtggaagggcggaaagggcgacgtcgtgaaggagttcaccgacgcctgccgcagatacaatatgaaggtcggtctgtactactcgcccgcgcagtggggcgggacggtcaggttcgatcacccggaggagtacgacgactacttcgagaatcaggtgagcgagcttctgacgaactacgggacgattgactatctctggttcgacggctgcggctcggagaaccatcagtacgacatgaagcgtataatcggtacgatacgccgtctccagcccggcatacgcctgatcggaaagtgggacccggacacgagatggataggcaacgaggacggctacgcggactcgccgaacagaaacacggtcgaacgggtcgagttctcggtcttcgcgaaggacggagatacactcggaactacgcgctggcttccggcggagtgcgatatgcgtatgcgcacctacgcttggttcgactgtatgtcgaacgaggacacggtgagaccgctgagcgagcttgtcggtatatacgagtactcggtcggacggggcgcgaacctgcttctgaacatcggaccggattctgacgggagactgccgaaggaggacgcggaccggctggcggagctcggcgcggagatacgccgccgttacgggacgccgctgccgttcggtgagccggagaagctgaaagagaacagctggcgtatccgcacagcggagggaatgactgtcagaaacccgtgggaggtcggatgtgagcacgtcggcgcggtcatcatcgaggaagacatcagggaaggggagcacgcggagagctttcgcgtctatgcgagccttcccgggaacagcgaccgcgagatctgtgtgttcatcggcgatactatagggcacaagcgcatctgccgtttcccgacgatcaagaccggcgcgctgaggcttgaggtcacggattcggacgggaagttcaggctgagagcgttcagggcttacggggagtgaaatattcatacggaaaaaccgcgcggaacggcatatcttcaggatataccgccgcgcgggcttttcaggatacaccgaacagatcgggggttcgcggaaaaatgcctgaatttgtgttttcttcgcgagaacaaccttgaatcagtgtatctttatttctttgtcctttcggctctctctttgacgcgcttctttatattcggttcggctgtcactgaccgttccgagaacagcccgtcgtcgagatcctcggtcgcctcgagctcgtgacctatcagcgcgtaggtcgcgtcggacaggtgcgagaacatcgggtcgtccattgccgggcagatgaaggactggcgcggagagtttatgtcctctccgcttatctcgaaaaagccgttctcgtcgcagagccgcatcagccgctcaagctgcgctttcgtattgcgggtcggcatataggtcacggcgttgaatccgagccgcttcagttcggagaagagcaggtcgagataatcatcctcgaatttctgcgccttcttgtcgcccgtcaccgaatccccgacgtcgccgaggtacgcgtaagccgagatcgcgccgcaggaacggcagatgtcaatgtagtcggtgacatccgggc

SEQ ID NO: 1356 - DNA, 1740 bp, Unknown
  16S sequences of unknown bacteria
ttgcttttcccggttgatatagagcatagctcagaaaccttacgctgttcccaagaataatcctattacaagtgttcacgcaccatcataagagtatatccaagtaaattttgaccgttccatttatctttatttagtctatcgggggttttcattgacaaaccgataccccaaatacggtcttttacggcacactctgccaaaacagcatttccggttgctttgagttttccttttagctcctcgttttgtgaaaactttgccaaaagcccttcataaactacaatttgacgaattccattccacatactctcatcgtagtttgatacctgcctgccaagtaatttgatttcggcaacatcactagttgataagatttgagctgctaccgcttcatctccaaagcagattgctttacggtacatcataaattgttccatcgaagaaaacgctacaccgtccaccgtaaaaggtgacagataccaattgctcaaatagccgttatcttcatcgggattatgaaagcaaataacatccattacacttcaccgactttttgcaccgccaaatcaagttccaagtcgtgcaaaccatagtatgccttttttatgaaatcaagcggcacttttttaagtacctcggaacttggaatatcgtaataccattgatagtaagcataaaactcgccaatccagtcaggcataaagccatcaagagctttgccgggcttcaaggaatacttttcggtttcggtaaagtattcccacaattctttggcatccattgtgttgacataggcttttgcctcgtcaatactttttcttgttttgcttgccatataggtcttgataaaatcctcagtatctttatcaggataagtttgagcaacaaaatcaaagagcttaccctgattttccactacatcattcaaataatcctgtgaataggctttcataatcatcactcctcaaacagtgtactgaacacctttgttacaagattggcgtcggaatcaacaagttcacgcattttctgccttgcggtaatgtctcgctgattgtacttttcgttaaactctgtgtactcaacagtttgcaagctgtttgccacctcgtgaagtttggaataagcaagctcggactttatacaatactgaatacctaagccaccaagtgacagcaattcctcaagaatatccatatcaatattgtctcttacaaattcctttgcgatatagaaatatgaggcgtttgctctccaacctttgataacatcgtacttgtcggtatcgacaccgtattttgcgataaatttctttgcaagcatacgataacgctttgagtcggctgcgtctctgtgcttcatcagttctgcaagccacgcaagaacacctttttcttgaaaatctaaaatttcaagtccttctgtatcaagttcatattgatgaacataaccgtttgtttcatttggtcggcaaactgcccattcttttgcaaggtctatgctttcggtaagataaaatcctcgtccgtagtcgtgtttttcctcacccttaccgaatgtaggcactacaattttgtcgggagtaccgtgatataaagttatttttttcattttctcttttcctcctaaacaaacatcttttcgagcatagatttcttgatattttgaagcttttctaactcacgctgatgaagggtgataaggttgtcgagattgtccaagtactgtgctatcttc

SEQ ID NO: 1357 - DNA, 12067 bp, Unknown
  16S sequences of unknown bacteria
gccgccgcagcccaggcaggcgcgacctcctgcagggccagcagcagcgcaaagctccccacgaaggcggcgcaggccccgccccgcagcccggccaccttgcgctgcgcgcggaggaaggcctcggctgcggccccgtccggcggcggggccgggcgcgcctgcgccggcgcgggatcgccgttcaggagcgcctccacggtcacgccaaagagctggctcatccgggcgagcttttccatctccggataggcgctgtcccgctcccacttgctgacggcctggcgggtgacgcccaggcgctcggcgagctcctcctgggagaggcccgcggcgcgccgcaggcgttggacattctggccaaagggcatgtgcccacctccttttttcggccctaagtgtaccatgcgcaggggagattgtccagaatcctgcggttgcgcaggggggaactttcggttgcggggcaaaaaaatcccgccggagcccatttggggggattccggcgggcgcgcgcggctttaggccagcagcgcgcggagctgcgcgagcatgtcggcgcaggcctccttggagacggtgacggagacgctgtcgttcttgcgcagggcgtagttgttgatgctggagtcgaggtaggtcacggtgtagggctcctcctcgccggagaacacgtaggtgagcgtcaggaccgcgggcgcctcggccacctcctcggccgaggtgaagccgttgaccggcacgacgttgaccgcctggaacgccgccttgaaggcctcggcgtccacgctctggccgtcgcgcaggaccacgtcctcctcgcccgagcggtcgatgacaaaggtcgcctgcgcgccgtccaggtccaccgtgagctgctccacgccggagatggccacgatgttggcgaactcgttgacgaggttctgcagcgtcgccgcgtccaggaaggcgacgtcgctgctgctgacggtgtagacgtcgtccgagccgtcaaagcaggcgtagtagctgcccaggcccgcgtccgcgcccaggtccatttggagcgtcgtcccgccctcgtaggtgagcagcagcgtgcgccagggcgcgtccaggccgtactgcgccttgtccgtcgtgctgcggacaaaggactccagctgaatgccggacaggctgctcaccaggctctcggccagcgcggtgtccgtgttggccagctccggctccacgatctgccactgggtgaaggcggagccgcccgtgcgcgcgtggtgctccatggcaaagacctcctcgccggtctccacgcggaaggcggcgagcccgtccgtggcgacggcaaagccggaaagatcgcggtaggccgcgacgccctcggagaacatctccacgatcagggggcgcatgaggtagaccgtgtccccgccgtccacgcgcacatagtagtgctgggaggcaggcgccgcgtcgccgatctcgagcagaagcgccgtgccgtccgtataggtgatgttgacggtggagaccggctcgtccaggccgtaggcggcaaagtccgtcacgccctcggcggccacgccctcggccagcagcgtcgccgcgttggagaaggccgcctcgcaggcggactgcgaggtcaccgccgcgctcagctcgcgcacggaatagaccccgtcgcgccgggtgatggtcaccgcggtgcggccctggatctcgatgcgctgcaccttgtccgcggtggtatccgtcaggtgcacggtgtggtcggtgttgagttccacgtattcgccgatggcctgcgccagcttcgtcacgccgatgaccagcgcggccagcaccacgatgccgcccagcgccagcagcagcaggcggcccttgcgcgggtcgcggtgccgcaggggctttttcaggtcctcgccggagggcaggatgatcgggtccttcatttcttcgttcatagatcctccacattccagatgaatacagaaaatgtaccatgtacagagtacatgatacattttcgcaggcagatgtcaagacttatcccttgaccgcgcccagcgtcaggcccttcacgaagtacttctgcaggaagggatagacgcaggcgatcgggacgacggagatgaccgtcatcgccgcgcggatggtctgggtggtgacgcggccgctgccctcggaggcggtgctggccatggcgtccgccgtgaccgagtcgccggtcatggagttggccgtgtccaggatgcgcttgagctcgtactgcagggtgatcaggtccttttcgccggaacagtagagcatggtgtcaaaccactggttccactggctgacgctgacgaacaggccgatggtcgcgatgaccggcatggacagcgggaacacgatgccgaacaggatccggtattcgctcgcgccgtcgatcttggccgactcgatcagctcatagggcaggccctggatgaaggagcgcatgaccaggacgttgaaggcggagatgcagcccggcaggatgtagaccaggaagttgttcatcaggccgtaggcgcggtaggtcaggaacgtcgggatcaggccgccgctgacgtacatggtgaagagcaccagcttcgtcacggccgagcgcagaacgaagtcgcggcggctcatgacgtacgccagcatcatcgacagcgggatgctcagcgccgtgccgatcaccgcgcgcagggcggagatcagtgcggagtgcggaatcgtcgagctctgcaggaggatggtctcatagctgcgcagggagaacacgcgcggccagaggtagatgccgccgtagaccgcgtccgtcgagtcgttgaaggagatggccacggtgttcaggaacgggtagagcgtgatcacgcagaccatcaggagcaggatcgtattgacgatgtcgaagatcaggctggacgtattgccggagatgtgcccgaccttcatcttttgcttttgcatcggctgtgcagtcattttctgccacccctttccttacatgatgccctcgccgtccaggcgcttcgccagcaggttgcagccgacgatcagcacgatggagacaagggagttgaagatggacatcgccgagccctgcgcccacatgccgtacttcatatagaagtcgtagatgtagacctccagggtggaagcggtctccgtggtggaggcagatttcagcaggtagacctgctcgaatccgaccgacagcaggcggccgatggacagcaccagcaggatcttgatcgtgggcgtgatggagggcagggtgatgttccagatcttggagaagcggcccgcgccgtcgatgtccgcagactcgtagagcgaggggtcgatggaggtcatggccgccaggtacacgatggcgttatagcccgcgctcttccagacgtccgccagggccaccatcagccagaagatctgcggcatgcccatgaaggagacggggtgatcgatgatgccaagggccagcagcacctcgttgacgataccgctgtccggggagaaggtgacgaagatcaggttcgccgccacgacccaggagacgaagtgcggcaggtaggagatcgtctgcaccgtgcgcttaaaccagctcacgcgcacctcgttgatcatcaccgccagcatcagcgagaacacgtaggagaagatgatcttcagcacgcccatgccgagggagttcttgaggccgcgccagaagtactcgtcctggaacagcgcctggaagtattccaggccgcggaactcgttggcaaagacgttgaagcccgtggtcggcttgtagttaaagaaggcgacgagccagccccacaggggcacgtagttgaagaggatgacgaagatcaccggcagggacaggatgaccagctgcttttgccgccaaacctgccgccagaagccaagctgctttttcggctttacaaccgcactgctctgtgcgctcacaggaaatcccccttttctataggtttcggtagaatggatcatagtttgaattgaactgaagcccatggggaggaatccggcgcctgtgcggtatctcgcccaatcctcaggcggagaaggccgtgcgggagcgcgccttccgcgctcccgcgggctttcttcagaaattcaaaccgttagttctggtagttgggcgcgctctcctgcgccatctgggtgaccagctgctcgtactcggcaaggggcaggtcggccagcttgccgacgaactcgtcccaaaccgcgtcgaagtcttccggcgcgcactgggccagcttgggcacgtactccagggtgatggtgagcgcggtctcgccggcgatctttctcgggtcgctggtgtcgatgcgctggcggatggagtagcccggctcataggtcgcgtcgtaggacgggttgaaccagtcgcagaaggtctgcgcgtcgtagtgggagaggaactccagctcgtagtcctcgtaggcctgctgcgcgtactccggcgtgttggagggggaggcgatggtgccgctcgtggggaaggcctccaggcccggccagaagtagaaccagcccatctgctcgatgccctgctcctgcttgtagtacacgtcgttgtactgcgcccactgctcctcggtcttcaccaggctgccgtcctcgccgtaggaccagtcggtgccctcgatgccccagcgcagcacggtctggcactcttcgctggccaggtcgtccaggaactggaacgcgcggtccggatcctcgcaggtgacggagatgccgatgccaaagcccggctggaaggtgcgcgcgccgcggtagcgctcggtctccacgccctcaaacgtcaccgggaaggcgaccagcatgcgggagggatcgttggcctccagcgcgtccaggcccacggagatcatcgagcgctggtcgtacatgcccgcgacgcggccggagccgatcttggactgcagctgctcgtcggtctgcatgaacatctccgggtccgcaatgcccaggttccacatcttgttgagcatgcggcagaactccttctggaagtcctgggtcatgacgaccttggcctccagggtgtcctggtcgatgacggtcaggccgtcgttcgggtagccggccaggaagcgggagccgccgtactgcacggcggaggcgcgccaggcctccgtgggctcggtgatgccgatggtggactggcccttgtaggtcgggttcgcctcgacatagtcgatgatgagctgctgccactgctcaaacgtggtcacctgcgggtagccggcctgcgcgagcaggtccatgttcaggtagtagcccgcggtggggtagacggcgttctcggaggcgtggttgccgaaccagtagatgttgccgtcctcctgcgtcatgagcttgatctgcgactccgtgtagcagttcttgatgttggtggagttggcgatgtagtcgttgagcggaacaaacgcgcccgccgccttgaggtcgccggaggcgtcgctcgtggtgagcaggtccggatactcgcccgccgcgatcagcagagaggccttctggcggacgtcggagccgaccaggaactcgatctccagctcgacgttcgtcttttcctgcaggtactggcccacgggcgtgtcaatccacgggtccacggtggaggtcgccgccgccatctgcagcagcgagaaggtcgcgggcgttctctcgtctccggttgcggcggcgctgccgtcgccggcggaggcgggatcgttcgcatcggtaggcgtgccggacgagcatccggccagcatggccaccgccatcgccagcgcgatgagcagcgcaatgctcttctttgcggtcatttcgattcccccttgtgtgatttgtgcttccggtgaaatgttaatgttctgtgatgatttcacctgctcacagtttacacaagggttcacgaaaaatcaatatgttttccggtgtttttctacaggtttccgcatgttgaaacacaaggggcgaattttccaggtttttccacgaaaagtgcggggaaccttcgcggttttccaggggctgacacattttattgtcagtttatgccgcattcacatttcatattttgttaaccgatccatcactccttttatattctatatttttcggtaaaatttttattattgagttatatcttctttgccctttttcgcgttcccgatctttagaagagggcctgtgggagcgcttgcgcgcccgccacaggcccatgccgctcttgcagcgcttagttctggtagttcgcggcgccctcctggatcatctgcgtggcgagctcttcgtactcgtccaggggcagctcatccagcttgctgacgaactcggcccagacggtctcaaagtcctcgggcgcgcactgggtcagctgcgggatgtactccagggtgatggtgagcgcggtctcgccggcgatctttctcgggtcgctggtgtcgatgcgctgacggatggaccagccgggttcgtactccgcgtcataggacggatcgaaccagtcgcagaaggtctgcgcgtcatagtgggagaggaactccagctcgtagtcctcgtaggcctgctgcgcgtattccggcgtgttggagggagaggcgatggtgccgctggtggggaagggctccaggcccggccagaagttgaaccagcccatctgctcgatgccggaggtctgcttgtagttgatgtcgttgtactgcgcccactgctcctcggtcttcgtcaggctgccgtcctcgccgtaggaccagtcggtgccctcgatgccccagcgcaggacggtctggcactcttcgctggccaggtcgtccaggaactggaacgcgcggtcgggatcttcacaggagacggtgatggccaggccggagccgccggcgaaggaccgcgggccgcggtagcgctcgcgctccacgccctcaaaggtcacggggaaggccaccagcatgcgggaaggatcgttggcttccagagcgtccaggccgacctggatcatggagcgctggtcgtaggtgccggtgatgcggccggagccgatcttggcctgcagctgctcatcggtctgcatgaacatctccgggtctgcgatgcccaggttccacatgcggttgagcatgaggcagaattccttctggaagtcctgggtcatgatgaccttggcctccagggtttccggatcgacgacggtcaggccgtcgttctggtaaccggccaggaagcgggagccgccgtactgcacggcagaggcgcgccaggcctccgtgggctcggtgatgccgatgacggaggtgccgttataggtggggttggcctcgacgtactcgatgatcaggtcctgccactgctcaaaggtggtgacctcggggtaaccggccttttccagcaggtccatgctcaggtagtagccggcgctggggtagacggagttctcggaggcgtgagagccgaaccagtagatgttgccgtcttcctgcgtcatcagcttgagctgggactcggtgaagcagttcttgatgttggtagaattctcgatgtagtcgttgagcgggatgaaggcgccggccgcgaagtagtcgccggaggcgtcgcccgtggtcatgatgtccggatactcgcccgcggcgatcagaagggaggccttctggcggacgtcagagccgaccaggtactcgatctccagctcgacgttggtcttctcctgcagccactggcccacaggggtgtccagccaggggtcgaccgtcgtggtggcggaagaggagtagaagaagtggaaggtcgcgggggtgcgctcggccacttcctccgcaggctgctcttcgccgccatcggcgggcgcagcgtcgcccgacgtggcttccggagaggtggccggcgtctcggtcgtcgtcgaacaaccggcgagcatggccacaaccatcatcagcgtcaagatgatggcgatgctcttcttcagggacatggcaattcctccttttgttttcttgcgcatgcgcgcggaaatatgaacagcttatgtccatattctcttaaggtgaagtttacaaaaatttttctaaaaaatcaagtcctttttcggcgttcttccataagttttcacgatgtgaaacggagctgggaagaacaccggggaaaaggcatttcttttcgattatgatctcataagcattcgggaaattcagtaaaaaataattgattttatttacataacttttacgaatgttttgcgcgccttcacacaccgcacaaaaaagccgctatcccatcgtccggagcgcctgcaatccaccgcgtgaagcgggagtgtacaacggcactttgccgtgttatactatttcccgttggccgccgcgcacgcgcggcagaacggaggggacgatgtgcagagcttttttgcggcggagctcgcctatctttcggcattttgccgggcggagccggtggagggcggggttcgcctgcgggacgacggcatcccggacctgtatgcgcacaacctgacctattttgcgggcgcgccctcggcgccgcagctgctgcgcgcctgcgcgcaggagatgcgctttcgccgggcggaggggatgccctttctgaacctgacggtggaggggcgcgcgcccaaactgcccttcgcagcgatgcgcacggtctacgactactttgtgctccgggaggagatccgcgcgccgcggccggaccttgcggtgctgccgctcacgcccgcgctctgcgcgcaggccctggcctttgacctggacgtcaacggccgggactacggccgggacttcatccggcggcggtttgtgcgccggcgggaggtctacctttccgggcgggtgcagcacctgctgggctaccacgctgggcgcgtggtgagcgtgtgcgacctgttcctctgcgggacctacgccaagatcgaggatttcgacgtgtcgccgcgccaccagcggcaggggttcgggcgggcgatgctcgccgagctcatccgccgggcgaggcgcctgggggccgagacgatctacctggtcacggacgacgcggatacggccaaggaaatgtacaaaaagagcggctttgtgcaagccgctcagaaggaagagattttgctgccggtcagtctggacagggccgcgcccgcagcgggcgcggcatccggatggcggggatcggccagggggcggtagaagagagtagtagtacagcccctcgccgcgcgaaaagcccagccgctcgtaaaaggcgatgcgccgcgcgcatctcacgcaggggcggatacgcaatgggcggaaagtcccgcgcgacgcggcggtagaccgccgggagcgcacccggctgaaagcacagaccttctctttcccgtgcgtcactccgccggggcgacgaagaggatgtcgctgacggagcgctcctggttggccgtgccgcagggcgtggagatgacgctgccgttgaagtacatgcagctggtcatgccgccgtcgaggttgtaggcggtcacgcagccgaggttcagcatgtactgcgccagctcctcgatggtcatgccctcgctgtagccgggcaggcggccgtccaccgcgaccgcgacgtagctgccgtccgcgcgctggccgatcgccgtgcgggggttcttgccggagacgtccgtgtcatagcgctccggcagcgcgccgtccaccaccagcgccgggccgaaggaccagctgtcccacagcccctgcgtaaggagcgcctcgacgtccatctcgtcctcgtccaggatctgcatggtgccgtcctggaacaggcagagcgcgtcgcgcgccgggttgtcgcggtaggagacgccgtcgcgcacgatgatgccgtcgtcgcggaagccgcagtagtcgccgttgatggcgaagaccgcgcccacggagtcggcgatctcccgcgtgcgggcgcgcacgttctggccgaaggtgccctcggcaaaggcggtgcgcaggggcagggcgccctgcttgggcgtgatgaccgcggccgtggccacgacgccgtccaggggctgctggcgctcgatgtcgatgcggacggccgcgtcctcatagacccagacgccgttttccgcgtcctctgtgaggatcgggacaaagggcgtgggctcgggcgtggccgaggccgtctccgccggcgcgtccgagggcgcgggcgaggaggaggccgggacggcggggagcgttgcggacggggccgcgggcgttccggtgggaggcgaggcctggaccacatcccccacgaccatgtatggcagaccaaaggcgcagaaggcgaagaccagcgcgccgctcaggacgagcgcggccttctgctgccagcgcatggggcgttttttcttcttccccgaggggctgtatcgcgtttccatgctgttctttcccttctttctggctggacgccggattcgaaaacaatgatagcatattttgccgcgctgcgaaagagcgggggttgccttccggctgttccatttcgcagcgcctggaaaaaccctgttaagttttgggctttcgcttgacaaggcgcgcggaatgggctaccctgtccctagaatcgaatcgcgcagtgacccgaaacaagtacccgcagcacccgggcagtgcagagagccggcggcaggtgagagccggcgccccgcggcggagaaggcggtcggtgagcgcaccatcaatgaaggcgggcagaaggtcttttctgccaacttgggtggaaccgcggaaagcgaaatgcctttcgtcccaaatagaggggacgaagggctattttttgcagaaatgaggaggaaaatcgacatggcagcaccttctatggacaagctggtcgccctgtgcaaggggcggggattcatctttgccggctccgagatctacggcggcctggccaacacctgggactacggccccctgggcgtggagtttaagaacaacgtcaagcgcgcctggtggcagaagttcgtgcaggagagcaagtacaacgtgggcgtggactgcgcgatcctgatgaaccgcgaggtctgggtggcctccggccacgtgggctcgttcaacgacccgctcatcgactgcaaggcctgcaagagccgctaccgcgcggaccagcttatcgagcaggtctgcggcatcagcgccgacggctggagcgacgaaaagctcgaggcctacatcgcggagaaccacgtcgcctgcccccagtgcgggaagagcgactttacctccatccgcaagttcaacatgatgttcaagaccttccagggcgtcaccgaggacagccagaacgagatctacctgcgcccggagaccgcgcagggcatcttcgtcaactttaagaacgtcgcgcgcaccacccgcaagaagatccccttcggcatcgcgcagatcggcaagtccttccgcaacgagatcacgcccggcaacttcaccttccgcacgcgcgagttcgagcagatggagctggagttcttctgcaagcccggcgaggacctggagtggttcgcgtactggcgcgggttctgccgcgactggctgctgagcctggggatcgatcccgagcgcctgcgcctgcgcgaccacgagaaggaggagctcgccttctactccaaggcaacgacggactttgagtacaagttccccttcggctggggcgagctctggggcgtggccgaccgcacggactacgacctcaagcagcaccaggaccactccggccagccgatggagtacatcgatcccgtgacgaacgagcgttacatcccctactgcatcgagccctccctgggcgcggaccgcgcggcgctggccttcctctgcgacgcctacgaggaggagaccctcaccgacgccaagggcaacccggacgtgcgcgtggtgctgcacctgcaccccatgctcgcgccgttcaaggcggccgtcctgcccctgcagaagaacaagctgggcgaggccgcgaccgagatctacgaccgcctgcgcaagaagttcagcgtggactacgacgagaccggctccatcggcaagcgctaccgccgccaggacgagatcggcacgcc

SEQ ID NO: 1358 - DNA, 3903 bp, Unknown
  16S sequences of unknown bacteria
ctcccctggacggaggaataagggctagaagggagtggggagcaaacccagggcccagcggccggcaccgggcaggaaaaagtttgctccccaagacggaagaataagggctagcgaggagtggggagcaaaccccccgggcctgaaattcagaaaaggcgcccggtcgccggccctaacaaaagccccggcgccgctggcaatgcgagcagcgccggggcttttctgtactgctttctacaccggaaatgtggcagtaatccggagggacttcccgtccggtgtgtaggcggcaattttgccgccgtgggctcggaccaccgcccgggcaatggagaggccgatgccgtgcccgccggtttcactgttccgggagctgtcggcccggtagaatcggtcgaaaaagtgcgggatggattccttctgaatctcatccacggaattgctcaccgtgaggaaaatgtttttaccctgacggtagaagcggagccggatatcgccggaatccgaagaatatttgaacgcgttgtccaagaggatgctcaccagcttgcggagggcactttcgtcgcctcgcaggaacagatcgtccgccacatcgcagttgtattttttctcggaaacaagggcccgggattcgaaagaatgggccacgtcgccaacgattttcgagaaattcagccgcttcatgttgacggaggttttctgcacctcctccatgcgggtcaggtacaccagctcttcggtgagggtggacaggcgccgggtctgctgccggatatcctccaaccattcgttgggcgcatcgtccggctgttccatctccagaacggacacgtctgcgttgatgatggtcagcggcgtgcgaatttcatgtcccgcatcggtgatgaaccgctgctgtttttcgtagctttccgccaccggccggagaatttttccggagaaaaaggtgatcagtgcggaaatgatggtgacgccgatgaggcacaccagaatgctgacgtttcggaaggcccggaaattgtccagggaacgggagcaatccaggtagatgtagcgggttccgcccttttccgtcactcgggtgcagcggaagtcttcaataaaagcacattttccgtccttcgaaagtttccgttccgcctttcgctgaatggattccagtgcatccttatttaccgccagcagctgggaggaatccacttcccgcagggttccgttagaattggtcagcaccgaaaaatatcgggtttcaaatggctgcgcggaagtgcggcccttgttgtccagctgaattcggaaaatatagctgcggtcgctggtgtcatccttcggatttaatttagaaaagcggcgcttcttctgaacgatgatggtggatctttcttccacatcgccgctgccggaaacctccacggaatcgcgtcttccttttattagtaggctttccggaaacgtcccgtgattggccgacagaatcgaaagggtccagtccgcgcggtctaccacgtttcggtagctgatgccgttgatgataatcgtcagcagcgcgatggtgaagaataccgataggatggtcaccgcgatgaatcggtgccgtaatttttttaccatattagtcctcttcctccaccaccagggaataccccacgtttcgagtggccttaatcagcacgttcgcccccaaagtcttgaacttccggcgaagataggaaatgtacacccagatgatgctggtctccgcatcgctgtccagtccccaaatccgctcgaaaatctgctccgtggacagcacctgccccggattgctcatgaggagttccatcagctgaaactccttgttggccagtcgaatggaattctccccgcagaccagctcataattggtccggtccagagtcacgttccccagctgcagcacggagcttggattcttggtctgaactcgggtaatggcccggatccgcgccagcagctccttcggctcgaagggtttcgtcagataatcgttggcgccgctgtccagtcccagcaccttgtcgtccacctcggagcgggcggtgagaatcagcaccggcgtcaggtcgttccgctcccgcagcgtgcgcagcaccgtcaggccgtccaccttcggcatcatcagatccagaatgacggcgtcgtaactgctcacgtccagaaaatccaacgcttcctccccgttgtatgccgcatccaccgagtaatggctgctctccagaatccgggtcagcgcccgggagagagatttttcgtcttccgcaagaagtagtcgcataagcttttttcctttccgctaaaaacattttcgctaaaaatatcttctatttatatgtcacccgtttccggccaatccaaacaaagattgcacacatcgccagctccatcagaagaaatatctctccgattcggagtgccgtgtcggagaagaaaccctccggcagcaagttgatgagattgtccttcgccggatccagaatccacaggtcgttatcaaagaacaaatgatgaaatatcacgaagtaccggtcgaaacttccggaaacaatcagtgcggtaaggccggtaatcgccagcaggacgccggttatttttgggaccagtacgatgaaatccgggagccggttcggctgctgctttcgaccgaaccaaagccctgcgagaattcccatgctgatgagggccgtgatatttcgaagacggaatccgcccagaaaaagtgcccggcaatccttcaggtgagccttttctcggttggaaaagaattcctgttgcttgccgtcgatggtggtcatcacggtgagattttttcggtcccctttgaggtagtccatcatctcttccgtcacctgcagtgcggattccatggacatctcgcctcgcacatcctccagcaccatgtatttgtcgtattctttctcgaaccatcccggagtgcgatagagcagaatctccgcagcggtgagcagcaggcacagcatcatcgtcaggctgaacaggaggctcagcacccaagcggccccggggcatcgtcgtttgtcttccatattatatccctttccgtatcatacccggaataccttaatcggagctgagttccggcgggcatcccgataaaatattatatctttcaacggggaacatatcaactgtttgcggtggctgccggcggggaccgcatccaatccgaaggtatccgaaatgagcataaataagtggttgtgtataatatatctgtggtttaataagcaaaaaagtactcatttgagtacccgcttaacccggaatgtgtgataaaataaataatcatggagatgtaacgcatgaacggccggcaagtacgcaatatcacggaacaccggccggacatcatccttccctgggggttgcaggggagaatgaggaagggggaaaaatgataggctattttcgaaagcgaaaaagagctgcctggatcgtgacgcttttgctgtccgtgaccatcctgttcgggatgtccggaacaactgtgtcagcggcagccggtgccgtggcagacgataccaccgttaaccactggcacgattctattgcacaggatgacaccacaaagaacatcggtagaatctggacggacaagtccgtatctgccggcaacattgtgatgaagaagccggataattccggaacgaagaccatagagaagaacggggattccgacttcctggtaggtctgtccgcactgtcttccgccgcgaaggttatgggacagtccgccgttccgctggacatcgtaatggtgctggacgtatccggaagtatggatgacaacgataacaataacaacaaaaaacctgctaagagaagtcaaggaatttttctcttagcaggttcctaaattta

SEQ ID NO: 1359 - DNA, 32759 bp, Unknown
  16S sequences of unknown bacteria
tatcttacggggcagtaccttatactgcttttctcattgccctatccgggcgtacgttgtgaatatgagccgtatcctccactgccttccgacattttctcttatatttcgagtacacttattcaccgcaagggcacgtgggttcgaatcccacccgctccgccatgaaagtcccaaagcgaaagcgctttgggctttttccttatttttttgcaaaaatcagtttttttattttttttcgatgatgtccgtggtatcctgagttgtggcggagtgggaaaaagaactgcacgccaccccaaaaaagacccctcgtgtgcgaaagagaaaggagacccctatgccctgtacaacgattctggtcggcaagaaagccagccatgacggctcgacgatcattgcccgcaatgacgacggcagatttgaagccaagcgggtattggctcacccggccagggagaaggccacaacatacaaaaccgtcatctctcacctgacggttgagctcccgggaaatgcgatgcgttataccgactgccccaacgtctcaaagtccaacggcgtatggcccgcctgcggcatcaatgaggccaacgtggcgatgacggccaccgagacgatcaccagcaatgcccgggtcgtcggcgcggacccctatgtccggtatcaggaaaagaagggccgcaacaccaaggaggttcccggcggaatcggcgaagaggacctggtgacgctggtgcttccctatatccattctgcgcgggaaggtgtgctgcgcaccggcgcgctgcttaagcagtacggcacctatgaagccaatggcatggcctttgcggatgccaacgaagtctggtggctggaaaccatcggcggccatcactggatcgccaagcgggtcccggatgaccgcgtggtcatcatgcccaaccagttcggcctggatcactttaactttgaggacgcttacggggaacagaaggaaaacctctgctccaaggatctgcgcgagtttgtggaaacataccatctggcgctggatacgggcgcggacttcaacccgcggctggccttcggctcccattcggacgccgaccacatctacaacacgccccgcgcctggttcatgggccggtatttcctgccccgcacctacaagtgggatggggacaatgcggacttcaccccggagagcaacgacatcccctggtcttttgtgccggagcggaaggtgacggtggaggatgtgcggtatctgctgggttcctattatcagggaacgccctacaatccctatgacaggaatgccgcgttcaaggggaagtaccgcaccatcggcgtgcccaacagcgacgtttgcgggattatgcagatccgcggcgagctgccggcggccattcagggcgtggagtggctgtccatgggcggcagcgggtttacggcctgtttcccggtctacgccaatgtgacggagtttcccaggtacctcagcggcaccacggaaacggtttccacggacgctatgtactggcacagccgtctcattgccgcgctgacggacgcgcatttcggaaatgccctgctgctggatgagcggtatgtgaacgccgtgatgaaccgcggacagcagttcctctacgagtacgacgagaagatccggcagggcgaatctacccagatcctgaaggaggccaatcaaaagattgccgacatggtcagggaagaatcggacaaggcccttgccgagattctcaagaacgcctccgagcacatgaagatccgctatcacagaggggacaactgagcggacgatacatttaaaaaagaagaaacaaagcagcaccggccgcctgagcgatcagcgggctggtgcttttttctttgttccagtttgaacaacatgacatgcggctttatccaccttgacatccgcatccaccggcgttatgatgccagcaaggcagaagccggacacgccttttgtctcaatggcccttcaatgaaaggctgctttcttggctcctgatgcagatacacggtaaaggactgaaaccatcttgataaagagctgcttcgtcaaactccttttccaggcagggtgattgccatgaccgaacacaccgaccggatgcccccaaagcagggcatcgcctattaccatctccccggcctgtttgcgttttacgacctgtattgtgccttcctgccactgtaccgcaagcacagggaatacttttacgactggtgcgaaatcggctccctctatggcgctccgtcggactgtatctggggtggtggccgtgtcggggcggaaagcagcgatccacgggcagcctttgcgttgacgcgggaatacggaatctcggcccggctgaccttcagcaattccctgttgcgcaaggagcatctctccgaccgtaagtgcaacgcgctctgcaggctgtttgaggaaagcaaccagccccgaaacggcgtgattgtccattcggagctgttgctcagctacctccaacaaacctatccggggctgtatctcgtttcttccaccaccaaggtgctgacggattttcaggacctcgagcgggagctaagccgtgaagcctttcgctatgtggtaccggatttccgcctgaacaaggcctttacgcggctcggcgcgctgtccggacggcagaaaacaaaagtggaattcctgtgcaacgagtgctgctggtttggctgccgggacaggaagcaatgctatgaagcagtcagccgaaaggtgctgggcgaagacggtcccgagcaccgctgcgccgcgccggatgccagggaaggctatcgcttttccaaggccatggagaatcccggcttcattggcatcggcgacatcgtgaatacctatctgcccatgggtttctcccatttcaagatcgaaggccgcggactgggcagtgcgctgatgctggagtttttgctctattacctgacaaagcccgaatgccagctgaaagtcagggaagaaatctatttggataatatgctggatttgttctgagtcaggcaaagtttcaaaaacagaaaaaagcgacgggttgcccgcaagcagcctgtcttcggctttgcctgtataccattttctcgccggttatctctccaaaacgcaaatatctctcccaaatcggagaaagatcgggttttttcgggcccttaggcccgctgtgccaggtgcccctcgatggacgggaaacgcttgatttccggtcctttttctctttcggcaacttccgtaagcggctctgtcgctgccgaagcataataggcccatatcgccgaacggaaatggacctgcgcctaaaagatctgtgatcctaaaaaacttgcaagcaaatagccaagtgattcgggtggggggaagcctgatgataaaagatttgcgggaaaaggtaaaaatgtatatgcaattgtatgtgtttgtggatattgtaaaaaaggatagcccctctctgcgaaagtagcagagaggggctatccttaatgcggagtttttttgtggcgggccattgcagtcagcgctgcttcagccgcttgacgttttgttagccggctggaaatagcgcctgctgttcccgtactatttttccttcaccagatgacaggccaccacgcggccgtccgccatgtgcctgagctgcggcttctcgcgccggcagatttcctgctcgcagaagcagcgcccagcaaacgggcaacagggcttggggtccacaggagacggcggctcgccctcgatgcggatgggctcgcgcttttcatccagatcgatggacgcgcagttggagatgagcgcctgggtatagggatgcaggggatgatgaatgatggtatccgtctcgcccatctccacaatgttgcccagatacatcaccgccacccgcgccgatacgtagcggatgatggaaatgtcgtggctgataaacaggatgctggtattgtggttttccaccagcttcagcagcatgttgatgatgtcagcacgcacggacacatccagcatggataccggctcgtccaccaccagaaacttgggtttgagcagcatgctgcgcaggatggaaatgcgctgaagctgtccgccggacagctcgtgcggatatcgctccagaaaggactcggcagggatcaatccgccttcattgagggcgtccacgcagatcttcctgcgctcctcatccgtttcaccgatgtggtgcagcttgagcggccgctccataatggccccgatggtatcgttgggcgtaaaggtgtcaaacgggttttggaataccgattgcaccaggcaatggaactgctccgggttgcagtccaacagctttttggtggacacgccgtagaattcgatctcgccgctggtgggttcctccaaacgaatcaacagccggcccagcgtggactttccgcatccgctttcgccaataatgccaaagatctctttttcattgagcgtaatcttatccagcacgccgccataatacccggcgaaggcgcccagcagcgtaccgatcaggccggatatcagcgccgatacaatgccgatggtcaggctggcccggctcccatgcaaaatcatgctcaggatatcgcatcccatctggttggtgcccagaggatggccctcgctgccgggaggcaccagcaagtcatcgcccagataatagggatcatagggggaaagtacattcgccagaatggcgataagcagcaccaccagaaacaggatcagtcccacctgaagctgccggctggccttccacatggatccaaggcgtttggctgttttatgcaattcgttttccataatcctgctcgcctcccatcaggtataccgtatacgggggtccagccatgcgtacacaaggtccaccacaatcatcatggcggcaaccgacagggcaaggatcaaataaatgcccatcagcacgttgtagtcgcgcatcataatggcacggtacatcatggaccctatacccggccaggagaatacgatctccgtgagcgtcgagcccgaaaccacatatgccagattgatgccgaacacggtaagcaccggcaaaatggcatttttgagaatgtacttgcggaatatctttttttcgctcattccggtcacccggaaggtcataatatagtcatctgccatgacctgcatcaccgatgtcttggtaatgcggaagtaactgggaatttgaatggcgatcagtgaggcgcagggcagaatcatatggaccagaacgtcccccacatgcgccagacccgtattgccggccctgaggttgtacatgccttgcgtgggcagccatttgagcgtgctggcaaacagcagaatgcccatcatgcccagccagaaggcaggcatggaattaaacagatacgcgacgccggaaaaacaccggtccagcaatccgccatggtttttgcccgcgtacaggcccagccagcaacccagaatcaccgccaggatggcgcttgtgccggagagcagcagcgagttcccaaaccgttctgcaatgagcgtcgtcaccggctgcgaataggcaaaggaatcgcccaggtctccgtggaacagattgacgatgtatttccacagctgcacatgaagcggctgatccaggccaaactcaatggtcagcgcctcaatcatatcctccgtaaccgtatcggctccggccagaattctcacggggtcaccaggagccagcttgataatcaaaaagtttatgacgatgactacgagtacaataaagaatgccgtaatcatctttttcaggatataccgcttcacctgcgtgcctccttgtgtcacaatgaacaccaaacaggcgccggaaagtgcggcgcctgcctggtgaaggccagccttgcttactcgataaccacctttgcgtagctgttatcgctgacgtcgggggtctgatcgatataaggaacgccagacacgttattcctgcagatgtagtacgtggtcatctccacaacggggatgatcggcagttcctcggccagaatctcctgaatgcgacggtagcactcgccgcgttcctcgtccttggtcaggctgcgggccttcgccagcagctcgtccacctcggcgttggaatacatggagtagttggccacgccgcccgtgccaatgcgcttggacatggcatccggatcgggaccctgatagccgttgagcatggccatgtcgaaatcaccgttgagcacgcggtcgttccacgcggcgctttccagcacggtcagcttcatgttgatgccggcttccttgaggttggactgcatcaccttgccgcagttcgcataggagccgctggagaacaccagcatctccagctcaaggtagtagccgtcgctgtcgagggtgtagccggcctgctccagcagagcacgggcttcttccacattgcgctcgccgatatcagcgtccgcattgtaggcccaggagcagtagggcggatagaaaccgtaggccgggggcatgaggccgttggtgcccttgagggagatttcctcgcggtcgatggccagggaaaccgccttgcgcacttcccaggtcatcttttcattctgcatattgacggcgatctggtagcggcgcgcggcgctggagtagcccggcttgtactgggggtcctgcagcagggcgggcacctgggagttgggcacgcccttgagcatgtccacctcgccgttgaagaaggcctgcagcgcggtgtcgctgtcgggaatcacctggaagatcaggcgctcgacatcgggctcgcccatgtggtaatcggggttcttctccagcacgacgctcacgccgcggtcatagctgacgaacttgtaggcgccggtaccgatggggttggtggtggcagcagcgcaggtcttccagtcctccacaccctcatagaggtgcttggggaggatgaagttggcataccaggccagcgtgcccaggatgggcgagttgggggcgttgagcaccatgacgaaggtattctcgtccgggcagctcatctcggcgaccgaggtgttaagctcctgggcgatgacgccgttgttgtccatgatcatctggaaggtgaactccacgtcggcagaagtaaagggctcgccgtcgtgccatttcacgcccttgcgcagattgaaggtataggtcaggccatcgtcggagatggtgtaggtttcgcacaggttggggacgatctcgttgttccagttcagctggaacaggccgtcgaagatgttctggaagatgggccagccatagtcgtcagcctgagcatcggggttgaagctcttgggatcttcgttggtgacaacaataaaggtttcgttgctgtcgtcggccagcgcggcaggcatcattacgcccacaaccaggcacatgatcagcaggacagagagccatttccttgccatagggattcatcctttccttataatggtatctatgcaacctcacgaatgcgaggacacatattcagccgtcagaaggccgcatacagcctgagccgtcaccagattgcgcacgggggtgatctggtaatgcatgttttcttcaagataggcgcattcggaatccaacaaagcattggccgcatcaaaggcatcatgcagtcgttgcacctgctccgcggtaaagccgcgctcagctgcgcgattgagttcaaagtcaatgccgcggaccagcagacacaggttggtgcagcggaagtaacgcatcacgtaaaggttatcgaacatctgcgcctgcgtggccttacctgcgcattcaggcgacttggcccacgcacgctgcgcttcgatactctccgatccccccagcttttcttccagagcacggcggaagtagttatcatcaccgctgagcagatcctctacacgctggaagatggcatgcgtctgaccgtcaagtttctccttcatatcgcagctttccaaaatcacgtcgctgcggtcgcggtccgtcagcgaggtatcgtcaatcttgtcggaatagaagtagggcagctcgcacacaaacgtcatcgtccggttttgaccgtcccggttggcgtactcgtcgctgctggtgccatagttgtggcccgccacggggtccttaccggtgaagcgctcgttgtagtcatacgaatcccgcgccttcatcatctggaacaccgcgggcgcaaacgttacggcatagggcacctcggcctcgcccagcttgcggggaatccccatctgcttgacgatatcgtagaacttggggtagagctccggaatattcttggtgatgtaccagtaggcgccgccaaagcccaggttgtgcaacgagaacatgaactccggccgcagggtgtcaatcaggtccatcagcactttggtttcggggatgggactgttgaactccagcttcttatacttgaccgggaaggtccattccacctgatcgcggaacgccggacggaagtagtggtgcatgtaattggtgatgccgaacggccccttgaaccatccttcattcatacggctgccgtcgatatcgatgcacttgatgaaataccaggtatagtccagctctttttccaattcctcgttggacgccagctctctggtaagaaagtccaccgtcagggacccgataggctcgttgggatgagggcaagcaaagaccagtgcgtttttgctgccgtgcccaatcttgatcagctgaatgggatgtcctgcccgcgaatgtcccacacagcgaacctgcacacggtccggatactcgctcgccagcttctgtgtgctctggtccagctcgtccaccgtcataaagcaggtgtaatccggcacccgtgcgatgatttctttcatatccatgcccattttccacccttccgcttgatatttttctggaaaacgcgggctaaaagccacgcacctcgttgacttctgtcacgaggtttcacacaatcaattcgggttgtgaatcattgtcaagtgccgcttttttttgcattctttttgtattttgtgataaatgacgtggagtacttcatatattatagaaactctatttgtggatatgtctttgctggaaatatcaaggaatacttatggaagggcttctgtaaaaatcagaatgcgatgagcagcgtaacctcaatgggtttatggatgaggtgtgccatggaaacagaccagtcctcgatatatttataagatatgttgtcaccaggcggacgaaggacgccgggatcgccgcaaccgagccagagggtacctctgaaatgaccagcttcggcatggtacaatcatcaagccctgaaacggcacaccataggagcttttgggttgagacggaagtacggatgaaaagttgaactcggtgaaaagacaattttatttgtacaaaggagcagaaagagaatgccccgcgtgaagatgagcaactggggtcttcgcatgaagtggtacgccatctgtgatatttcagtgcgtaacactgtattgctggcatgaacgtaagaatctgcgcccaaacggcaaaaatacgactcctatttgggtgaaattaccggaagcagatcgtatgatttctcgcaacttccatgcagaccggcccgatgaaaagctgctgacagttattatggaggatgtgttcctggatggaaggtggatctctccgccatgaccggcagcttcagtggtatggttttgggccggacgattggcaaccctcccaacagcaatcaggccgatcataagttgaatcaggtcactttcgatttgccggagggttgctgcctcattgtgccttcagatagaggctgcccttctgttggccgctctgaatcgaacgtatgaagtatgcaggactcatgcgctccatgtcaaaaaagggcggctccccggataacgccgcttgcgaaggtttcttcggccaactaaaaaatgaagggctttccgggcactcatggacacagcgttcgccggataatgttagccgggagccagtatacccgttggtagaatggcaaccgtctcaagctatctttaggtgggagcagtcccttcgagtatagagagcgccctggtttgcaggtataactggtccggctttctatccgcgccccgtcccatacgagcagtccttccacactgccgccgtacagaacatgaaacgcattgcacggcattttgttctttcttccttttgcttcacctatgcttctggcgctgtttcagaatcattttaatctcgtgcattataatactgaatgcgcctccgggtattgcgaagaacgccgtacgacctctataatggcatcaacggtttgcaagccatacaggtttcccggcggactggccttccgccccgcaggcggccgcagggtccgcggcggcggctgccgcaacagaccgacatctgcataagtcgaaaggaagagatatatgaaaagatccctttccctgtttttggtgctcgttttaacggcatgtttctttggcaacgcgctggccctgaactatgtcgcaaccctgggaaacgaatccacctttgaaaccatgaccgaggcgcgggccaatgcacctgccgctatgcaacccttctatccgcagggcaagtacgtgccccatcccgtgatggacaactatccgggcgacaccacctacgtataccgcagcgctgatatgtacggtatcaacgcggccgtgcgcatcaataccaacctggtggtgtattcggatcagtcctttgcctccaaggacgaggcactggcctacctcaaggaactgggactggtggatatcatcgaagaggcccgcggaagcatcgttctggtcactccctccgatcccgaagtgggctttaccgctcaggaccagcagcattactacgagctgcagaccgctttgttctccatcaacgcctccgggacacaggacggcgaggccgtaacctatgtggatgcctcctactacggcggctacggctttctctacgtgatcggtctgggagaaggcgccaccttcctcaacaactacgtagccagcacctttgactacgtcagccgcatcgccggcatgctgctcgtggacggcgacatggagcgcatccgcgaagttgccgacatcgtgcccgtttacctggtcaatgcgccccaggatgtggtggccaagtacgaaaaggtcaacggcaccgatgcgctgctcgtggaaggcgacaaaaccacctcttacaaccaggcctatcccgtgcgcaaggtggttacgctcaatgccgaccagcccgaccttaccgccatcatccgcgatgcctactacaacctgttcattaaggcccagcgtggtcaggaaattacacagggtctgtacagtgcctccacgccttatcagggctacggctccgactcggcgccctactccctctcaccgcgcaatgccgttatcaatggcgttacggccgatggcatctatgaattcacccgcgtggatgatcgcttctccggcatcaagaccgaggagggcgaatatcttcagacctggtatgagtacctgcctgaggaaatcgtcaatggtaccgccaaggaaggcaccattccgctgatccttgcgctgcatggcggcggagacgatccgcgccagtttgtagacgggcagggcttcctggaactggccggcaaggagcgtctggccatcgtcgcgcccgaaaagcagaacctgcataccacggctaccaacggtaaggacttcctctcccaagctcttcccgaactggtaaaatacatgctggaaacctatcccgcactggatgcctcgcgtgtgtatgtgacgggcttctccatgggtagcctggcgaccatccgtgctgtctatggcgcacctgaactgttcgcggcggcgtacccccagtccggcatccgtggcgctgaacccacggaggaagatgccaagctgtttgaaaacgtgcaggtgcccattgttgtgtccacttccgaatacaacatggtcaaggccgaaacactcagccaggatttctacaacctgctgagccagctcatggtgcttgacgggatggaacctctgcccgaggctgattacgacgcgtaccccatcgccgggtttgacgccgacatctatactcgcaccaccattaacgacgactacgtcaagcacagctggtataaaaccgatgataatggtgttcccatggtgggcgccacctacatcgaaagcatcgtacattgcctctatccccagcatgccaacattatctgggatttcttcaagcactacagccgtgacctcaccacaggcgaaatcgtgtacgacccttatgtgcgctgatctttaacgccctgaggcctcccgtcatacgggaggcctcagaatgttgacaaagtgcggggtgcagggaatgatcggttgctcaatcattcgcacttccctgacggtcgcgctcatggtttcgctgccctcgcaaatatcggcgttctgcgcgttgaccgcgcgcagcccttgtatttgctcacacctgcgggtcgctttggacctttgcccaacagcccgcaggctgatgctttcctccgccccaagcccttaatgccgtggcatttttgagagcgttgcgagcgtccgaaggacgcaagaaacgcggctttctccagaaaccaagggggggtaacggtctgagcgccccgcctgccgcagtggcaggggggcgcctgggttactgcttgttgtatttcttgcggtactcgctgggcgtcattccctcgtttttcttaaacagatagctgaaataatgcggatcattatatccgacccaaaagcatacatccgaggagcgcatggaggtaactttgagcagctccttggccttggacatgcgcagagccatgagatactcggtaaaggtataacccgtttcctgcgcaaagacggtggaaaaccggctgttggacattgctacctcgcgggccacgtccttgagcataaggttgggatcggaaaaatgcttggccagatagccacgtgccttgatgattgcgggattgccgtggacagggttgtggctgccacggtataccagcgcctccctgagcagtgacaaggatgcgctgactacgctttgcatgtcgtcagactggataccggcctcgtactgtttgatggacaacacctgcgaaggttcaccccccacgtcacggatgagtttcatggccgtcatgagggtttccatctgcaggtagttgagcgtaacggtggagtggatctccgtagagtccagggtggagacgtattcctcaaaaacggtgttgagctcctcaaggtggatgtactgcaaatgctcatacaggggctgaaggtccaggctttccagggcgatggactggccgcacatgtcatttgcacccagaatggcgggcagcttgcggccgggctggtgcatatagatatgccggatatgccttgcggctttcatggagcgtcccacatccgccaacctcatgattggatcgcccatggtgatgaggatattctgggcgttgacggagttgagctcgtgcagggcggaacgggcaaaggaataggcgcgatcgtccacgtcgttgctgttgttgcccatgacaagggccttcatgcccttgttgaaggaacacagctggatggagccgccgctgttatccgcaagctggaacagcgcagcccggccgggcgtgagatccccatcgggacaggtgaaggtgatgtccagcacgatgtagtattctgccgacaggttgacccccaaagtacgcatctgctcgcatattttgggcacatcggcggcgtcggcagagttgttgataagcgaatccataagcttgtccatcataaagcgattgccgtgcatcagacggcggtggatgctttcgattttttccttggtctgcttttcctccagaaggcttttgacaattctccccagcacggtgagcagctcgctgctggtaataggcttgagcaggtactcctgcacgcccagggagatggccttttgcgcataggaaaaatcgtcatagcctgagagaatgacaattttgatccagggcatgatgcgcttgatttcctgcgacagctccaggccgtccataaatggcatacggatgtcggttatgagaatatcgggcttgctgtcctgaatcatgggcagagcgatctcgccatcgggtgcctcgcccaccagggtatagccgctttcctcccaggggaaaaagtttcggatgctttcacgcgtggcgatttcgtcatcgacgagaaagaccctaatcatgcttcaattcctcccttcctcgaattggtacactgaaacagacggtggtgccttccgcgccgcttgtgatactcagtcccctgggctgattgtaatacagacggatgcgctggtccacgttgcacaggccgaagccgattttcaaatccggcgaattggtttttttgccggctggatcggcgtggatggcggccagcacgcgttcaagctgctcctgtgtcatgccgcggccgtcgtccctgacctcaaaatgcatccggttatcccgaatgcatcctgtaatggtgatattgccgccgccacgcttgtatttgataccgtggtacagagcattttcgaccaacggctgcagaagcagtttcaagataacgcaatcattcatagcgctgtccacattgatggaatagtccaggatgtcgcgatagcgctttttctgtatcgccaaatagcctgaaagatgccggaactcctgggaaaccgtaacccagtcctcaccggctgacagcgatatgcgaaaaaagtcgctcagggccttggtcagcaggatgacctcactgcttttgcccgcctcagcctgccagagaatggtgtccagcgtgttgtagagaaagtgcgggttgatctgcgcctgaagggtgcgcagctcggccttttgcaggttgatctgctcctggcggcgctgctccatgagggtttccagcttcatggccatggtgttgacctgaccgatcagggcagacagctcggttacgctggtatccggagcacgggcacgcaggtttccggtggcaatttcgccggcaaagtgctccagctgcaccagcggctcgtgaatggagttgcacaggtggcggttcatacggaaggtgataaaaagcgtaaaaatcaccagcagcagttcaaggcaggtggccactagcactgccttgtgcagcgccacgcctgcccttgaaacaaggccgatttcgcgcgagatgtagttgttgagcatctcctgaatgagcgccgctaccgaacgcacctcctccagaatggcttcgcataccacgacgggacgacccatcgtcataccggtttcaatctggctgacgtagtccctgagggtttccatggtgcggcgtgccacgctcagctcgatatactgtccttgcggcacgctggcaatcaggctgttaagggtggtgttgacacggtcgatggtgccgtaaacatcgccgtcctcaaaggactgccgtcccgccaccaccgaccacatatactcgggaatctgctcggagatgaccggcatgatggaggtaacggtttccatacggctgatggaccgctggtaggaatcggccgaatagagcatgacaatcagactgatggccaccggcagaatcagaaacagggtgagggtatagagcgaggtgcgtatgtccacgcggatgctgcgatgcttgacgcgcatgtcaatacccccttggcggaagggtactcaagtcgtcaaactcagtaaaaaccccctcctgaggatgggttgtgcggggaatgctctcccccgccttgagcttttccgccatgttcatcaccaggtctcccagaaggggtgtacactctactacgcagttgatttttccctccttgagcaggtcgatggcagcctgctccccgtccacggtaatgatgatgatgtccttccctggcaccagaccgtaggactggatcacatcgatggcgcccagtgtcatgccgtcgttatgggaatagagcacatcaatttcatcgccataggtatccagcaggtactccatgcactccttacccttggaccgcagaaagtcgcccgatatggtttccaaagtgtgaaaacgggggtcgcggtccaccttgtcgtgaaagccctgatagcggtgaagcgttggcgtggcatcctccgtgccggaaatttccacaatgttgatcgtctctttgcccatttgtccggccttttccagcagatagtcggcggccctgaccccctccatgtagaagtctgcgccgatgtaggcagtgtagaggctgtcgtcggcagtattgatgaaccggtccatcagaatgaccggtatgccggcatgacgtgcctcggtgagcacgttgtcccagccatcctccacgattggggagaatacgatcagatccacctgataggcaataaacgaccgcagttgggcaatctggttttcctgtttctgtagcgcgttgtcatacatcaggttgatgccgtgctcctgtgccgccttctgtatgctgagggtgttgccaatgcgccaggagctttcgctacccagctgcgaaaatccaatcagcaactcggcctgagcctcttcctgctgtggcgcgtccgcttcgcaggcgcaaagcagcagacaaagcggcagaagacaaagtgcaaacagctttttcatctgattatgctcctttctgcggatccatcctgaggcgtgtaaatgcagcctgtgttgcattatagcatctgtttttatacattgcaaaaagcgcaacccgaccattattcggatagctgtggacgttccactggcgtaggatcaagtcaaatcaatgcttgcgcacaccatgtggaaatattatcttctttaatgcattaaatgaatgaaacgataatgacctattttaagataataatgcacctgccgtccacaacccggaataaaacagataaaaatgccatcagaatgaaagcgttatccgtttgggcggcgcgccgcgatgctctatactaaaaataacatcctgtgatatgggcgtgtccttgcggaaccagacccctatttcgaggaaaactgcacaaaggaaagagggaaaagaaatgaaaaaatgggtaagtctagtcctggcattcgtccttgcggcaggctgcttaggcagcgcgtccgcagcctactaccagcaacatcaaagcaacgaagccacctttgaaaccctcgaagaggcgcatgccaatgcgcccgggtacctgtccgccgaatacaccgaccgcgcgtatatcgccgatcctgccctggatgactatccgcagggtacgacgtacgtataccgctcacccggcatctataactgcgtgagcgcggccaaccgtatgaacaccaacctgctggtctacaccgacgagcagtttgccggcaaggacgacgccctgaactacctcaagggcctgggcctgaccgacatggccgacgaggccaccggcagcgtggtactggtaacccccattgaccccgaggccggctttggccaggcggaccagtacgcctacttccagctgcaatcggccatgtgcaacatcggctacagcgtcagcgacgacaacggtacccgctactatgccgatgccggctactttggcggcctgacctaccgctacctcatcggcatcgagggcggtgctaccttcatcaacgactatgtggccagcaaccttgattacatcagccgtatcgccggattgctgctggtgggcggcgagatggaaaagatccgcgaagtggccgccagcgtgcccgtgtggctggtcaacgctgatgaggcagtggcccccaagtacgccgccgcgaacgaaaccgacagcaatggccgcaacggcagcgatttgatttactacaaccaggcgcatcccctgcagcaggtgatcgtgaccgaggatgaaaacgccgctctcgccgacatggtacaccgcgcttactatgacctgtttatcacggccatgcgcattcccgtggttaaggcgaacctgtatacggcctctaccctctacagcgactacaagtggaatcaggcgccctattccctggccgaccgcaatcccatcatcaacggcgttactcccgacggcatccacgtggtggagcatcaggaggaacgtttcagtgactacaaggcggccaatggcgagtacgtgaccacctggtatgagttcctgcccgaggaagtgctcaacaacaccgccgacgagcacagcattcctctgctgctttgtaaccatggcggcggagatgatcccgtgcaggctgtggacgagctgggttggctgaaactggccggtgaggagcgcatcgccatcatcgcgcagcgccacacctcggaaattcccggcagttccatctttgacggctctccttttgacaccatgtccgacgtgctgccccagatggtgcgctacatgctggagacctatcccgcactggatccgtcccgcgtgtacgtgagcggctattccatgggcggcagctgcaccaaccgcgccgtgtacggtgacgccagcgtgttcgccgccgcggtcaacatgtccggcacgccctacacccacaccgagggccaggacgagcagtttaaaaccctggacattcccatgatgctcaccacctgcacctatgacacctacacccactttgacgccgaaaacggcatcatcgctgaagacttccagatgaatatcaacgactatctgacttacaatgagatggacaccgtcacctttgactttgaaacctatcccatgagcggcttcaagggcgatgtgtaccgcgaaaccatggtcaacgacgaatacccgctctacagctggttcttcctcaacgatgagggggctcccatggtgggccttagcatcattgagtttatcccccatggcctgtatcaggagtacgccaatatcgcctgggattacatgaagcatttcagccgcgatcccgagacgctggaaatcgcatactgcccctattgacacctgtcctttcctggcgtgcccggcacggacggtgccgggcacgtccattcgccctttgaaacactgaacaaatatttaaggaggttatcccatgaaacgctttttgggcgcgctgctgtccctgatgataatgctcgcgtgtctgggggtacaggcggaggaaatttccctctacagccagttcctgaacaatgacgccacctttgaaacgctcgagcaggcccatcagaacggtcctgagcagcttgctgccctcaccggacgcacctacatgcccgatccggcactggacgcctacactcccggcaccacatatgtgtaccgctccgccggcacatacaccaacctcagcgcggcctaccgcatgaacaccaacctgctggtgtacaccgacgagcattttgagaccgccgacgacgcccttgcctatctcaggaacctgggtgtaaccgacatcattgaccaggcacacggcagcgcggtgctggttacgcctatcgacccggaagcgggattcggcgcggcggaccagtatgactacctcaggctgcaatccgccatgtgcaacctcggttacagccagaccaccgatgcaggcccctgctactatgccgataacacctactttggcggcctgacctaccgctatgccatcggcatcggtggcggcgccagcttcctgtgcaactatgtggctcccacgctggactatgcaggccgaattgcggccatgttgctggttaaccccaccatggatgacgccctggaggtatccgttcccatgccggtgtacttggtcaacgccggggagacggtgtttgacaagttccaagcggccaacgaagcctacgctaccgaggaaacctccgctacaatggcctctttcaaccagaccttccccgtgcgtcgggtggttgtggccaaagatggcacctcggatctgaccacctacgtaaacgatgcgtactactccctgttcacccgggccatgcgtacgcccgttgtcaaggccgggctgtttgtggcggccaacgagtttagcggctacagctggaaccaggccccctacacgctcacggaccgcaacgccgtgctggatggcgtgaccgcagacggcatccacgtggtggagcatcaggaggaccgcttcagccacattcaggcggaaaacggcgagtatctgcgcacctggtacgagttcctgccggaagaggtgctcgatggcacggccgcgccgcacagcattccgctaatcctgtgcaatcatggtggcggagacgaccccgtgcaggccgtggacgagctgggcctgattaccctggctggcaaggaacgcatcgcgttggttgctccccgctatgccactgacgtgaccggcggctcggtgatgagcgcgtcgccctttgatgtcaacggccaatccctgcccgcgctggtggaatacatgctggagacctatcccgcgctggatccctcccgcgtatacgccacgggttactccatgggcggcgcagccaccgtggaaaccatcgaatgggcaccccagctctttgcggccgccgtgcctatggccgccggcagcccgagcggcatctatgcccccactgaagagcaagccgccgcatttgacacctacaacgtggcgatgatgttcaccacctccgagtatgacctgcccagcgccatggatcagcagagccataccattggtgagggctacagagagtgtatcaaccgctttgccgttctcaacggtctgggcgagctgaactacgactttgagagctggcccttcgtgggttttgaagccgacagaatcgtgaccactttgctcaacggcgagtacgaaaacaccacctggtacctcaacaacgaggccgatttccctgtgctggccgtcagctatacggagctgctgccccatggcctgcaccctgaatatggcaccatcgcctgggagttcatgcgccattacagccgcaataccgaaaccggcgagctgatctatactccgtaaccctttctcgcatcaaaggcggcgagggctctcccctcgccgcccctgtcgccatggaaattgttttttccaacagatgtacgggggatgaccagatgaaaaaagagttggtataatgctggtgcgctgctgatgtacatgcagggagccctcacctgggaggccgctcagatggattccaaagcgatcaccaccataacggcctccactgactcgcccaccggctacctggttcccttccgctatgacaacgcagatgcccggcgggtacgtctggtttgcccagtgcaacttctccaacgaagcgcatgcctcccccttcatgcagggtcagtattccccctacgaatgggaaagcaacatgctccccctgtccatcggcggccgcgataccggccggtacgtcgagaatatggaaagggacaagaatggtgtgtggacctgcaacttgcctctgcccaatggctggtttggatactgctacgacgtggacggaatcgagggcgcgcagctgaaggacttcaccgatgccacctttgcagcacggcggcggataccagacgggccggaccaacctgggtgctgccaacgagatcctgaacaatgccatcgctgccggtgaaaccaagccgtgcgtggtggtttcgagggcctttaaggccggaagcggcatccgatggtggagcgtgggcatggactgctgggtaactatcgtcaagcccgttgtggaagcccgctacaacgtgtccgccgacatcaacgaccgcgccatcctgggcgattccgccggcggcttctgcacctgcaacatgccggccgtctatcccaatgagttccaatactacggcatctttgcggcggacgccaacaactttggccaaaactgtgactacgacaaggacgctatccgcgagcaaaccatcttcatctgctccggcctgcacgatcccgtagccattgaaaccacttaccccaccatgcagctcttctcggagctggatattccctttacgaagaggatgtaccccggcaaccacatgtggcacccctggcgtcaggggttgtaccatttcctcacaaacttgctctggcagtaatctatatataaggagaggacctcatgctcaaaaaaacgctatcactcattctggcaacggcactggcgtgctctgccggcagcgcattggcgctcaactactctggttcgcagggaaacgaagctaccttcgagctgctggaagaggcccgggtttccgccccggccgcggtgcagcacctggagctcaacgagtccaaaacctttgtcagcttccccgtgctggatggcattcccgaggatacggtctatgtctaccgcagtgccaacctctatggcggccgggcggccggccgcatgaataccaacctgctggtatatgccgatacacactttgacaccagcgacgcagcccttgcctatcttaaggggcttgggctgaccgatatcatcgacgcggccatcggcagcattctgctggttacccctgccgacggcgtggctttcggtcaggctgatcagggcaattactacaagctgcaaaccgccatctgttcgctgcaggctggcggtaccgatgcggacggcaacgccgtaacttatgcagaacccgaatactttggtggtttcggctacatctatgccatcggcattgacggcggcgcttccttcctgaacaattatgtcgctaccacctacgactttgttacccgtctggcgggcatgctcctgatcaatggcaccatggagtccagaagtcaggcagcggcgccggtgcccgtgtacctggtcaatgccggtgaggacgttgtcaggaagtattgcgccatcaacggtgtaaacgtgaccgaggagactgccgacaccgtgtcccgttacaaccaggagctgcctttgcagcgtgtggtgacagcggacggcagcctgggtgatgcatggtatgtaaacgatgcctaccacggcctgtttgtcaaagccatgcgcctgcctgtgggcaaggcgggcctgtacagtgcgggaactccctatcagggcctgggcaacgacaaggcgccctattccctctgtgagcgcaccgacatctcctccggcgtgaccgctggcggccttaccatgatccgcagggacgaagaccgcttcagcgcctatgctaccgagacgggcgagtacatccagacctggtttgaatacctgccccaggatgtactcgacaatacggcggctcccggctccgtaccgctgatcctgggcatccatggcaccaacgacgatccccgtcagtacgtagacgagatcggcctgctgagcctggccgagcatgagcacatcgccatcgtggcccccgagcacaacgctctgggcgcgctggacatccgcatcgaaaccgaggctctggctgccctggtcaactacatgctggaaacctatcccgctctggatcccactcgcgtgtatgccaccggctactccatgggcggtggctccaccatgaaggccattctctcctcgccggatctgtttgcggcagcagtgcccatgtcccccgtaaccttcttcggcgaggtctgggtgccgtccgaagaggagctggcccagtttgccaacatcgacttgcccgtgatgcttaccgcctccggcgcggacctgccttttacctacgacagcgtaaacgacaggattctggatgctctgcagggccttgtcaaccagatgctcagcatcaacgagatgcctgccatccaaaccttcgactttgaggccaatccattcagcggtttccgggccgaccggctggtaacccgcacgctgaacaacgagtacatcaaccgcacctggtatctggaaaaggacggtgtgcccctggttgctctcaacctcaccgagggactgacgcatgccctgtaccccgagtacggcaaggtgttctgggattttgtgaagcattactcccgtgacgcagccaccggcgaaatcgtctacgatccctacgtgtcctgacctgcgcgttgccacacggcacgggcgcggtgcctgccccctatggggggcggcgccgcgcccgtgttttttgggggaagcctgtatgcgctccggcggctattcgaaaggaaagcgctgcagaacagtagtctgcagcgctccccgaatcccggtgcagagtccgggagcgcggccatagcgcgagccatgcaacgctttgacttgtgcaaaagaccgttcgatggcctccgcaggtcgggtgcagttgcatttcccctgtaaacgcatccatctgtttcagggcttcctgccataccgggtgcatcgtctgctgtcttttgatttcggtgaaaagcctgttcttcccggaagagcagctcttgcggattctcggacggatgcatcatttccggccctctttccggttggcgatgtgcccggttagcttttgacgctgtggacagagagcggtcggttcacaggtaaaccgtcccttcccgaaacaggcctcaggcctccttgtatgcgtacctttggaatagcgcgggccgtatgccgtggtagctgagtgtatccggagaaggcgttcccgcagaggcagctgtaccaggatgccccactccattccctgctgattttcgaagagtctgttcggcacgccgctcttttgccgcgcgatggtgtcctgttattataggaacttttcaatgggcttctccgcttttgcccaaagaccgccggtgttccgctgcctacgccctgaaccttgcactgcaaggcttccaaacccgccgcacatgtggaatacagctcatggagactggaggccctacgaacctctcaaaagggtgatttgacagtctggaattcaacgcttatgtcgttgaattatttttcatttagaaaaccggagaactgggatgaacctcccggcccagggttggcaaccgctgaggcttttccgtgaaagcttctggctgccgacaaagccgggcattttcgacgcactgaggaggcagttttccgttccaccgtccggggactcagggaaagcatgtcaaagcgctttgccctggccggcaggcatcccgccatcgtagagaaaggtgagcgtgaccacggcgccgttttcgttgcgtatggacatgtgcatggtccctttgctgtaatagtgcagcctgagacaggtgttgatcagcccgatgtggccgtcgccgctttggatggaaagctggttgttttccacctgttcgatctgccggcggagacggctgaggctgtcctcggagaagccgttgccattgtcgcggatttccaaaatgaagtgagccttttcaatatgtccggtaatccatagctttctgagcgcgttggcaccgttgaacccatggctcagcgcattttccaccagcggctgaagggtcagcttgggcacggtcaggctcgtgaggttttccggaacgtctatggtaaattcaaggttgtcctcatagcgcgccttggaaagcatgagatagtagcgcgcgttttccagttcctcggccatggtggcggtgcgggagcgggcatcggtggaatagcgcagcatctgggcaaactggtcgcagatttcgatgacgtcgtagttgccgctttccatggatttggcgctgatgatgttgagcgtattatagacaaagtggggattgatctgcatttgcagggcgctgagctgggcctgcagggtgccttcacgcatggcgatttcgttcagggtgctttcgcgctgcttgagcatcaggttgttgaaggtgagctccagctcgtgaatttcggggtcgccggtggaggtgacggtagtggacagcgcccggcgtatgctggcttcatcgccgggggaactgtccacaggagattgctgcaccttgcgcgtgagctggcggatggactgggtaagccgcatggaaaccagcgcaatcagggccagcgtgggaatcagaatgaaaatggacgtgcggatgatggtctgataaatgcgcgacaggctggcttcgatgatggcgttgtccttggccacatacaggctgaggttgagccactccacccgcgtatgcaccaccgactggctgatgcccaatgccggatcgctccagtcaacgatttggtcctccggcatatccgcgggataggggaggggcgtgccggtgctggagtaaagcaaggtaccatcgtcaaagcccacctggatggatgcgttttcctggctggcaatgtccatgatggattccagctcggaaaattcgttgctgacttccagatagccaagcgcattgccgtgatataccaccgcgcgcacgatgccgtacacctgcatatcacggcgcaccgcaaaaaagtcggagtgcgaggccaggatatggcgctgggtgggggagcggtccacctcgtccagccaggggagggcggatatcacctctcccgcccgctcggtgccgctgacgaggtagtcgtccttttcaaaacggctggtgacaaagtcgccagagcgggtataaaagctgacgcgataaaagttttccaccagaggagaccggtataaaagctgcaaaacggtgttgcgcgcggccgtacccactttttgatcgtcgctgtcgtcgcgtacaaactggttgattgccgccatgaaggaggcgttatccagcagttcttccaaaaccaggtccatcaggctgatctgctggtccagcgcctcggatacggtatggctgatattgtgaaactgctggttggacaaatccgtaaagctgtcgatgttgagctgcgtggaataggaagagagaacagtcaccgcagcgagcatcatggcggaaaacaaaagcatcatcttcacgttcagtttcatgaatccaccgcctgttgcaggatacaccgattatagcacatgcatctgccccgtataaaggagacgggtatgtgcaaccccgcactgtgcggtattttacctgcggttgtgctggattttgctattgcggtcggcaaaggtggatttttgcatggcgggttttatatcttgttgcgccgaagcggcacaggaagcttataatgatgttgagaaaaggcggagaaaatcgccgaaaatgtttgaccatcataacgaggaggcatcactcaatgaagatcgcaaagtcactgaaatggttcagcttggttctggcactggttttggccatgtccggctccgcgctggcatattccgacaggaatttggaagcacccaaggccaaggatgtcgtcattgacggtgatctgagcgaatgggatttgacccggtgcctgacgattgacagcgaaagccagattgttgaccagattgagcactgggatggcgccgaggactgctccatggaaatctacgcgatgtgggatgaggaaaacctctacatcgccgcacgcgtgaaggacgacaccccctttgtctaccgcgaaggcttcccgctggacgagctggatgccatcatcctgtttttgagcaccaacccggatgccgatcctgaccgcaccgcctatgaggccaccgactggcgcattgtgcagtccaccgatgaatacgactttttcaactatgtagaccgcagcatggtggccgataacaagggctatgagacccagggcgaatacggcgacgagctggtttttgatgactacgaagccgctaccgtgcgggacaaggaatacggcggattgattctggaaagcaaaatccccctgcataacctgtccaacgaccagatcccgcagctggttcccgcggcgggcatgacgattggttttgacttctccgtgctggacgtggacctgccctgccccggcattcacagcctgcgcatgcagtcctccgccaatctcgaaggccgcgaccgcacgcccgccagctacgatgttgacaccaaccccagcctgtggggcacgctgacctttgttgaagagtaagggaaggaggattccaagaagatgatcttgaaaaaattgggcgcaatggttcttgcagccgtgttggcggcgggtctgctgcctgccggtgccctggcggccaggaacgaaaaaatggacgctgaccagatggacatccccgccattatcgaggcaaaggacgccgaagggacggtcaatgtgtaccactggtggaccgccggcggcgaaaaggatgccattgaaagcgtggttgacggattttccaatacgtaccccaatattcgggccaagtccaacgccatccccggcggtgcgggcggcgcgatggtcatgaaggtcaaggtgcttcagcaggccggcaagagcccggaaaccttccaggcgcaccccggccaggagatcgaaccctacctgacctccggccttctgctcaaccttaaccaggtatgggactatgcctccatcggcacccgcgccctgcccggtctggaggacctgtgcaccgcttcggacggcaacaagtatatcgtgcccatcggcattcacaagagcaacgtgatcttctacaacatccacgtatttgaaaagtatggcgtggagatccccgatcacgaaaacatcacctgggatgagttctggtccatctgcgatcagctggccgcggccatgcccgacggcgaatatcccatcgatctgggcgaccgaaagggctggcccgcctgccaggtgttcgaggacatcatgatgggcacggatccccagatctatgaggacttcatcaacggcaactacaacgttgaggacgtgaccaacgtgctgtccacctattcccgcctgatggaatacgtggcgcccgaccactccagccgcgactggtacgagacctccggtcagctggtggccggaacctacgccatgcagatcatgggtgcgtggatgcagcccctgatgaccagcatgggccaggtgtatggcgaggactatggcgtgttcaccttccccggcacggaaaactggtttggcatgtgcattgacggctttgtggtcagcaacgactccgccgacgtggaggcgggcctgcgctgggcgtataccatgtccacccctgaggtgcagaccgctttttccaccctcaaggagtccatctcgccctatacggataccccggatgaaacctataacgaattgaccctgaaattcaaaaacgaactcaccgcggaaaccaccaacgtgttccccagctttacccacggcaccgcgctgccctggagcgcctccaccagcctgcagacgcagattcaggagtttgccacctcggccgagcatgatgcggagtattttgcaaacaggatcgtcaatattctcaaggaagcggatgtgaaaggagactggaaccttgttgactaacaaattgttccggcgcggcctgtcccttgcggcggcggtggcgctggcgggaagcatgatggcgggcacagccttcgccgagggggaaagctatgagcagcctgtgctcgccccccatgtcaagtccatcatcgaggtggacggatatcagtttatcgacctcaatgccaacggagaactggatgtttacgaggactggcgccaggatgccgacacccgtgcggatgatttggtcggccagatgaccgtgcgtgagaagattgcgcagatgcagcatcccaccttcctgccccgtgcggacggtgaaatccctccctatctgcaggagtggtgcaaccaggaaagcatcggcatgctgctgatccgcgaactgagcagcgtggaggctgccgccaccaccatgaacaccatacaggaatatgcggaaggctcccgtctgggcgtgccggtgctggtgtccatggactcggtccacggcctgtcctacgtatccggctcgacggtcacaccgcataacctcgcgctggccgcaacccgcgatgaggaactggtgaccaggctggccgaaatcgcccgtgaggagcatatcgccgtgggcgtgcgcatgacgctgtcccccgaggcggatatcgcctccgaaccccgctggggccgtgtgatggaaaccttcggcgaagatcccgacctggttacgcagatggtaaccgcgcaggtggtggccttccagaatggggcggatgggctcaacagcggctccattgtggcgtgcatgaagcactttcccggcgccggcccgcagatggacggcaaggatacctctcccattatttccagcgaagaaacgctgcaaattcacctcaagccttactattcggctctggaggtcaacgtggcttccatcatgccgtactactccgtgccccttgccctggacatggaaaactccgcgatcggctccaaggctaccctccaggacctgctgagggatcagatgggttttgagggcatcatccagaccgactggggcatgatctgggccattcaggaggccctgggcaccatgaccggcgaggaggtttccgacgaggaagccatcctgatcggcgtgaccgagagccgcgtggacggcatcggcggcgagagcatccggctgatcgaccagatggaacagtataccagcgaaggaaaaatcgatgaggaaatcctcaccgcggctgcaaagcgcatcgtcaaggtcaagtttgaaatgggcgtattcgaaaacccctactgcgacgtggcgtatgccgtgtccttcgtgggcaacgaggagagcaaggccgtgaatctggaggccgcccgcaaggccatgacgctgctgaagaatgacggcattctgcccctggaccccaacgccgagcagaccattctggtgtgcggcccacgcgcgggcgatatggactcgctggtgggcggctggtcctccgcacaggagggactgaccatcgcggacgcggtggccgaatatgccggcgaaaataccaccgtcgtctatgaggccgaggatctggaacggatcgcggagctggccgaggatgcggacatcatcatcgtgtccgtgggcgagcccagctaccagcatgatccgccgtggggctatgatacgctggaaatcacctccagccagcaggagatcctggaaaccgccaaggccagcggcaagcccattgtcacggtggtgaccggtggccgcccctacatcctgacctggtgcgacgaaaacaccaacgccattctggaggcctattatccgggacagcagggcggcatcgccatcgccgagacgctctatggcatgaacaatcccaccggcaagacccccatccagttcccgcgcgatatggcgtcggtcaacaatcaggagggcgatgtgtcctttgatctggagaacccgctgtatgactacggctggggcctgagctacgacgaataaaaggtaggcaggagacaggagcaggaacagagagggaaaacacgcggcgcgccactgtgcgccaccgccgccgcgcctcctttcccgctcctgttttcttcaaacaaacgaatggaggcactgcctgtggagtcattgtccgaatttcttgagaacctcggctacatgaccttttcccatgaagggttctgggccgttctggcggtggttgtggcggttgtggtcatctaccagctgctgggcgcttttgcacccaaaaccatcgcgccggtgcgggggtttttcaagcggcacccgctggtgtggctgctgattcccgccgcgctgctcatttacttcgtctacgtatcgctgggctggaacctgtgggtgtccgtgtccgactgggaggcgggcaacctggaagccagctatggctggggcggctttgacaactacgcccgcatgttcagcagtagccagttctggccgacgctgaaaaatacgctgctgctgttctgcctgattcccctgtgcctgctgctgggcctggggctggcgctgatcatggaccagggcctgcgcggtacggcggtattccgcacgctgattctgctgccctttgcgctgtcctttgtggttacggggacggtgtgggcttacatgtaccgtcccaccggcggggtgctcaactcctttttgagcattctgggggtggatgtggccgcggccatgaaggaaggccacctgatgtgggcgtcctccaacagcagcatcatgctgtccatcatcatcgccatggtgtggcagttttccgggtacgtggcggtcatcttcctggcggccatcaaaaacgtgcccaccaacatcatcaatgccgccaagctggatggcgcctacatgccccgcatttatggaaagatgatcattccccagctcaagggcgccatgggaagctgcattaccatcctggccatgtatgcgctgcgctccttcgactttatcgtatcactggtagggtacaccacctcctccgcctggacgctgcccgtatggatgtacaacgaggcctttcagagcaacaactttgcctactccgcggccatcagctgcttcctgctggcgctggtgctggtgctgattctgccgctgacctactggaccaacagaaggaagtgagcctatgcaaaacgaactgaacattgaacgcagccgggaaggccagcaggcgcagacactcagaatcagaccccgctggcatatgacggtgctgcatgtggtgtattacctcatcatggtggcctttttggtattctacatgctgccgttctggggtac

SEQ ID NO: 1360 - DNA, 32759 bp, Unknown
  16S sequences of unknown bacteria
atatttgtttatatctatatattttgttgtatataatgtgaatatttttcgcaaaaataaagcctgtgccactgaatcagcacaggcttttaatcgtacattcacttgttcttcggtcacagccagggatgttccccttcgtgccgcttcggacgtcccatcagaagacggatagcgtcctccgggggctgtccttcataacagacccggtagcactgctcggtaatcggcatgctcactccttcacggcgggccagcttccaggcggcaccggcggcgagatacccctccaccgtccccacctgacggacggcttcggcggggcttatcccctggccgatcaggatccccgcccggcggttgcgggagtgcatgctcccgcaggtcacgatcaggtcgcccatccccgacagcccggcaaaagtctccgccttcgcccccatcgcggcgccgagcctcgccatttcggcgagacccctcgtcatcagggccgctttggtattgtcccccatatccaagccgtcgcagatgcccgcggcgagagcaataacgtttttgagcgcaccgcccaattccacaccggcgacatcccggctcaaataaatccggaaagtgggattcatcagcaagtcctgtacccgctccgccgcctccaggtctgtggacgcgctgaccaccgaggtgggcacgccccggcccacctcttccgcgtgggaggggcccgacaggactgccacgcggatgcccggcagcttgtccgtcagaatatcgctgaaccgccggagcgtggcttcctccagccccttgccggcattggccaccaccgtatccgggcgcagatgaggccgaagtttttcggctgtctgacccacggcgaaggagggaacgctcagtagcaccaaatcggcgtcggccgcacaggcgagatccgaggtcagccgcacgtcacgcgggatcgggatgcccggcagcagttttttgtgttccccgtgccgccggatcccctcgatttcctcttcaaaaggggaccacaaggcaacatcctgcccaaaccgggacgccatcaccgccagagccgtaccccagccgcccgcgccacagaccgcgatatgagccattcccttctctccttttcacaatggagtcataaaggcatcctgtcatgaccgccaaaatccccagggccacagttccctaccatagggagaggttgaggcaataccctttgagttgatgttcataaaaagacggtcggcaaaaccacctgggggttcgggggaatcccccgacggtgctttgcgtcctttctccgcacggagaaagatggtgggccgcgcatgggacaacccgatcggcttagcagcgtattgtatgcacggacataccgaaaagggcttcgctatacccgctcatgccgccataaagcacgtgccgtgcttttcccctttttggccgggccggcgttccctttcgggaagccggcaggagcgccggcatccgaaccgacgatgaaacgcacggggccggccatgaacccgtcggtttgaagctcgaggaccggctttacatggtttcgggggcgtcgatcttcagcagatgcagcgcattgccgaggacagtccgagcggcggcacacagggccagccgcgcctgaagcagcggctcggcctcccctttgacccggcaggcgttgtaaaacttgtggaacaggctggccaaatcgagcgcataccgggtgatccgggaaggatcgaactcccgggccgccgccgcgatctcctccggaaaagcggcgagaaagcggatgagctcccgttcctccggcgccgagagcgccgccagctcgtccgccgtgcaggcacggggacggatcccttccccttccagattccggaaaatggagcaaatgcgcgcgtgggcgtactggacatagtacacgggattggaggcggactgttccacggccagatccagatcgaaatcgagctgggagttggcctcccgcaggttgaaatagaaccgcgccgcgtcaatgggaatctcttcgaggagcgtgaccagggtgatggccttgcccgagcgcttggaggccttgaccacctcgccgtcccggatgagccgcaccatctgcatgagcactacctgcaggcgggccggatccacaccgagggcctgcagggccgccttcaggcggggcacatagccatggtggtccgccccgagcacgtcaagggccagatcgaacccccgggtgaccagtttattgtaatggtaggcgatatcgggcaccacataagtcaatagaccgttggaacgcaccaggacgaaatccttatccgccccgaattccgtcgctttgaaccagacggcgccgtcctgctcataggtaaaccctttttccgtcaggagccggaccacattcctcgcctcgccgttttcatgcagggaggactcccggaaccagcggtcgtaccggatgcggtaggtggccagatcccgctccagtcccgcgatgttcagaggcagggcgtacgccaccagggctttccgccgctcgtcggaaggaacgtccacataccggtccccctccttggcagcgaaagccttggcatggtccactatatcctgcccgagataggcctcctccggcatctcgatcccctcgcggtagagctgcaggtagcgggcctcgagggaccggccgaatttttcgatctgattgcccgcatcgttgatatagaattcccggctgacctcatagcccgcccaggaaagcaccgacgccaggccgtctccgagcgctccgccccgggcgttgccgatgtgcatggggcctgtcggattggcggagacgaattccacgagtacctttttaccctgcccgtagctggagcggccataccggtccccgccggccagcacagcctccaccgccgccgcgtaataggagggggcgagaaaaaaattcaagaaccccggccccgccacctcggccttttccagaaaggtaccggtcagatccagatgcttcaggagcgcatccgcgatctgacgaggggcccggcggaacgcccgggcgctgaccatggcggcgttgaccgcatagtccccatgcgtgcggtcacccggaacctccacgacaaaggcgggcatcggttcggcgggcagctccccagcggccacggcctccccggccgcgcgcagaaccgcttcccgcacctggtcttccgcgatcgatacaatgttttgcatgaaacagcctcctgattatgaaacttccttaacagagatacgcacgtcgtgtgccgacagggcgccggcattcgtatcgagcgtataggcaaaccgcagctctcccccggagccggtcagggtactgcgcagctcgctcgtatacaccccgagcagcagcgtcccgtaaggggtggcatagctgcactgatggcggcgccccttttgcaggacgaggagggaatgcaggctaccggtccgttccagcagcacctcatccggatgcacccggatggtggtggtaaccccttccataccggtcgccgccgattcgtcatacgtgagcgtccaaccctccccggccggctccatgccgccggcggtggtcagttctatagtttcttcctcaccgtccacccgctgggtgccggtgatggatatgagcacgtccatcggattcttcctcttttcacacggtatcgggggctcccgcacccaacagggtttccatgtccacccgttcggtatccccatccacctcccgcccgaggaacatccgggccacgtgggtaaaatcgtccggcaggtcgctgacataaaaacggcacattcccgcccgtttggtccggttcagcgccccgtcccgttccagacggtcagcgcagagcgtcgcgcaggccgatcccgaatccactagagcgacatccggccccacgattttggagataaccggggccaggagcggaaaatgtgtgcatcccaagatcagtgtatccacgcgtttatcggccagcggggccagataccgccgggcggccgcgagcgtagcctcattgtccggctcgatccatccgttttccacaagggggacaaacagggggcaggcgacgggtatcaccaccgcatcgggccggatttccaaaatccgtctctcgaaagaggcggaccggatggtcgccgccgtccccagaatcccgatgcgccctgttttcgacgcggatacggcggcgtcggcggtgggttccaccacccccatggcggggacaggcaattcccggaggatatgggacgcgaccgagctgaccgtgccgcacgcggcgatgatcagcttgacgcccttcgacagcaggaaacggcagtcctgccgggtatatttttcgatcgtctcggggctgcgggtaccgtaggggacccggccggtatccccaaaatacacgatgtcctccccgggaagggtcgacagcagctgccggacgaccgtcaggccgcccaaccccgaatcaaaaacgccgatgggccggttgtccatccccattcctcctctgcgcgccctgcacgctgaagtcttatcataccatgtttttccccccggcgcaagagcggcgggccatccctcccactatatgcggcggcttcgccaaacagtccatccaggagaggccgggacagagagaaccgcggggcaggacgccccgcggccggtatcgtcaggaggtcttgacggcaaaattggagaaatccgctttcaggttcagggagggcaccttcagcgagagaaggctgccgctctccgggtcggacaggagctcgaactgcccgttgaccgaatccccctcggtcttgacgccctcctctgtcacccgggcgccgcccccgccgccgcggagcgcgacgtcgagcgcgtcgacgattccctttccaagggcgctttccgggatttccgagggatcgacgccgaaggtcaggccgtacatcttcatcgagatattctccccatcccacatcatggtcatatccttgagggaggcgggctcggtgaacgccagggtcagggtacccgcgttcagccgggtgagatggccggtgatctccatgtcccggtaggtgagggcgacatcgcattcgaagcccgtgaccaccggcgcctcggccccgccgccgcttttttgacaactgctcatggccaggatcaggcagagcgcggcggccgccagaaagaccagggccgcgacgcctcttttccacgagatgcggcagaccataggggctcaactcctatttttccagattggaaaacagtccgcccagctcttcgatcatatcggagggctgcatcgcgtgctgggacagccgggccgcggcccgatcccccgccagaccatgcagatggacgccgcacatcgccgcctgggctggttccattccctgggcgatcagcgaagcgatcatcccggccagcacgtcgccgctgccggccgccgccatcccgggattgccgcttttgttcagcagaacggcacggcccggggcggcaataacggtctgatagcccttgagcaccaccacggccttctgttcctccgcgaagctgcgggccgtctccacccgattctgctgcacatcctcgatgcggcagccgatcagtctggccatttcccccggatgcggcgtcagcaccaccggcacgcgggctgttttccctatatgtatatgccccgccgccgcatttataccatccgcgtccaataccaccgggcaagaggcctgcgcgagcaagtcctccaccaccgccgtgaccgaatccccccggccgaggccgcatccgcacaaaaccgcgctggcccgcccgagctcctcccgcagcaaatggcgcgcctccgccgcgaccagcccgtccgatgtttccgggagcagacggtagaccgcctcgaggttttgccccgccacggccggatacagtgaacgcggcagcgccgccgcaaccaggccggcgccacagcgctgcgcagcccggacggccagcatggccgctccggccatccccacgctgccgcacaccgccagcacacggccataggtccccttgtggctgtccagagggcgggggaggaagcaggcccggaccatttcccagtccacgatggtctggctcggggcatactggtcaagcagggcgggatcgatcccgatctgcgccacctcgaccggcccggtaagctccgacgccccatggacgagcagccccggcttcatagccgtgaaggtgacggtatactccgcccggatcgtatcctcatcgtagacccccgagtcggcactgaacccgctggggacatccaaggcgataacgggcgcgtcgctctggttcgccagccggaacaccgggcgcagcgcgtcgggcagacgcccgtggaacccaatgccgtagaccgcgtccaccagcatctccgcctcccgcactgccgtcatcgccacatacggctcggtttcgagattgcactgggcggcgccgatcccgaccgcgcgggcatacatgtccgccgcatccgacgtagccggcttgccgcagaggaggacgaccgtcacctccgcgcccgcctccatcagcttgcgggccacgacaaagccgtcgccgccgttgttgcctttgccgcacaggaccgacaccttccggccccggacctcatagcgcgagcggatcatccggccggccgcgctgccggcgttttccatcaagcgcggataatcgaggccgcccgccaccgccgccgcttccaccagccgcatatcccgggctgtcaaaatcttcatgactcatccgtcctttccgtctgccggagtatagccggaaatccgcgcggcaccctgcccccgtgcccggatgcaggcagccgccttccagccgccgatgaaaaaagggcggggccccgggccgccaagcggccgctggggtccgccccatccgtaccttccgtctattgctgcgtaagcttccggttgacctccagcatcagcagcttgggcagggaggctttgaacgcgtccatgacccgctcctccggctggaacagcaccagagtgctgccgcttttcttgctgtggtaggtgaagtaccacacccccggcgccgtttccgccggtgccgccaccacggtccggtcgaagcggcgcccggcgaactccgtgggattatacggacccgctgtttcgatcttgctgcccgcaaccgacaccacccgcttgcgcttgcgctgcgcgatgatctggtcgatgtcgatgtccccgttggtcacgctgtactcatattcgacattctggccggtgatgagccaccaggccccgtagatgagcagcatgtcgatcactagggaaaaataattcaggaacagaaacagcacaaaaaccaggatcacgaccaacaggatcgtcccggtgataatggcgatttccttcggcccctttttcttgacgatgatctgttccacaaacgtatccatcttcgacactccttcgatttgaaaggcccccggcctgtttctgccctggaaacgcaggactcggacgcccgggccggacgcgcatggccgccgctttttcgtctagtataccatacctcgaaaaggcttttcaacgtctcggcgcaaaaatccgtgaacgatccgtaaacattgatgccgtccacggccgcgcgggcgggggatcacggcaccaacggccactcccgccccggcagcttgcgggcgtagtaatacatatccgccacccgcccgccgaagtcggcttcgggcagaaaggcgatccgctcaaagcccagccgctcggccagccggaccgaacgggtgttggccgcgtcgatgcaggcgcacatccggcccagccgcagtttgccggccgcgtaatccaaaacggcctgtgccgcctccgccgcatagccctttccccaatactcccgcaggaagagatagccgagctccccgagatagccgtccaccacccggttgatggtgcattccccgatatagaggtcctccccccgcagggtcaccgcccattcggtagggctgcgcctgcggacgagctgggcgagcatcgcgccgtccttggggggatgcccgcccagatagcggcggatctcgtcgtcctgataggcctacatcatccggggaatgtcacgatgctgccggcggcgcaggcgcagccgttcggtttccaaaaccggcgcttccggtttcgccatctcagtcatccccctttcgcccgtcaacacgcttccaatgggatacagtatatcacagatacgtggatttggaaaggccgggaaggggcgaaaaaaggagaaacccgcctcttttctccacaactgtcatctccccggcgggtccgcaggcagcggggctctctccctgtccgccagagcgcgcacccggtcggcggacagggccgaaggcagcggaagacgggcctgtgcatccggatcttcattggacaggtgcatttcggtcaggtgtttccagtatttcttcggcatatggttgcgccggcagaccggattggtccgttcctttatcgcaatggtctcataaaaggccttccacatccggcgataggccgtgtcgtcggcagaaaacgccggaagaaccaggtcctcgtcggtggcgaccacccaggttttggtgtcggatactccgcacagtctgtgcgtcttgtcgtggatgatgaagggctggatctgaaaccgggagacaaagtgcggcatcagcatggctacaacgttgtgttccggggtgatctccccatagtagatgcctccctccagcttggaaaagcggataaactgccggagcattcccgcctcccgcccgacaagcgaaacgagcttttgcagccgcatcacccgttcgtcggtgatcttttgatggataacccggccaattttcataccaaatcgtatatatttgtatataatatcctctttgtatacagaattcgactgaaaacacgtccagacctgggcgtatccatcggcgcccaggctttttttcacaccggcaatcacccgttccgccttggcgtcatcggttcgtatctccagatagcggcggccgagctcctgctggcacacggccgcggcatggaccgagatcggggccggatgaaccgaataggagtcgaaaaccgcggtgagcagcccttcgaacgtgccatcggtcaggagtgtcacatctgtcccgtcaggcatttgagccggtcctcctttccgggcgaaagctgcggcagatcgtcgaaggtgagctgccgcaccggctgtgtcaggggcaggctgcccggacgcagccggatatccgccgtcaggttctgataaatgaagctctcagacaggcgggtgccgtccgccatccgccccttgcaggtgatgaaatagatcgcccgcttgagcaccaccccgatcttcttcaggtcgtcaaaggacagagagcccacccggcgggcgctcagaatccggtcggcggatttcacgccgatccccggcacccgcagcagcatttcccggtccgcccggttgacctcgacgggaaagcggtcgagatgatgcagcgcccagttgcatttcggatccagcagggggtccagggacggatgccgctcatccaggatctcctccacctgaaagccatagaaccgcagcagccagtcggtctggtaaaggcggtgctcccgcagcaggggcggaggctggtccttgggaagaagggcgtgggtgcccaccggaatatacgcggagtaaaaaacacgtttgagagcatacttcctgtaaaggccggaagccagtttcatgatctggtaatcggtatcgggggtggcgccgatgatcatctgggtgctttgcccgccgggcgcgaaggagggggcatggcggtaaaccgccagctcgtgccggctctgggccacccggtcgcgcacggcggccatgggcttcaaaatgctctgtttgcttttgtcgggggcgagctgggtgaggctgcgttcactgggcagctcgatgttcacgctcatccggtcgcacagcagcccgattttatcgataagctcgggggaagcgccggggatggttttgacgtggatgtatcccgcgaaacgatacgggccccgcagcagttccagcacccggcacatacgttccattgaggtatccggatccttcaggacacccgagctgaggaaaagcccttcgatgtaattcctccggtagaactccatggtcagggtcgccagctcctccggggtgaaggtggcccggggcacgtcgttggagcaccggttgacgcagtactggcagtcgtatacgcagctgttggtcatcagtaccttcagcagcgaaatgcagcgcccgtcggcggcaaagctgtggcagatgccgcaccccaccgccgatcccagcatacccgcctgcccctcccggtccacgccgctcgaggtacaggccgcgtcatatttggcggaatcggccagtatccgcagtttgtccatcagttccaacgtcgtcacctccctgttttctcagtatagaacatatgttctgatttgtcaacaaccatcgagcggttttcttttcaggaacgcagggggaaggcagacgccagaaccaaggattcaccaaaagagggttccggctttggatgaggccgcggccgaaaaaaacagttatgccggggcccagacggtcaaaaaagtagaaaaagcgcagtcgatggcccaaacggccgcggcgagttcaggatccgtgttttcaagggcacgtgtctcgaaaacactccttataagcgacaaagggcggaaaacacgatgtgtttccgccctttgtcaagagcaggggtggacccggcggggacggagggtgcaagatgagcgatagcaaaccgccgtgatccggcgtccccgtccagccgcttggcggcctatcctttcaggccgttttcctgccgttccatgttttccacgacgacatcgaagatgtcacccaaagacgctccgtaagcgagaacgtcccagggctcgttggtatgatagtggattttgatgagggtgtcgtcccccacggcgagcagacagtcgcccttgaaatgggcggtgatgtagtcgtggatgtcgtcctcggacaggttttcgccctcgatgagcagttgggtgtcgaatttgtattccagcatgccggtctctccttctttgggatatacgatccccctcatcatacagcatgcgcaccaaaatgtccatatatacgggcatcacccggaggaacggatccccccgggtgatgccgggccggcgccttaccggcagtagagctccaacgcgtggtgaaagaaggcggcaaggccttccttctcctggtcgtaataggccctgaatcgctcgtccgtctcgtacatctccccgagagagcggtgcagctccttggaatacacgccctccggatagtagagctcgagccactgacggtggaggccgcaggcgagccgggcggcttcccctccgggctcgcccgcctccatagcctccttgagcaggcgaaccacctcgccgtccagctcctccgccttccgataggtcccctcgctcatgtcaaggaaccgggcgccggccgcgtccatgatgccgtcgccgtaccgccgccggagctcggagccgtaccgccgctcattttccgcgtgggcccgctgcttgaagccctcgaatttttcagtatccgacatatcttcctctcctttcagggaacggatggtttggcggacgttcgcgatcaggatatccatccgttcccgtttggcgactaaggcggccagatgttcctccaacgccttttcccgattgaagccgggggcatcgagaagtcggcggatctcgtccagaggcataccgagctcccggtaaaaaaggatctgctgcagccgatccacctcctccggaccatagaagcgatatccgttcgaagcggtgccagccggccgcaatagcccgatctgatcgtaataccgcagggtgcgggacgtgatccccgcaagcctcgcgagtttatccaccgtatagtccaacccgaccactccttctgtctgtgggagggtgtccggccgcggtccggatgccctcttctgtgaggatacaccttgacgctgcgttaatgtcaaggggatttgcaaaaataaaacggctccggctgcctgggggttccagggggatttcccctggtgcttctttccctctttttgaatagcctgggacaaatgcgggagcatttgtgaggaccggggcagactatgcacgtttttatccgcgttcagcccggcccattgtgtaaagaaagggggtgccaaagcacagattgttgtttatgacatgagcgcataaaaaaatcgtagtttattgaaagggtttggcctgcgcggccacatcctttctccgcgtggagaaaggatgcaaagagacgccgggggctttgcccccagacccccgggcttttggccggttttcttttagaaaaaccggcattgccgttttttcttgaaccgacgtccatacaacaagggggctctgggcccccggagttggagtgggcgcagagccaaaaaaatgcagccagccccaaaccccggggccgcagcccttttttatcgttgattcaggcagccgtgctaccgccggctttcctctaaagatagccggcaaaccacccgggggtccagggggcgatgcccctggcacgtctttgccttctttcttcgtgcgaagaaagaagatggcccacaggccagacctgaaaaagacgggtatagcggtttgtccccggtgacaaaaggatgcaaaaacgcccccgggatcccccggaccccaggtgatcctgtcggttctctttttaggagaacctccccggcagaattaaaaaaccaacgtccatacaacaagggggcccgaggcccccggagttggagtgggcgcagggccgaaaaaatgcagccagccccaaaccccggggccgcagcccttttttatcgttgattcaggcagccgtgctaccgccggctttcctctaaagatagccggcaaaccacccgggggtccagggggcgatgccccctggcacgtctttgccttctttcttcgtgcgaagaaagaaggtggcccgcaggccagacctgaaaaagacgggtatggcgggttgtccgcgcatacaatgcgccgtcaacccgatcaggaagtcgatggagctccccccaatccaccgtatatgatttaagggccattgtgggacctcacaatgacggtgattcgcctcggagaaccgtccctggctcagaacatcgacaaaaacggcatggccagaaccaccccctatcataaagggaggcggccccgccgtttgattgtgtatcccatttatgctatactgtttttatctggatcgaaacgggaacccgctcaactatacttcacgaagggggaaaccgcgtatgaggcatgcactgaaaaaaggggatgtcatcggcatcttctccccctcttaccccttgaccgccctcgcgccggaagccactcgggcggctatccgctatctggaaaatcaaggataccggatcaagccgggccgtctatgcgggaaacaggatttctaccggccgggtccggctcgacgcgggacggcaggaaatcacggtccttaaggcctgagccccgcgcaggaggccttttacccgccgatccgccagtaggacgcgctgtatgggttaagctcgctcccgccgccgaagtcgtggggacgccccgtcagcaattcgtctgcccgcccggccccggcatcgaaatgcgccgtatacggaaccgcttcggtattgaaggcggcgagcacccgttccccctccagccgccgctcgaaaatcagttgccggttggtcatgaggaggatccggaaatccccatggcgcagcgccgggctttcccgccgggccgccgccagggaggcgatgaaacgggtgagcccgttttcggccggttccggaaagcaggggcgcaggggcgcgtcggattccgatttgaccccctcggccccccactcgctgccataatacacgcagggaatgcccggcatggcgaacaggagcgcatagagcagcggcagttgggcggggttgcgcaaaatgctggccgcccgggtcacgtcgtgattgtccgcaaaattaaacagatgcagccctttgtataccgtccagggctcggggccgaactgacgctggagcgaatgcccgatctcgaacagattgtccgaattgaggctggaatgcagacccttgtagcactcgtaattggtcgcgctgtggagcatcccgtcgcagaccagccgcctgtaatccccgtggagcatctcccccaccaggaaaaaatccggtttgagcgcgtcgcagaggcggcgcagccggcggatgaagtccggctccaggctgtaggccacgtccagccgcagcccgtcgatgccgaattcccggatccacccctccacgcagccgagcagatgcccggccacctcttcgtttcgcaggttgagcttcacgagctcgtcatggccttcccatccctcgtaccacaatccgtcgccatacccgttgttgccgtcgaaacggacgaagaaccaatcccggtagggggaagcctcccgatttttcagcaggtcctggaacgcccagaagccccggcccacgtggttgaacaccccgtcgagcaccacccggatccccgattcgtgaagggtgcggcaaagggcggcgaattcgccgttcgttcccagccggccgtcgatccgggtatagtcccgggtatcgtagccgtgcgcgtcggagtcgaacaccggcgtaaaatagaccgcatccgcatggatgcgccgtatatgggggatccagtctgccactttttgcagacggtggcccggcacaccctcgttcttgtccgggcagccgcagaagcccagggtatagatctgataaaagacactgtcataagcccacatgatggtaccgcctttccgcgcgggcgccgcccgctccaaaacgctcatggcgttgattgcatccaaaggacacgtccctattagtatagccgggacagcaccgggacgcaacgcccctttttcttccaatgggtatttgacgcgccgcgccgcacatgctatactgggaaccggaacaatgtgaggaaggaccggtgctctatgcaatatcgcccctttggcaaaaccggggaatccgtctcggtgctgggattcggtgccatgcgctttgaaacggaaaacggcattatcaaggaaaaagaggccgtttccctgctgcgcgccgccatcgacggcggcgtcaattacgtcgatacggcttatttttatctggaaggccaaagcgaggccctggtggggcgggcgttgcgggacggttaccgggagaaggtccatctcgccaccaaatcgccggttttcgcgctggaatcggccgaggatttcgaccggattctgaacgagcagctcgagcgccttgagacccggaccatcgatttttatctgctccattccctgagcctcaagacctatgaggaaaaggtgctgggttacggcctccttgacaaaatggaaaaggcccgggccgacggcaagatccggtatatcggcttctccttccacgacagccacgaggcgttcttgaaaatcctgaacggctacgacggctgggatttctgccagctccagcttaactatatcgacgtggagaatcaggcgggcctgcgcgggctggaagaggccgcggcaaaggggctcggcgtcatcgtgatggaacccctgctcggtggcaagctggccaatcccgccccgggggtccgggcggtgctgccctcctcccgcacgccggtggaatgggcgctggacttcctgtgggaccgtcccgaggtcagcctccttctcagcggcatgaacgcgatggagcaggtatccgataacctcgcatacgccggccgtgcccgtccggggatgctcaccacggaagaccgcgcgatgttccggcgggccaaaaccgtttacgataccatggcgttggtcccctgcaccaaatgcgcctactgcatgccctgcccgtttggggtggatatcccgggcgtattcgaggcgtacaaccgcaccgccgtcaatatgaacgaggctcgggatctttacgccggcctggaggggcaccgcgccgacctgtgccgcgcctgccgccgctgtgaacggaattgcccgcagcacatcgccatcagcaccaccatgaaggcgattccacctgtatttgcaaaagacggggcgggggactgatttcggttccgggtgtcctagtatgcctccgtccggcggccgtctcggaacgccgcgaccggctcctccctgtccgtggaaaggaatgaattattcaaatggaacagcgtctctcctccccgcggcagcctctggcgcagcggctggcttttggcggcctgtttctcgctttagggatcctgttccccctgctgtttcatcttctgccggccaggtcgggggaaattttcctgcccatgcacatccctgtcatcctggccggaatggtgctcgggcccgcgctcggcgctgcggtcggagctcttaccccccttgctgaacaccctggtcggcagcatgccgccccccgcccgtctgccctttatgatgatagagctcggggtatacgccctggcagcggggctttgctaccgcaaggcgcggctgccgctgcctctctccctggccgttacgcaactggccggccgggccgcctatgggctcagcctgtttttcgcggggacgctgctgcatgtcccgggggccgcgcccatcgcggctgtcaccgccgccgtcaagggctggccgggcattgtggtgcagtggctgttcattcccctgctgctgttggccctcaaaaaaggaggcgctcggattgaccgatgctgaacgggccgtcgccgccctgagggacggcttcacctgtgctttcgtgcgcggcggacggctttatacgtcgacggcttccggcatccgtccccttctggactggctggcggaggatccgtgttgttttcagggcgcttttgtcgcggacaaaatcctcggcaaggccgcggcgctcctgctgctccagggcgggctggatggatcctccggcggcgtgtacggcggcgtactcagcgacgctgccgccggtgtgttccagcagcacggcattccttacgcctgcgggcgccgcgtcccccatatcgtcaaccggcggggggatggcgtctgcccaatggaacaccgggtccgggatatcgacgaccccgccgccgcccataccgcgctgctggccgcggtcgcggctatgcgcgcctctgcaaacgatcaaccgggttccgcccgggaagaaacggaacgtgaagcatgaatccagtcaaattttccgacctgaagctgatgccctccctgctcaaagcggtggaggaggaagggtataccgccccttcccccattcaggaaaaggccatcccgccggtgttggagggacgggatctggtgggctgcgcccagaccgggaccggcaaaacggcggcgttcgcactgcctatcctccagcgcctgacaaaaaatccgattcgccggatcgacgggcagccgctgcggactccccggccgattcgcgccctcatcctcacccccacccgggagctcgctttgcagatccaggagagcttcgacgcctacggccgccacacccatctgcgcagcgccgtcatcttcggtggcgtctcccaggttccccaggtggagaccctgcaaaggggcgtggacatcctagtggccactcccggccgcctcaatgacctgatcggccagggccacgtccatctcaaaaatctggaaattttcgtcttggacgaagccgaccgtatgctggacatggggttcgttcacgatgtcaagaaagtgatttcccagcttcccgcccggcggcagagcctgctgttttccgccaccatgccggacgagattgcccgtctggccgacaccctgctcaccgatccggtccacgttgccgtggccccggtttcttccacggtcgacgccatcgtgcagtcggtctatttcgtggacaaggccaacaaatcccgtctgctcctgcatctgctgcaggatcccgccatccgttccgccctgatctttacccgcaccaagcacggcgccgaccgggtggtgcgggatctgggccgtgccggggtccaggcgctcgccatccacggcaacaagtcgcagaacgcccgtcaaaacgcgctcggcagctttaaaaacggctcgatccgcgtcctggtcgcgaccgatatcgccgccagggggatcgacgtcgaggaactctctcatgtgatcaattacgatctgccgaacatccctgaaacctatgtccaccgcatcggccggacaggccgggcggggctcagcggggtcgccgtttccttctgcgattttgaagaaaaagcctatctgaaagacattgaaaaactcatccgcaagccggtcccggtcgtcgaggggcatccctatcccatgcaggtgtttgaaatcccgcccaagcccgaacggccgccccggcagaacagccgtcccggacaggggccgaaagccgacgcgcgaaacgcggtccggccgggtccgcataaacaggccgctaaacagccagactcaaaagaggagaacaagagccgcggcacgggccgggtgcagaacgtacccggcaccgttcggaaaaacacggcggacacggcttcgccgccgtccgtatccggtgggaaacggccgaaaggccgcaaggaaaaaacgccgccgtccccttccgccccagcgcccgccccgtcccgcccggagacggccagcccgtccggtggcgccccgcgcaaagccgccgcacagcgcccgggactcgaacccgccattacgaaaaaaccgcgtcccatccggcctttccagtcccgttcagccggtgtacagcgggatttcctgcccaaggacgaaaagaaataaacccggtttgcgttggaaaaaactcgctatattaacacaaatttactcgcatgaaatgcctcctcagaaccagaataatgaatgcaaacgcaagcaatcaacagcggcgtaaacgccgccaaaaaaactgaggagtgtattgaagtatgtctagcaacaaaactttggttcccgaagctcgcgaaggcctcgaccgtttcaagatggaagctgccaacgaagtcggcgtgaccctgaagcagggctacaacggcgacctgacctccaagcaggccggttcgatcggtggccagatggtcaaaaagatgatccagcagtacgagaacggcctgaagtaattcaagccctctcacacggccgccgggaggcaatcgcctcccggcggtttcctatggctccgccggattcgcgttcgcccccggccgattccgctttccttcgcacaggaatgggtttcgatatcttgatgcataaaattcgctcggatgggaaaaatctcacctgtagcctcttgacaaatccccaaaattcggtataatggtaaacgctctcacacattgcggaattgtgtaatggtagcacgacagtctctgactctgtttgtctgggttcgaatcctagttccgcagccaaaaaagcctcattgcgtttgcaatgaggcttttaactttaaatccgtatgagaaaaaccggtctcatgcatggaaatgaggctggaatcaagcattcgcccgtctgttccatcgttagcaaccccctgccctgtgcaggaaaaaccgaagatcccccagcgccttaaacgcgccgggggatccgctttctatctcattaaaacgcggtcttttccctcaggtaagcggaaagggaggcgagggcgacccgctcctggcccatggtatcccggtcccggaccgtcacgcagccgtcctcgagggaatcgaagtcaaaggtgacgcagtagggggtgccgatctcgtcctgacggcggtaacgcttgccgatggagcccgcgtcgtcgaaatccaccatgaaatcccgggcaagggacgcatagacctccttggcgccgtcgctgagctttttggacaggggcagcacggcggccttgaagggcgcgagggcgggatggagccggagcaccacccgggtatcgttcttttcggcatccaccacttcctcgtcgtaagcgtcgcacaggaaggccaggaccacccggtcggcgccaagggagggctcgatgacgtaaggcacgtaatgctcgccggattcgggatcgaaatactccagcttctggccagactggcggatatgctgggtcaggtcgaaatcggtccggtcggccacgccccacagttcgccccacccgaaggggaaacggaactcgaagtcggtcgtcgccttggaatagtgggacagctcctctttttcgtgatcccggagcttgaggttttcgtcccgcattcccagggacagcagccactgatggcaggtgtttttccaatactcgaaccactcgaggtcggtgcccggcttgcagaagaattcgagctccatctgctcgaattcgcgggtgcggaaggtgaaattgccgggggtgatctcgttgcggaaggacttgccgatctgggcgacaccgaagggcaccttcttgcgggcggtgcgctggatattcgcgaaattgacgaagatgccctgggccgtctcgggccgcagatacagctcgtttttcgcatcctcggtcacgccttggaaggttttgaacatcaggttgaaggtccggatatcggtgaaattccgctcgccgcactgcgggcagcggatatcttgttcgtcgatataggccttcatcttctcgaagctccagccggcggggttgaccccggtgtcctcgatgagcttgtcggcccggtggcgggtcttgcagctcttgcagtccatcagcggatcggagaagttaccgacatggccggatgccacccacacctgggggttcatcaggatggcgctgtcgaggcccacattgtaagggcactcctggacaaacttcttccaccaggcccgtttgacgttgtttttcagctccacgcccaaaggaccgtaatcccacgtgttggcgaggccgccgtaaatatccgagccgggatagacgaatccccggtttttgcacagggccacgatttggtccatggttttttcactgttgttcatgctggacggttcctttcgtgccaatatccgctgccctgtcgggaagcaggcatctgtttgtttagtttaaaccgattcgcgcgtcttgtcaatgcgcagtgtgcgatattccggcaaaacagaccggattccccctcagccgcgcaagcggctttctataatccgaaagcggtcgatttcatccggcggattggatataatatccacgtccggcacgtttggcaaaccggccagcaatgtcccctggtacagacaaatcccgattaggagaaagccgatcacaagcgatacgacggcgccgatgcggcgtctgtaaacaccgatgaccgacggcgctacggcgtcccctccatcgtagtaccaggcgagccactttttctccccctcccacagctttttggggcgcagcgacatcagcgccgctcccccgaaaaagaacagttcaaacagcaaccaacccagggattccagtacgctgtgagacaggttcagcaccccggccacccgcagcacaaacagaccgatggaaacaaccgcccccaccagtgccgcggccgccgatatcttttcaaccggtccggctttcagtcctgctccctcgtcgaacagctcatccatccggctgtccagttcggcctttttttgcgccgtttcctccgccgtcagccgttttcccagtctggcgccgcagtccacgcagtacaatcggctgtccttctgctcggctccgcatttcgaacagattttcatgtttcccgccctcctgatatttttcaatcagtcgaataccgtcggattataacgttttatatcctaccaatccgccccctgaaaaaggtcagatataaaacccgaccacggtggcataggtgccggtcacgtcgtcccggcccgagacgacgacaccgtccaggctcatcagttccccgctcttgaccgtttccagcggtgcggaaaaggcctctttcccgccggccatgacgatcacccggtcttcgagcaccatcaggcggccatccttccccagcacgacctcaatcgggctgccgttctcgtcggtctctcggcggaccgcgtatttgagcagcctgccgtccagccgccgcagcgcctcatccgccatgctgtcgcttttcttggccccccggcgaaaccatcccatgagccccgccctcctttttgctcgatctcctggccatattctacccgttttgtccacccctgtcaatgcagcggccatatccaaaaacagccgccggctcatctctggccggcggctgcctatttttccttataaaagagattccccgcgggcaagccgcgcctcggcatcggccacaaactgcctcgcataccgcggggaccgggcgccccgttcgagcgcccactgctcggcggcggccagcagggtctcccattccacctccagatggcggtcggcggcgatctgggccacgatgtcgagaaaacgccgcttgtccggcatcaggaaggtcaaactgatcccgaaccggtcggacagcgacaccgcctcctgtaccgtatcggcggcatgcacctcgtccccgtcccggtcccggaaggtctcccgcagcaggtggcggcggttggaggtggcgtagacgagcacgttcaccggacgggaggcgagccccccttccagcaccgccttgagcgcggcgaaggaatcgtcgttccccgaaaaagacaggtcgtcgatgaacaggatgaacttcatcggcagcccggcgaggaacccggtcagctccggcagctcccggagggtttccttgggcagctcgatcatccgcaggccccggcccgcgtattcgttgagcagagccttaacggtggaggacttgccggtgccgcggtctccgtacagcagcatgttgttcgcctcgaacccatccaaaaaggccagcgtgttatccaccgcgatctgccgctgcgcggcgtaatccttgagatccgacaggcggatcgggtcggggtgctccacgggatggagggcgccgtcccgccacaaaaaggcgcgatgggcggcaaaccggccgcagccatgggccgcgtgataagcggccagcgccggcagcgcgtcaccccagggcgtgtccagcggggccgcggcggccacgccccaatcgggcagccgggcggagagcccggtttccagagcggcgcagagcgtctccggctgtatcgtcgccgcgcggtaaagcacatccagatcccgccgcgcggcctccgccatcctgtccggatcggcggcgtccggtaacgccccggcggccaggcgtatggcaaaggagttttcatcctccaggatttcctgcgccacggcggcgggcaggctgtccagccgccccctttgcagcagcacgcggcacagctccccccaccgcgcgcacagggcttgctcctcgccccccgcggccgactccagcaaccgcacgagtgcggccgtgacggggcggtccaggaccccccggtaaaccgacagggacaggagttccagatacaggcggcggacagatacggatactggcatggggaaggcttcctttctttcgcccggcacagggccggtggattctcccgcattttacccccatactgaaaatctgtcaacttgcccgcccttgccttttttccctctgtccggtatactatgttcggtcgatagggaaagcgagggatcacgaaccatggagacaccggccttccggcgggaaaccgcctgctcgttcaccggacaccggcccggccgcctcccgggcggatatgccgcctggcacacgccctcctcgccgctccgcttctggatccgcaaggccctggaagaggcatacatggacggataccgggattttgtctgcggcatggcccttggcgccgacaccctggccgccgaagaggtgctggccatgcgggagcgccggcccgctgtccgcctgatcgcggcgctcccctgtcccggtcaggaagcccgctggcctctggccgacaaggaacggtaccgcgccctgctcgcacaggccggcctatgtgtgaccgcctgccccgcatacaccccctatgccatgcatgcccgcaaccgctggatggtggagcacacgtcccgcctcatcgcgattttcgacggttcgcctggcggcaccgcccacaccgtccggctcgcggaagcccggggcctggatatttgtttcctatctcccgacagcctggctccctgagcccgtccttgccggctcggttgtgtccgggaaccgaaaggcgccttcggaaatccgaaggcgcctttgtgatattctcttgacaataggataaaaatcggataaaatagtcgtcttaacccatatcttttttgtaattcgcaagtctttccttttatatcatatcacaaccatccccgtttgtcaaccccttattttgaaaaggaggaaatccccgtggaaaatgcccttttcgccctgctggctcccgctcaagacgaagaagccgcctgcctggcggcggtccgggaagccgcggcccgccatggcctgtccgtgacgccggaggaggcgctggcgctggcaaacacccatcggcaggcccttcacgacgccggccggatagagatcagcggcaccgtccttcccaaactggccgcctcctttgccgcctccccttatgcgccgtccaatgggttcgcccttttgttgggggagctgtgcggctggttttaccattttaaaaacaccagcctggagccggtcggcgacgacggcctcgtcgcctggatgcggtacgccttcgaccatcgctgcatggggcagccggagctgttgcagcgggagtgggaacgccgcctgggccgggccgacgacagctattccgccctccccggctggttcgacgattgaaaaacggcgggcaagcgaccctaaaatccggacgggagaagggcttccagccgcccggctatctccgccggcgtatctccttcccggacctgcaggaagggcagggccagcgcccggcactcctcaagcaggcggcggttgtgccacttcgaacggcgcagatagttctccgccgcggcgccgtccagaaaaccggggcgccgccgcagccgcgactccaggagcccctccccggcgatgagccagatcccgaaaaccgaccctccgagccagggccggacatgggcgggatagagggcccagccctccagcacgagcggcccgccccaggtgctgtggatagcgacgagccgttcgagcgccggctccatggcacggtggtaccgccggatatcctcgatcaggccgtcctccggtacgcaggcgtaatagtcccgatagtccatcccccgcataggatccagcggcagcgcggcctgcaggacctcccccacgtcgtcggtggacaggcagggccaacggcgcaccgagcccatcgcggcggcggccgtggacttccccgtcatggggctgccgccgatcatgagcacctttcccatcgtttcccctccttctttccgaatgaccccctcagtatcccacattcccgtccggttggcaagcccgccaccggcggcctccaacacgacataaaaaggagctggattatggataccctgaccctccaaccgcggatggacggcatcccccgcgaagctttcgccgccctgctgtcccgccagatcttgcggtacacccggtttcaaagcagctccgtccggacggagacggcggaacagatcgcccgctcgattctatacgccctttccgcgctgtcggcggaagagcccggatgctccctcgcggatctggacgcggcctattcccgcgccctcgcctatctgcggcggcagattcaacgctgccgttttctatacgcgggagtccgggccagccgcctgcccgtccatcttctttcctaccaacgcctcatcgaccgcgacattccggattttctgcgcggctacgacccggaattccacgccgccgaggaagcgatgttccccctctatcctctgcgggatttcccggaggcgggcagcggaatcctgtacctgcgggaatatctcatccgcctgtttgaagagaaccgggcctgcgccggagtcccgccggccgctgtccgcgccgccctccaggcggccggaaaacggctagggcagcctggagcggaactgaccgtcaatttggctgaaatcttgttggatgattcggtcactttttcgctttagcatctaaaaatgtcttgacttccccttctccgcgggtgtataatgtccgcaatatccaacgaagcgttttttcggaaagggggccgttcgccatgatgtcgggagctgcggctatggtcaagtgcctggagctggagggagtccatacactgtttggatatcccggcgcggcgatttgcccgttttacgacgccctcgccggcagttccctccaccatgtgctggtgcgcaccgagcagaatgcggctcatgcagcgtccggatatgcccgggtttcgggccgggtcggcgtctgtgtggccacctccggccccggcgccaccaatctgctcaccggtattgcctccgcctacatggactccatccccctggtggtcatcaccggccaggtccgcagcgatctgctgggccgggacgtgtttcaggaggccgacatcaccggcgccgccgaaccgttcacaaagcatagctacatcgtcaaaaaggccgccgaccttccccgggtattcaaagaggcgttccacattgcctctaccgggcgtcccggcccggtgctcatcgacgtccccatcgatatgcagcagaagatgatcggggagttcgattacagccgcccggtggatatcatcggctataagccccgcacccaggggcattccctccagatccgcaaggccgccgaggcgctcgccgcctgcaagcggccggttctctgcgcgggcggcggcgtgttttccgccggggccgaacaggcgctgcgcgcctttgtcgagcaggtgaacctgcccaccgtctccaccatgatggggatcggcgccctgccgaccacccatcccttaaatctcggcatgctcgggtcccacggcggcgccccggccaacaaagccgtgcgggacgccgatctcgtcatcatggcgggggccagggtaggggaccgcgcggtggccgcgcccggccagattgccaccagggccaaggtcatccatatcgatatcgatcccgcggagatcggcaaaaatctcccggtacatatccccatcgtcggcgatctccgtcaggtgctcaccgagctcacccgccggacagagggcgtacaggcgccggacgaatgggtcagggccgtcgtcgaccggcggcagcggtacgccgcaaagcccatcccccccgtggaaggatacgtggagcccaaatccttcatgcgcacgctgtccggtcggatgcaggccgactgtgttctctgtgccgatgtgggacagaatcagatctggtcggcaaaccattttgccatgcgggagggccgcttcctcacttccggcggcatgggaaccatgggctactccatcccctgcgccgtgggcgccaaaattgcccttcccggcaggcaggtctgtgcggtgtgcggcgacggttccttccagatgagcctgatggagctggccaccatccgccaggaggacctgggtgtcaagatcgtcgtcatgcgcaacacccgcctcggcatggtgcgggagctgcaggacaaccaatacggcggagtacacagcggcatcgatcttaccgccagccccgatttcgtgaaaatcgcggaggcttacggcatccgcgccagcgccgtctcgtccaacgaagaggctgcggcggcactggacgagatgctcaccgacgaccggccctatctgctcgaatgccgtgtcatgcccgattatccctcactgtaaccggaaggggtgggaacaccgatgaaatacaccatgtccgtgctggtggaaaaccatcccggcacgctttccaaggtttccggcctgttttcccgccgcggcttcaatatcgactccttggcggtcggcatcaccgaggaccccaccgtctcccgcatgaccatcgtcgtggacggggacgaatacatcgtcgagcagctggaaaagcagctcaacaaggtcattccggtcatcaaggtcaaaaccctgaagccgggcgacaccatcgcccgtaccctgtccttgatcaaggtggcggtcgggacgggacagcgggccgagatcatccgcgccgccgaactgatgggcgccaaggtggcggatgccacccgctccaccctgaccctcgaatacgcggacaccgccgaacggactgaaaccctcgaggcgctgctgcgtccctatggtatccgggaaatcgtgcgcaccggtattatcgccatcgaaaaaggcgccgatcccacccggaaggacaaacccaaggcggacgccgccgaccccggatgagcttaccctgcgtttttggccgaggctcgaaacaacgggttcaaacccatacattaaattgccgcaacccggcacaggaggtaatggtatcatggcaaaaatctactatcaaagcgactgcaacctgagcgtcctcaaggggaaaaccgtcgccatcatcggctacggctctcaggggcatgcccatgcgctcaacctgcacgaaagcggcgtggacgtggtcgtcgggctgtacaacggctccaaaagctgggccaaggctgaggctgcggggctcaaggtcatgacggcggcggacgccgccaaggcggccgacgtcatcatgatcctcatcaacgacgagcgtcaggccgatatgtacaagaaggacatcgagccccacctgaccgccggcaaggccctggccttcgcccatggcttcaacatccatttcggccagatcgtgcctcccgcggacgtcgacgtgttcatgatcgcgccgaagggtccgggccataccgtccgcagcgagtatgtcgagggcaaaggcgtgccctgcctcgtcgccatccatcaggacgccaccggccgcgccctggacgtggctctggcctatgccgcgggcatcggcggcgcccgtgccggcgtgctggagaccaccttcaaggtggagaccgaaaccgatctgttcggtgagcaggccgtgctgtgcggcggcgtcaccgctttgatgaaggcgggcttcgaaaccctggtcgaggccggctacgatccccgcaacgcctatttcgagtgcatccatgaaatgaagctgatcgtcgatctgatctacaaaggcggcttctccatgatgcggtattccatttccgacacggccgagttcggcgattatgagaccggcaagcgcctgatcaccgacgagaccaagaaggaaatgaagaagatcctcaccgaaatccaggacggcaccttcgcctccaagtggatcaacgagaacaaggtgggccgctcccacttcaacgcctgccgccggatcgagagcgagcacgagctcgaaaccgtgggccgggagctgcggaagctgtatagctggaaccaggaggattgagtccatcctcgcctaggatgccacacgaaaaacccccggaagcggccatgggccgcttccgggggttcgccttttccgccgtccatacggggcgagggatcattcatcgtaaatatagtggtggagcgcctccaccgacgccttctggttcttgaactcgagtacggctcccggccccttgtaggttttgcccacgtagtcgccgtcctgcgggacataataatcgttgatgatggtgtagtccttatacttgagcgcattcgatgcgaagcccagcagctcgtcctgcgtcatattggtgtcgacgcactcgagggccttggtggccacccccgcgatttgcagaacgcccatggtcttggccttttccagcatcaatgtcaccacatggcgctggcgggcggtccgcttgaaatcgctgtcgatagaccggatgcgggcgtactgcagcgcctggaaaccgtccaaatggtggacgccgggactccccgaaaggggcctccagttcgcatcattgggtaccgccttcaacccgtttgccggcaccaggttcatctccgccttggtcagctcgatatccaggccgcccatggcgtcgatgacgatcggcaagctcttgaaattgacccccacgtattgggtgatttccaggcggaaattgtcccggatcatccggaactgcatatcgtggccgccgtacgcgtaggccgcgttcagcttgccccagtcgtccttgccgtccttgttggagtccctcccgggcagcgaaacataggtgtccctcagcagggagatgagcttgatggtttttttcctgtcgttgacggagaggatgatgttggtgtccgaccggacgccccggttggaattcccgtcgtatccgagcagcagatagttggtaatcccactaccgtttttccgcagcgggatttgggcgagggtctgagcgtttttgtagtcctcctcgaagttttggagctcgccgttcagcccctcgtcgccgtcgggggggatggattcgacgagcgagccgccgtccggaatgtattgcggcttgctgagaaggttccatacaaacccgcccaccccgatgcacaggaccgcgattaagcccatcacgcagacaccggcaacggtgacgatccgcacccttcgggaataccggctgttttttctcgatctcggcttcgattttgcttttggtttcgctttcgcggccgcgtgagacggcgcccttctcgtctttttatccatgatacattcgacatctcccatcgtctgccgatcgccggcggctcttgtcaagttcttccatcatatcacgttgtgtctggttcatcaagcgggaaatatggggaattggggaaatccgtcggattatgcgccgctttcggccgcattgtccccggaatcacacgccccgtcctagtctgtccggctccaaaaggttctatgtgtgtgcctgccgccccatcagaaaagcccatggatccggccgtcgtcgtccacatcgatcgtttccgccgccggcactttcggcaggcctggcatggtcatgatatcgccggtcagcaccacgacgaacccggccccggccgacagccgcacctgcttgaccgtgacgcggaaatgctccggacgtccgagcagggcggggttatcggaaagggaatactgggttttggcgatgcagaccggcaggccgccgaaaccgagggcatggagccgctccagctccctggctgcggcggggagcagctccaccccgtccccgccgtagatgtccctgaccacggtttcgatcttttcccgcagcgggagcgcgtcctcgtaaagcaggcggaaggaggagggctgttccgtcagcgccagcacttcatcggcgagctcgaggccgccttcgccgccctttgcccacacctcggagagcgccacccggacaccgagcgccgcgcatctctcccgcaccaggcggagttccgcctcggtatcggccgggaaacggttgatggcgaccacggcgggcagcccgaagcggaccgtgatattttccagatgggcgagcaggttgggcagcccccgctcgagcgccgccagatcctcctgttcgagcgtccccttggcggcgcccccgtgatgcttgagcgcccgcaccgtggccaccaccaccacggcatctggccggagccccgccttgcggcatttgatatcgaggaacttttccgcgccgagatccgcaccgaatccggcttcggtcacgacgatctctcccaacttcagcgccatgcgggtagccgtaacactgttgcagccgtgggcgatgttggcaaacggccccccatgcacgaacgcgggagtatgctcgagggtctggaccaggttcggcttgatcgcgtccttcaggagggcggccatcgctcccgcggccttgagatcccccgccgtcaccgggcggtcgtcccgcgtgtagcccaccacgatccgcgccagccgctccttgagatcccggattccggaagagaggcagaggatggccatgatttcggaggccacggtgatatcgaacccatcctcccggggcacaccgcacatccggccgcccaggccgtccaccacctggcggagctgacggtcgttcatatccacacagcgtttccaggtgatccgccgcacgtcgatgccaagcccgttgccctggtggatgtggttgtccagcatcgcggcgagcaggttgttcgccgcgccgatggcgtgcatgtcgcctgtaaagtggaggttgatgtcctccatcgggatgacctgagcccagccgcccccggccgcgcc

SEQ ID NO: 1361 - DNA, 32759 bp, Unknown
  16S sequences of unknown bacteria
tttacttatccatcgcacacgacaaagggctgtgtgcccttgtcaagcgatgtaaatatcatcaaataaaagaattggaggaatagaaaatggcagagacctttaaacttccgtgctcatcgtatgaggagctgattaaactgttccaagcgtatgcgaatacgaaagaaggaaccgcactatcattggacgagataacccaagccactggagtgcctcgtactattgtaagcaagaacaatggttttatggtacaagtgggtttgatcacggagggcaataaaaaagcagcaaccgaaacgggacgcgctttaggacgagcatatacctcaaaaattacagatgaagttgaacggatttggaaagagattattgctgaagttgattttttaaaccggatgttgtctgctgtccgaattcgtaatggcatggatcgttcgagtttcattaatcacattatttattcttcaggactcaaagatgctaaggaatctcgcgcaggagctggagcactgattgaaatttttaagagtgttggggtattgtcagaggttgacggcaagctatctgtcctggatgaaccaagctctgcccgagtatctgttgcatcaaataccatatctgctgagcaaacgcattcagaaccagttgcccaacaagcgcttcccgttgcaacaatttcggcaaagaactctattgtcatcaacatcaatatcaactgtacaccagcagatattgatggactcggcgaaaaaattagtcaactgctttacgagttgtctgaatgattaagctattcataacagagaaagtaggtgcagtatgagttataacatagtgcttactactgctgaggatattgttgcagttgttgatgctgtcatcgcaaaaggctctgaagcggcaaaggatttcatcgcagagttcacgggaatagcaactgacgatcaggttcttaaggcacttcagatggcatgtgaacttcagttaattgtgtttgatagttcacgaggctgttatgggtctccatcatttttggcccggaagcttgtatctgcatcatcagacgagcagaaggccgtgtttatgcgcttgattttggagcaatatgctccatataatacattcaagacacgatacggttttacaaaatccattgagcttgcttgtcgccaaacgaaaaccctacatatgatgacctccaacgagagagacgtgaaaaatacgcttataagcattgctacctacgcaaaggcgcttaaaagcgaaggcgcaaacttatatagctttgttgaggatgtggatgctgtaggtattattgaagctgcgcttcgctcggcaaacattaccgaaaactcgttgcgtacgtattggggggaaaatctgtatacttttgttaatacatccaatgtgtttgcccctttgattgaggcattgcagaaaactcattctgggacaatggatgttcgttctatcgttgtttgtgcggcgaatgcatttgaatcttttttagctgattttgcagtaagaaaaggagtctctttaagcggtagaaatgggatactgcaaaagcgagatgcattatctgcacacatttcgaaaaaacatcgagggatgattgaattcgttggacaagtccgcaatgcggcagaccacggtgcagatcccgacgaaaacaaccaagtttggacaatctctaatgaaactgcaagaatatatccctgcattatagcagcgctaattaaagcgattttttcacgagatgctacagggagcattgaagtataaatgggattttctcatatgctgtgtggggggagaacctttttaccagactgacccttatgaccataatgcaaattgtcaccacatactaagagggagtgaaacaccgaaaatgttttactccctcttttgtaattattcttttctctgcgacccattcaagctggcccaatgctggcgcagcagcctttctgcttctctgcgaagggaattttggaacatgacagccataaccaatgcgctaagcactgcagccacaggctccagccagggatatgcggtccaaagctgttctccccagcaagcaagcggaacaccaacaagcagcataaacagcaaaataatgatgacaacgccgggtctgccgtagccttcacgtctgttgattttggcccgtatctgtcgaagcgcacgggttcggatatcccggatgtttctggacgaacactgtttgtcctgtgcgacggattcagtggactcgccattgatgatcgtgcggaacaaaatctccctctgcagttcggtcagtgcatgcagggcgtcatagatttgggtgtccaaatacatgaagggatcttcatcagaaccctccggcagatacttgcttcggtcaaaccaccgtctgtcgttgtaaattgcgttgcgtacttcctccggcaggaacgcttccggattgtaagatcggggctgctttatatccaaatcctccagagtatccggtgctacacgcttgtgaaagttcgcctcgctgtagtagagcatatgctccagctccttccactcctccggatgctctttcacccattggtctgcagcggcggcagcttccgggtccatttcgtgtatccagcgccagtcagactgaagttctttgtacgactgagtatccttgaaggacatgagctcaccgccctttctgcgttcacaaaaagtttacaattccagaccttccgattttgcgaattttctctaagtaataatagaaggacaatttcacccgggtgaggttgcccctggttcggtacggcacggtctccgcgccgacgaatccacatggtcttcgacagagcatctatgagagcatgagtgctctccgccatacggcaatccgttcggaaggtcattccatctctggccgtgctcccgggagcacggtctctttttattctaacacggaggaggcgaaaaagatagtttacagatgagggcaaaggaggaatgtggatcacacaacacacccgcaaaataaaaaccgccgcgactgcggcaacagtccggcggctcggcgcacacacaggcacgcacaaatctactgataaaagtatatcaggtaaacagcagaaaagcaatgaaaatttttctgttccctgtgtgagcgtcatcggactctacgacaatacaggaggtatgaattgagtttcaacaaatggcccaagcgcagtgcagagaaaaactattttatggtaccaaacgagatattcagcatcggtctggattttcgtgagatctccctctattcctatctgctccggtgcgagaatcggaagacctaccagtgctaccccagttacaaaaccatcggtcatgcgatcggcatgagtgaaaatacggtggcaaagtatgtgcggcagctggaggagaaaggtctcatctacacggagccgacgatggtacgaagcaaagatggcagacccctgaacggaaatctgctctacaccgttcgccctatccaaggtgtactcgaagcattctatgagcggcagctccggcaggcagaggaggctgccgcccgctatcgtgtggcagaactcctcaaaaagtccaacgcccagggtcgccagaacgccttgtgtgcgcctttccgggaagaagcgagtcccagtcccgaccaggggattgaagccggatgtgagccgttttcggcagacttttgcgggacgaaagaaaaagcaggataaaggcatggcgtcgcaggcgtcgccgcagccgccacttctgcccgcagtgcgggcagtttcggacgcttgaagctggcgtctttgagagacgaaaaaagcgccgatggcgtcagcttccccgaaaagccccgtgttgcagggcttttcaaggatgtcttacagcaaaaaggaggaattgaatgagtaaagaaaccagagatcgtattgcattccggatgcagccagaaaccagaagaaggatcgagcagtggtacgccgccgacaactgccagagcaaaaatgagttcatcgagaaagccgtgaacttctatgtggactatctgggaatacaggacaacacaacgctgctgcccatggcaatcatgtctgccatcgacggcaggctgagcagattggaggactatatcgcctgcagagattttaccagatgcgtggagcaggacatgaccaacggtattatcgcagaagcgttcgagatggatcgggaagatttgaaacgcagacgggcgcagagcgtccgcaatgtgaaagccaccaacggtctcatctcgttggaaaagtacgcacgcttccgtcaggagcaggactggaatgatgacgaatggcaagactgatcctcaagagtccctatatcaaaagcaccggcggggcctccggatacctgcgctacatcgcgacccgggagcgggtggagcttatcccagatgaccgtccgcccacacgaaagcaggagcagctcatcgcaaaactggtcaaagacttcccggacagcaaggtgctctatgagtacgaggactacctgacaaagcccacaaaggtcaatgcatctgcgttcatcacgctggcgctggaagccaactgggattccattcacgagtcggagcagtacatgaagtacattgccacccggccacgcgccgagcgcatcggcgctcacggtctgttcggtgatgaggatgcagtctctctggagaaagccgtggaagaactggagaactacaccggaaatgtgtggacgcatatcatctctctcaagcgggaggatgctgctcggctcggcttcgacaacgccgcggcgtggcgaaatctcatccgggcgcaccgcaacgacatcgcggcggcaatgaagatcctgcccggcgacttccgatggtacgctgctttccacgacgagggcgagcacccgcacatccacatgatggcctggtccgtcaaggcggggcaggcctacctctccaaggaaggcatccgtcagatcaagtccaagctcaccaacgatattttccgcaacgaaatgctccacctctatgaacagaagtctgattccagagatgaactggtgcggaaaactcggcgggcaatgctggaactggtgcgtgccatgcaggacggcgtatgtgaccacccggacgccgaacagctcatgctggagctggcggcgcagctcggagcggtcaagggcaagaaatcctacggttacctccccaaacggttgaagcagctggtggatgagatcgtggacgagatggagcggctccctgtcgtaagcaagtgctatgaccagtggctgatgctccaaggcaaggtggacagctactatcacgacaagacccaggcacgcatcccgctctcacagcaaaaggagttccggcagatcaaaaacgcggtcattcaggaggcggagcgcctgcgcttgggtgagatcagcttcgaggagaagaatctcggtcagtacgatgagccggaagaattccgaaacgagtcttacgactactgggtgctccgggatgtgatccgggacgagagcctgaccatggaggaacggagcgacgccgtctctgaaatggacaaactggcagagaacggtgatatgtatgcccagtacctgatgggaaagctctggcgggacggacctttgctgataccggactcggtggaagcacggtactggttcgagcaggcgggggatcagggacatctggtggcacaatattcccttgctaagttatacctctcggatgatttggaagtgcgggatacccggaaggggatgaactggctctacaccgccgcggtcaacggcagccactacgccatgtatcggctggccaaggagtgtctcaaaggcgagcacatccaaaaggataccgcaagagcggtggagtggtttgccaagtcggcggagggaggaaatccctacgcccagtatatgctgggcaagctgtaccttaccggaacggaagctccctatgacgaggaacgagcaatccactggctgacccgatccgccgagcagggtaaccagtatgcccagtatctcctgaaccatctggaggaaaaccgccctccctctgcaatgctggcggtgacccggctgctccatcacatgagccggatcttccgggacaactccgtccctaagtcccgccccggcggaatccagatcgaccgcaagcggctgaaaaagctgcaggagaagcgcatggccttgggccataaaccggacgaccatgaggagcagtggcctgacatgacgatgtaagcggctcaaaaactgggccgcaaaacaaagaataaaacccttccacgcggaaggtagaaaggaactgaatgagaaaatccaaatacaattcgtttgatgaactcccactgatgctgaccgtggaggatgtgtcccatgtgctgggcatcggtctggcccacgcctacgaggtggcccaccgcagggatttccccaccatcacactgggaagccgcatcatcgttccccgtgacaaattcatggaatggatcgacgaacaggctgcgaaaaaatctgaaatattttagtagctattccaaaaactctgtggtatgtgtttgtgttaaaaaggagggatcataaatggcaaagaaacgagccaacggtgagggcagcatccgcaaaaagcccagcggccgctgggagggcagatatacccagggcatcgacccggtcaccggcaaggccatccagaaaagtgtgtccgctaagacccaggcagagtgcaaggaaaagctggcgaaggccattcgggaaaaccggggcgtgcctatccatcacaccggagactacactgtagcggagtggtgccgcctgtggtttgagacttacagcaagcccaacatccgctacaataccgccaagggctatgaagggatcatcgaacaccacatcatcccggccatcggtgtgatcaagctcaggcagctctcgtccatccatatccagaggatgtacaacgagaccaaggaaaacggcaggatgcagcgcgggtcgaagcagaacggcaaagcgctatccaacaccttcgtgcggcgtgtccatgcggtgctgcaggcggcgctgaagcaggcggtgaaagagcggctcatcccgtacaacccctgcgagaactgccgtatcccgcccaaggacaagaaagagatgaccatcctcccgccggagaggatcggcagatacctccaggaagcggagaagtacggcgtcctgcctatgttctatctggagttgtccagcggcctgcgccggggagaactgctggcgctccagtgggaggacttgaatgtaaaagagcgcatcctgacggtgaataagcaggtcacccgcatggagggcgagctggatgtgacagaaccaaaaacgaaaaactctgtccgcaaggtggcgttgtcgcagcaggccgtgaacctgctggtgcaggagcatgaacagcacccggacaaccctatcctgttcccgtcgccccggacgggcggctactggagtccggacgcggtgtcaaggatcaaccggaagctgctaaaaaacgcaggcatcgaggagcacgtgcgcttccacgacctcagacacacattcgccaccatggcgatttccagcggcgtggatgtgaagaccctgtccagcatgctgggtcactacagcgcgggcttcactctggacacctatacgcacatcaccaacgatatgcagcgaggcgcggcagagaagatcggcggctttatggaatcggccacggcagccaacgccccggagcctcccgacccgccggaggagaaccggtgcaaggtgataccgttcgaaagggtggggtaagtaatgtaaaacagccacagatagaagcgactctatctgtggctgttcacactattgcatatcaagattaatagaatctgtttctctgttcttgatgtatctggtcttctttgtaggcggccatgattcgctgatattccttcgggttatcattttcgcagtccagtgtaacaattcggtcaacgtacggctttaatggttcagggctgtaccaaggctcttttattgtgagataaatgatttttttcgtcttctgccgttctgccatttcatgtagcatttgaatctcttctggatttttcgtaacactttgcatcggccatacaatcatgaagtcaaacgcataattgtcgtatttattgctactgctcctggtggatagattgtcgaaatagatagtaaggttcgacaattgcatggactgtccatactttttaggaacttttactttggaaagacctgcccaacggaagaaatcctccatcccatcctttgtggtatgaataagaaagattagacctttagacctccctcgaacattcagtgcttttagaagtgtccggtgtttttcttcgtcggctatgccgcagatcaatagcgttttctctgtctcattatttaggaagcttgcaatttgcttataggcgttttctacatcagacatgaaaatcctcctgataaaacactatcacaatgtgattggttggtaatttttttagctgtacctgacaatacaaaaactactataaaccattataggcgctaaaaaggaaaaactcaagtttccgtcgtgtctgtggcgaaatacccgagttacacccgttagggatgggttagggattttgcggttttcggcgttcctccgtaccgaggttgcaaccgccattttaccgctctgaccacaattgggatgtggtcaagcacgcttcaaaaattgaactaataacgcagaaaaaccgcctaaaaaggcggtttttctgggaaaggtggtccgagtgacaggattcgaacctgcggcatcctgctcccaaagcaggcgcgctaccaactgcgctacacccggttattaagttattttatccggctggtcgtattcacccaaatcaagcgcgataccagcttcgctacacccggatattcatttttctgccatgataccacggcgagcggtaaaaataaagctttttctgtctgtggtcatttatgtggtcaaagccgctgttgtgccgctttctgcaatcgggaaaaatccagcaaatgcaggtgccacaaggctttgcggcgtttcgccttaccctgtcccggataccgccacagcactcccaaagcaagcgcgctaccaactgcgctacaccccgatacggtattcactttgcatcgcaaatccgtttttgacagccctaatagtatactggattttggccggaaagtcaaccggccggttgcataacccgcccgaatagcctataataaaaatatcacccaatatataaaggagcgtgccctatgagcggtatgaaaaatatccccaaaaacgagcggatgactctggcttcccagatcgattaccagcccggccaggtggtcagcaaaacgctggcccaaaataacgccgtcagccttaccctgttttccttcgaaaagggtgaggagatcagcacccatgtctccggcggtgatgccatggtgcaggtgctggagggcactggccgctttaccgtggatggcgacccccacattctgcatgagggcgaaagcatcgtaatgcctgccggcattcctcacgccgtctttggcgaagaacgcttcaagatgctgctcactgtcattttttaagtcctattgggccatattcccgcggcagatgccagctttggtatctgccacctttttataatgcaagaaatttctgcatgaatttcaatatttctatcagtaaaaataaattaaccagcgctggcgcacacgaaccgcgaaatatgttttctcagaaaaaacacttcgcatttagctgcccttggcactgcaaaaccgcctatcaaaggcattgacatttcccccggcctcacatacaatagtaaaaatacggcgaaaagttgccgtaatttgtgtgacatccagtaagaaagagggttttatcgtggaaaacagcatgcagaaacgctatggcctgtttaccgccatttccatggtcgtgggcatcgtcatcggcagcggcatcttttttaaggccaccaaggtgctggccaataataacggtgatatgggccgcagcctgctcaccgtcggcatcgtgggcgccattatgctcatctgctcctttgtgttcgccaatctggcctcccggtacgagaaggtcaatggcgtggtagattacgccgaggcggcgttgggccgcggctacgcctactatgtggcctggttcatgacgctgatctattatcccaccatcaccagcacgctgggctgggtcacctcccagtatgcggccattttgtttggctttccggtagcggggatgacccattactgggtcggcttcggcatcctgctggcggatggcctcatcaatgcctatgctccccggctggccggcaagctgcaggtctccgctaccgttatcaagcttatcccccttattctgatggccgttgcgggcaccatcaccggcctttccaatggcctcaccgtggaggcctttaccgcggccagcgcccagatagcctcccagggcagcggcctgatgggcgccattgtggcctttgcctttgcctatgagggctggatcattgccacctccattaacagcgagctgcacaatgccaaaaagaacctcccgctggcgctgtcccttggtgcgctcattgtggtcgttatctacatggcctactttgtgggccttaccggcagcatgagtaccgccgagatgatggcagcaggggatatgctcccggaaaaggccttcggcaatctgtttggcccggccgccggcaccatcgtctttgtgttcatcgtcatcagctgcctgggcaccaccaatggcctgatgatgggctgcgcccgcggggcctactcgctgggcgtccgcggagagggcatcgcgccgcggttctttgcccgtgtggataaaaagaccgatatggccacgaattccgcctggttcggcatcatcatcgcgctgctgtggtactcctactggcattttttcttcatccacggcatgggcccctccttcttcaattgggaacccgatgaactgcccattatcacactgtatgccggctatattcccatgtttatctcggtcatggtccattccaagggaagcaagccccttatgcggtacatcctgccggtggtggccatcctgggctgctgctttatggtgtattgcgcgtttgtggcatacggcatccaggcactgtactacctgggcttctttgccctggtcatggcggtcggtgcgctggtgcgcattacccagtcccggcaaaaataaaaacccgaataaaaggaacagccccgcggcgcagcagcccggggcttctttttttgctaaatatccgtccaaactgccctgtgatacaaaaaagctcctctttcgaggagcttttttcctataatgaaattactgggcgtccacttccgccatatggccgatgagatccagcagcttgttgctgtaaccccactcgttgtcataccaggaaaccagcttcacaaagtgatcgttcagcatgatgccggccttggcatcaaagatggaggtatggggatcggtgtagaagtcggaggaaaccacatcctcatcggtgtagtccataatgcccttcatctcgccctcgcaggcagcctttaccgccttgcagatctcctcataggtggtgggcttagccagagaaacggtcagatccacaacggaaacatccagggtgggaacacggaaggacataccggtcagcttacctttcagctcggggataaccagggcgcaggccttggcggcgccggtggaggaggggatgatattgccggcagcggcacggccaccgcgccaatccttcttggaagcaccgtctacggtcttctgggtgccggtggtggagtgtacggtggtcatcaggccctcaacgataccaaagttgtcgttgatgaccttagccagaggagccaggcagttggtggtgcagctggcgttggaaacgaccttcatatccttggtgtaggtattctggtttacgcccataacgaaggtgggggtctcagcatccttggcgggggcggagatgatgaccttcttggcgccgccttccaggtgggccttgcacttttcggtggtggtaaatacgccggtggattccactacatagtcagcgcctaccttgccccacgggatctcagcggggttcatcaggtcaaagacctcaatggccttgccgttgacggtgaacttctcgtccttgatctccacagtgccatgaaagcggccatgaatggtatcgtacttggtcatgtaaaccatgtagtcgcggttgatggcgggatcgttaatcgcaaccacctcgtacttctccggctgctccatggcggcgcggaataccagtctgccgatacggccaaatccgttgataccgatcttgattgccataaaaaatctctccttatagttttttagggggttatgccttacattgtttattttataacattcttttgcaaactgcaagtgcttttcccccggaagtataacaaattattccccttttggcaacgattatttggtttttggcctgtttgcgggccccataacggaaataatagtagagatttgctccatttgctaaaaaaggagtgacagcgccgttaatttatggtaagatgatgttgtcgaaatttgtcgaaaaaggagggcggccccatggcacaggatcagctggatcttaccccgcaggataccctggcgctttccgcagccatgcgccgcccccttaccgatctgttcacccgcatccgggccatcgccgctcacgaggaaatgctgaccccctacctgcggcaggagctggaggtgctgctgcgggatggctaccgcctgctgcgcctggccgatagcctgagcacggtggaatgctatgaactgccccccaatgccgcggtgttcccgctgtggcagcagctgcaggagtgcctggagagcacccggctgctgctgggcgccaatggccgtaccctgtgctacgatctcccggaggagaatgacatggtgcggggagatgccgaaatgcttatgcgggctattctgcatctcatctgcaatggcctggacgccgccgatgacgcaacggccccagtaacggtgcggggcagtgtggccggggatcaggccatcctcaccatcctcgatgagggacggggcatcccgccggagcagctggaggaggtctttaccccctaccgttcccacgataaggacggtctgccgtatcagtcgccggggctgggcctgccgctggcccgccgggtgctggaagcccatggcggctccctgcggcttatcagcagcgagggcggtaccgccgcggtctgctcgctgccgctgtgccgggagctgcccaccctgctgcgcagcacggctccccactacttggaggatattttctctccgctttacaccatcctctgcgattatatcacgccgccatggccctacccccagccatagagatataccaaagccccggtttgcgcgaccggggctcctttatactctctgcagggcgcgggatacaggccgcaggccgtttcggcttcgccgaaacccgcgggcttcgcccgcgtcggcggctccgccgccgggcctgcggcccgcgctctccccttgcaaaaaccaatcccactctgccaaaaggaggctgctgccaaaatgaaccgctatcgcatcattgccctcatttatgccgtgctgctgttcggcggcctgctgggcagcctgttccttaccgggcactttgccggtgattatactgccgcagaaggtaccccgggtgcgcggactgaaaccgccctgcggcagaacctgccgctgcgggatgccctaaagcgctggaaaaccaccctgctgatgctgggcggtgtgcaggagctggacggcatctactttaccggggagggccttattgagaacctgaccgtgaacgatgaagcattgggagaaaaaaacctcgctgccctgcaggactactgccgagaagtggagccctacactgtgctgctgcccagtgcctgtgccatcagcagtcaattgctgccggaagccgccctgctgtttgaccaggagacctggctgcaaaatgccgccgcggcgctctctcccctgtgccgggaggtgctgaacgcctacccgcttttggaggaaaatggagatagcagactgttctaccgcaccgattcccgccccacccagctgaccggctacctgctgtatcaggtgctgggccaggcgctggattacttcccctatgcaaaggacagctttagcaatacgccgctgcggtatgactgcaccggcgacctgtatgcccgctggagctacgataaggtccgggcggatgtggtaacggcgctgctgccgctggaggatagccgcagctacaccatcacccacaccgccgctgatggcactgtgacccggtggaataccctgtacccgctggaaggcaccgcggggatagattgtattttgggcggaccggctgctatcattgccgtaacggctgaaggcagcattccccgcagcttgctgatcctgggggatgagaatgccctgtgtgtgatcccctacctggcgctgcactatgaccgcatcacctatgtggatgtgacccggtgcagtgaggagcagctggctgccatcgccggggcagagtatagccgcaccctgctgctgtacggcgcgcctaccctgctgaataccgacctgaccgccgggctgaccgccctgacccaaagctgaatgcccggaatcaacttgccccgcaccttacggatgcggggttttttattttgtgcagggaccaggccagggcgccccgcgcggcggcaaagccgcctggccggaggggcggttttaccgcccctccggctccccgcctgcggcgggggcgcggggcgcccgaaccagccttattcgcgaacaaatgtttcacgtgaaacattttgccgggcataaaataaaagaaacccggagcctgtaaaagctccggggaactggtagttatttgtggtacttggcaccggcattgatggagcaggcacggtagagctgctcgcagaggagcacccgggccagctgatgcggaaaggtaagccgagaaaagctgatcttccgggcagcggccgcctttacccgcggggaaagaccaaagctgccgccgatgataaagctcaggcagccgcttttttgggcggaggaggaaatgagctgcgccagctgcggggaggagagcatctctccctcgatacacaagggaaaaatgaggccggcggcttttttgaggatacggtttccctcctcctccaggccgcgggcgatttcggcctcggagggattatcaggcaagcgatattcctccagctcgatgatctcgaaccggcagtaggcacccaggcgcttttggtactcggcgatgccctgccgcatccaatcctccttcactttgccgatggcaataacctgtattttcagcattctacttcctcctcaaacacggagcattggattggggcggatccgcggtgcagaccgacggtgacgcttccgccgcgatggtctgtatttacagtatctccttagaagcggatcatctgaccggggcaatcccgcggggcgatccacaggcggtagtcccggtccggctgcatccccgcggcggaaagggccgcttcggcattgccgcgggcgagggccggggtattgctttcccggcttaaatgtgccaacacaaagtgagatgtaccgcatttggccagttccgttacggtgcgggccgcctcggcattggaaaggtggccgtactccgagcggatgcgctgtttgagatagtagggatagccgcaattgagcaggacggagtcctcgtaattggactccagcacggcgaggtggcagcctcgcaggtgctcccacactgtgggggtaacaaggcccaggtcggtaacgaagccgatggtgcggctgccggccgtgatgcggaagccgcaggaatcggaggcatcatgttgggtggcgaagggctgcacctgcattccggccacctcctgtatctcctccagcgggagcaggcgggtggtgggctccaccatcgccgccaggcgctccagtgtgcctgcggtggcatagaccgggatgctgagctgcttggccagcacccgcaggccggccacatggtcggcatgatcgtgggtgatgaggataccgcgcaggccggcgggatcgatgccggcatcgcacagctccgtgcggatgcggcgggcggagatgcctgcatcaatgagcaggctgccctggccttcgccggcggaaaggtagtagctattgccgctgctgccgctggaaagcggataaaatgttaccatgctgtcacctcgggggaatgggtaggatgagggcggcgcgccccaccggacggcggaggggcggccggtggcttgggccggcacgagccggaaaggcggggcgcgccgcccgggggctcccggccaaaagaaggggaccggagcagaacagtactccggcccggtaaaaataagcttacggtcttaggcctgctcggaaaggggctgatccggcagggtgatatagtgaagatctgcgccgatgccggcgaacttttccactacattctcgtacccacgctcgatatgcagggtatcttcaatctcggtagtgcccttggccatcagtccagcgataatgaccgccgccccaccgcgcagatcgcacgctttgaccggcgcgccccgcaagcccttcactccttcgatgacagcgactttgccatccacggtgatacgggcgcccatgcgcaccagctgctcggtgtagcggaagcggttatcccacacgccctcggtgatgatgcttgtcccctcggcgcaggtgagcatggcggccatttggggctgcatatcggtgggaaagccgggatgcggcatggttttgagattgatgcggcggagcgccccggtacggacgacccggacccagtcatctccttcggtgatggtggcgccggcctcccgcagcttgacggtaatgggctccaggtgcttgggaataacattcttaacaaggacatccccgccgacggctgcggccgccgccatataggtcccggcttcaatttgatcggggataatgctgtaatcggtgccgtgcagcacatccaccccgcggattttgatgacatcggtaccggcgccgcggatatcggcgcccatggaattgagaaagttggcaaggtctacaatgtggggctctttggcaacattctccaacacggtcataccgctggccttcacggcggccagcatgacattgatggtggcgccgaccgaaacctgatcgaagtagatgtgcgccccttgcaggccctcggtatcagcgtagatgagaccgttttcgatgcggatctcggcacccagcagctcgaagcccttgatgtgctgatcgatgggacgaacgccgaaattgcacccgccgggcatggaaacacaggcctggccaaaacgccccagcagcgagccgatgaaataatagctggcgcgcatatgcttggaaagctcgtaggggacggtggattcggtgagggtggaagtatcgataatagccgaagtgcggctgagcttttccactgtggcgcccatggcgcgcagcatactgaacagcagctcggtatcatggatatcggggacattttccagcacacagcggccgcgggccagcacggtagcgggaataatggcaacggcggcatttttcgcgccgccggcggaaacttctccgtagagctgctccgcgccgtttacaatgagtttcttcattgggcgatcctcgttattttctatatttttgatatcatgcattctatgaaaatgacagcatactgacgctgtaatccaatgatagtatagcacatccggcagcaaaataaaagccgtaatgatagaaaatcctgcaaaatataaaattcttccggcagagaaaatttttttcttttctcctggcgaatcggcctgtaagcaggacggttttattccctattgccgtaatcccgaataaggtgaatggccagcaaaacaatagcggccacgatagcgataatataaactcgatccataggaaaacctcctttatcatatgcctggctgtggcagagcccggcgtgatggtttggcggtatgatagcactgccgggcggccaaggaaatggcgaaagaaaaaactttttgtaaaaattccgtgaccagccccaagggtattttaacgcaaaaagagcagggcatacgccctgctctttttgcccttatgtgtgacaaaagagaaaaaagctgtaaatcagcccttcttgccgtagtcgcgaatcagattgagagccagcagaacaacagcagctacgatagcgatgatgtaagtaacacccatgataaaatcctcctcaatatctcttacagtttgcgggtttggaaccctgtgaagatatattaacataatattaacgccttgtcatcccttttgaaccagaaacatgccgaaaatagggccaaatctttgacgaatccgtcaaaatgcgcaaataaactgcaaattttattggagtatataaattttgcattaatatcctgcattttgatgttaacgggattttatgcagcaattcctgcaaaagcatcttgaaaggcccagggaaatcgggtataatctacgcgaaaaatggtcccgcggtgtgcggagcggccaagaaagaacgcccatataaaggaggaaacaccatggccataaataccgacaatgcgctgcggcgcagcgtgatctatgaagtatatgtacgcagccacacaccggaggggacctttaaggcgatagagcctgacctggaccggatagcggcactgggggtggatattgtatggtttatgcccatccaccctattggggagctgaacaaaaaaggaagcctgggctgcccctatgccaaccgggactatcgcaccgtgaacccggaatacggcacactggaggattttctgcacctggtggaggagatccataagcggggtatgaagtgcatcattgatgtggtgtataaccacacctcgcccgattccacactggtggcggagcatccggactacttctactataagccggatggctgccgcggcaacaaggtgggcgactggaccgatgtggtggacctgaactatgaaaaccgcgcgctgtggcagtatcagattgattcgctgtgctactgggcacaatatgtggatggcttccgttgcgatgtagccagcaccgtgccggtggccttttggcaggaagcccgccgggctgtggagcagatccggcccggggccatctggctgggagaaagcgtacacctggcgcacattcaggccttccgggagatgggcttctatgccgcgaccgatacggaattgttcacggctttcgatatcctgtacccctacgacctgtggccgctgtatgaggatgtaactgagggacggctgccgctttcccggtggtttgatgccgtggattaccaggaggtgagctttgagagcggatacaataagctgcgctgcctggaaaaccatgataccagccgcgcagcggatcgcttcccggagcggaagaagctgctggcctggacagcgctgaattactttatgaagggtaccatactactgtacgctgggcaggaggtatgtgaaaagcacacgccctccctctttgaaaaggagccggtggactggaacagcggagaggatatcagcggttatctggccaagctcgcggccatcaagaagaagctgcccaccgatgagctgttccgcattggggcggatgacacacagggcatagtgaccgccagctatatcgggccagccacacgggctgtgggcggcttcccgctggagggcaacggcggcaccgtggccgtacccctgccggatggcgcctacaccgatgccctaagtggcaaagcagtaacagtagccgatggcatgctgaccatcggggaagaagcggtcattctattgggataaaataaagaagcaagaggcccctgttcatttgatggcaggggcctctatttgctgcgaaaattttttataaaatgctgtcacaaaatacggcggcggagcgtttataggggtgtaagggctaaaaccgattgcaccggctgccgttcttgtggtaccatcaagaaaaaagccaaaaggggaaaacatatgctgcctgtatttatcatggcaatagaaaatgacgatgaccggacatttgtggcggagctgtatacccgctgccagccggccatgcagcggcgcgcactttctatcttgaaaaacgagagtgacgcggaggaggccgtgcatgaggctatcctgagggtgatacggcacctggaaaaggtgcggatgatcccgcgggatgaggtactgtactacctggtggcagtgaccgagaccgccagtatagacctataccgcaaaaggcagcgggaaagccgagcaaccattgggaacgaaaatgactgggcggagcacctggccgatgacaacacagcggagcaggccatgctgcggctggagcagcgggagctgctggagcggtgcctggcgcatctgccgcagcgggagatagccctgctgaactactactacatactggagctgccgtataaggagatagccagactgaccggactgaccgcggaaaacgcgaggatgattgtatgccgcgccaagaaaaaggtgctggcagcctaccgtgagaagggaggaaaagcagatgagtaaatatcccctggaccagaacgatatgcaggagcagtatgaggatctgctcatcaaggcggcactaaaggagcacgcccgcaaggaaagtgcgcggctggaacaggaagccgccggggaggcggccgttccccctgcggaggataatgtcatccgggcggctttccgccgggtgacctgggaggaagcccgcggcacggtgctgtacggggccaaaaaagcggtgagctgcgtggcggtggtcttcctgacaatagcggtagcggctaccactacctttgccctttcccctgcggagaaaaagcagagcatcctggagcgggtgctgtataccatccgctactacaccgataaatggaccagccacggcggtacgcgggtggaatatccccatttctactatgaggactttgagtacatcgaagtgccgaatgaggaagtgcgggaggcactggagatatgggcaagcttccgcaatgttacaaattttaatgacggcgccaatatcagcatctcgcacctgctgcagatgatgttctactactgcgacgcctacgggctggaatacccttatgttgatgcctccgccaaatgggtgcagcgggaagctctgctggaattcggggcgtacttcttcggcatcacgcaggaggacctggaccaacaggtgaagatgcggccgctgtattatgatgcccaacgggacgcctactgtgacctgaactatgattattcgtatcaattcgccgagatcaacgcgacggaaaagatggggctgatccgctatactgaaaatgaggacggcaccctcaccctggaggtggtcaccaaatccatggacagctgggagggctactgcaactaccccactctgcttacagttgatttcaacgccgggcacccggtgttccgctcggcggtcgtcgccgacctgacgcaatactgggagttcccgccggagccggaggagcccctgttctgataaaaaacttcccccaaagcggtaagccatgggggaagttttttatctgtagtttcagctttcggcggaggcgaacagcgccgcgcaggcggtacgggcttcctcgcggctgctgacagagatgctgtaataagcatcgccatactcgaagaaggcgtagccgctgggctcgtaggtatgcgggtaaacgattacatcgtagtacaccggcacagggaaatcggtccacaaatcagtatcggtatactggccggagccctccggcgggtcctggtgatagcgccccatgtattcttcaagggtcacgccgttcttatgaaaatcgatctgataaacggtgtggttctcttttccccagtcatagtagcaggtgatatcctccgggttttccggttcatccttggggtatttcagccaatagtcatggctgctccagttcccggcattttccatatgcagcagccctgttttcccacacttttcttcgacccttgccatggtaccgtaggtgcgcaggcagtagtcatccgtatcatggtagtaataccggaatgcccggaaaccggtatagcaccccgccgcaatgaccactaccaatagaatgtagccgtactttttgagaaatttcttcatgttatcctccctgaatgtcctgtggttactatcttacactactgtaaacgaatgagaaagggaatgtgtgacaaaaaggggaaaaatttttatcctagggaagaaaagcagcccgggcaaggaggaggctctgcccggagccttgacggtaaaggcaatgtgcagctccggctgggtcccgctgcccgcaatagtggaaagcacctgccccaggcgtttcatatccagcggaaaagctaaccgaaagccctgactgcactgatagcctgtaaacacctgccggtagtttccgtccctttcccggatactctcgtaattggcggaagcattgaatcgggtggttttcgggtcctcagccgcaaatggccgagggcctttatagcatcggtcagcgcgccgctttgatagtcagcctgctccatggcacggtcataatcctcctcatcggcagcggtggccatggtcaggtcgttccgctcctatcacactttgtttttcggcaaaactcaagctgcccccttgacaacagccgaggagagcattatcataaaactaatgacattagtttatgggggaggcaccttgatggccaaaggactgagcgctgaaagcatcactgtcgcggcagctgaactgatagagcagtacgggcgcagcggattttccatgcggctgctggctgataccatgggggtcaaaaccgcctcgctctataatcacatcgagaacatggatacccttttgaccgaggtatgccgctatgccctgcggatgcaggaggacggtgagctacgggccatcgcggggaaaaccggtcgggaagccgtatgggccctggcctgggcctaccggcgctttgcgcagcagcaccgggagctatactggctggtgatggataccgccgcgggcgagccccgcgtactggatgatgccgccgcccgctttaccgagccgctgaagcaggtgctttccggcttccggctgccgccgcgggaggagatccacttccgacggatgttccgggccattgtacacggctttgcctcgcaggaggatgagggctttttctctcactatccggcctctaccgagctgagctttgaatttgccattcagcggtttgttgattgcgtgctggaagcggaaaagaggaatccatcttgaattatacccaaagtgaagaatatctgtttaataccatgccggtcggccgggccattgcctcgctggccgtgcccaccgtcatcagccagatcgtcaccgtcatttataatatggcggataccttttttgtgggccagctgggcgaccccaaccaggtagctgccgccaccgtggcgctgccgcttttcatcttcatcaccgcgctggccaatctgtttggcgtgggcggcgccagcctgatctcccgctgtttgggacagggcgaccgccaaaaagccggacataccgccgctttctgcatctggagcgccattgcggtctctcttatctatggcatagcggtcctactgctgcggccggtgctgctgcccttgctgggcgctgatgccgaaaccttcggctattcttcctcctatgtgctttacagcatcggcctgggcgccatgccggcggcgctcaatcccatgctggcacatttggtccgggcggagggccattcccggcaggccagcctgggggtcgcctttggcggcatcctcaatatcctgctggaccctttcttcatcttcgtgctggatctggaaatcgctggggctggcattgccaccctgctttccaatctggccgcggcaggctacttcacgctgttcctgcataagatccgccatgagactgccattaccatctctccccggcagtatacgctggggcagcacatccccggggaggtactctccgtagggctgcccagctgcctcatctcggtcatgggcgccatcagcaataccgtgctgaaccactttacctccggttattccaatgccgccatggccggtatgggcattgccaaaaaggtgaacctgctggcctttgccgtggggcagggcatcacccagggtaccctgccgctcatcggctacaattacacctccggcaaccgccagcgaatgctgaaagccatctacggcctgctggtgggctgtctggccgtttctctgctcatcaccatactgctgtactttggggccacccctatcacccgctggttcatcaatgatgccgaaacggtgtcccatgggtgcaccttcctgcaaatcatctgcctgacctgccccaccagcacctttatcttctttgccattacggtgttccaggccacaggcaagcgggctcagcctatcttcctttccctggtgcgcaagggcaccaccgatgtactgctgatgccgctgttctatcacctcatcggcatcaatggcgtagcctgggcttcccccgccgccgatcttgtcggtgttctcattgcattggcagtgctgctgccctatctgcgccgcctgcggcagatgcctgcctctcctgcaccggagcattcctaagccatcttcctttctttcacggccattcggccgcatatccaaaaaatctcccctgccttgaataagcgggggagattttttatttaccggcgggattgctttttctaccgacgcttatcattgatgttcttgatatgctcatcggtgatgagggtcacaccgttttctttggcctaggccgcgcagccattcaataccgtttttaggaacggccgagacaccttgacgaaattttcagcgcgtcatcggtgaattatacgctgtcatcgcagcggttggcagcatagcggatggattcaagatccgtttccttgggtgccgggatcggctccgcaatgggctttttaagcccgcgtgggaactgggtgtaccagaagttcgtggaatcccggtagccataatccaccggtaccggcggaaagttattttttatcacaccattgatgagtgcatcatagtattccggtttcatcagaatcttatcgatactcttggggtcaatccccagccagcccatcttttctcatcgttgtacccggcatcaatcataatggtggtgtctcccttgcggtaaaagaagatattggccacctattcccgtacgcaggccacatgctcatcgatccacccggtgttcggcggctttctatgatcttcactggttttagtatgcccactctccccgccttgtcaagcagatctccctcttgctatccttcataaaaacctataaaatagagctgatctaccattacaccctagggaggatgctcatgctgaccgagcacgaagaaaaacttatccaaagatactatatttaccccaaaatcgctattacagcggtcattatggcgctggcgctgggggtccctttcatcctgctggaaatgatcgatgatctcgtttttcacgatgaagaagtcatcttttggggcctttatgtctatttgggcttcgcggccctgtatctcatccttttctgttactgcacccttcgagccaagctgggaatgcggaaagaggaatggcaggagctgcagcgccgtctcagggtccgtcagcagcagtccgattattccgcagctgccgcgggcgccatggccatgggggctgccggccgcctaatgcaaaaaagccaaaataaaacagtacggggtgccggtactgccgcccaggtcgccggggcagtgggggccgtggccacggccggcgccatgagtgccgagattgcccacaatgctcaggccatggcggaagcctacggtgtccccctcccccgcaccaaaggattgagaactgtactggtgctgctgccgctggtgattctcattggcacctacatcccccagtacagccacgcccatactgccatgcagcagaataccctcctcgtttcccagcgcattgaagagatcaccaaagctttggatccggtctgtgaatacatctctgccgatgaccccgccgaacgctatcaggattacggctatcgtgtcattggctacctgcgcggcatgaataccgatgcccccaaatgctatgtttacatttcgctggactccaccggtgtgctggaatctctctcctacgatgaggaaattattatgtcactcagcctagaggaaaacctcagccgtatcgaaaaggactttgaaacacttcaccgcgtcctgcaaaaagcagacattcccacccaaagccccgaactgctcaccacctatcagctttccgaagaattccgggaggccttccttgccggcacctattatcagagcatcgattgttccgaaaatggtgaaagcacccgtgtttactggagctttgaaaccgaatccgaggaagaatttgatgaatacacccgtccccgcgtatacctctatgtgcgggcgtaaatcgctcggtggccgttcagtcaaatacccattggggtggcagattaaaactgcgtgatacccgataaggcccacattttataactctactatctcccctccaaataccaaaagcactaaaaccgggacagtcgctgaaaaagcgaccgtcccggttattattatattttcagcccaggggcttcatagtcgggaacagcaatacatcccggatggaagccgaatcggtcagcaacattaccaggcggtccacaccaaagcccaaaccgccggtgggggccatgccgtactccagcgcagtcacaaagtcatagtccacctcggcacgggtgttcggctcctcgcggcgctttgcctccacctgacgctcgaagcgcgccttctgatcaatggggtcgttcaactcactgaaggcattgccgtactcggtagcgcagatgaagtactcaaaccgctcggtaaaggcaggatcctccggcttgcgtttggccagcgggctgttttccactggataatcataaataaaggtgggctggatgaggttttcctccacataggcgtcaaacagctcggccagcacggtacccttggtcgcatcagcagggacctccacattcttcgccttggcggcggcgcgggcgtcctcatcgctcttccagtcgtagtagtccaccccggcgtacttcttcaccgattccgccatggtcaggcgctcccagtggcccaggtccagctccacaccctggtaggtgatcctggtactgccgcagacattctgcgccaggcgggtatacagctcctccaccaggtccatcatgcccttgtaatcggtgtaggcctggtacagctccacggtggtgaattcggggttgtgcttggtatccataccctcattgcggaagatgcgtcccacctcgtacacacgatccaggccgcccacgatgagccgcttgaggtaaagctcggtctcaatgcgcaggtacatatccatatccagcgtattgtggtgggtcacaaagggccgggcggaagcgccgatctccagcggcaccaggatgggggtatctacctccaggaagcccttctcatccaggtagcggcggatctcggtcaggatgcggctgcgcttatagaaggtatcccgcacctccgggttcacaataaggtccacatagcgctggcggtaccgggtatcggtatcccgcagcccatggaatttctccggcagcggcagcagggacttggaaagcagcttgatatgggtggtatgaaccgagatctcgcccttctgggtacggaacacggtgccctccacgcccaggatatcaccgatatcccacttcttaaagtcggcatagtcttcctcgcccacatcatcccggcgcacatatacctgcagccgtccggtggaatccagcagatccataaagctggccttacccatcacgcggcggctcatcatgcggccggcaatgcgtaccgttttgccctccagcgcctcaaagttatcccggatctcctggttcttggtatcccagtcatatttcgtgatctcataggggttcttgccggcttcgcacagtgccgccagcttgtccctgcgcacctttacctgttcgtgcaggcgctcctcttcttcctcggcctccgccgccgggttcattaccttttcttcgctcatattttgtcctccttcaccggcgcaggcatacccgccccgtcacattcatccattcctgcagggggcaatctccggacgcccctccgcttttatcgagccgccccgcttcgccggggacggccctccctcgctgcggagcgcccggtgctcccgccactgccgctgctgtgggtatcactttattctaccatcaaatgccccgcagggcaaataaaaaagcagaaaagttcagcacttttctgcctttttgccggtaaattacttgctgatgtccagaatgaccatctcgaaggcgccgccgggggcttccaccaccacggtctcaccctttttatggccaataagcgcatggcctacgggggactggtcggaaatggtgttcatctcgtggcccacttccatggcgccaacgatgaggtactcaccctcttcctccatatccttatccagcaccttcaccttggagccaacccccaccacatccagcgaaaggctgtcggtatccacgatggtcacatgcttcagctgctcttccagcacggcaatgcgggcttctatttccgcctgctcgtttttggcagcatcgtattcactgttttcggaaaggtcgccgtagccgcgggcgatctttattttctctgcgatctcgctgcgtttggtcgttttcagctcttccagctctttggccagctcatcatagccggtctgggtcatttgaatggtgtttaccatgaaatacagctcctttacgggaggcaaacggtgccccgctgcccgacgatagtctaattattatagttttttctgcccaaaatgtcaagtacgcatcagcttccccagttcggtaaattccgccagccgtccatcaatgcggcatcccccaagggtcagcggcagcttcacccggcgggtaccgcactccgttaccatcccccaaaaggcggttggttccgcccccggtggcacctccgccagctgttccggcgtcagtgccagcgtcagccggttcactgtggggttcccctgtatcccactgcggtctgcagtgattatcggccgccgcacccgtatcactcctgttggatagggcgccgcgcaaatggaacagtcctccagctcggctggggtctccgcccatagcagcggcaggccgtattccacccgcagcatggtttccgcggcagcatagcggcttcgccgcaaggtatatacctttactccccggcagcagtccagccactccccgcaggcccatggcgctattccctgcgggtccagcagccccagcaatccgctgccctttcccgcggtttgttccatggcctgccgggcggctgccaccgtcagccttgccgtaaagtcttgcggccggtaatcccgcagtgggcagccctccggtgccaatacctccggcggcaacagcaccggagaacgcgggcggggacacagcagggccagccggttccaaggcagccgttctactgggccgtgccacactatatatcggtagcggttcccaccgcagctgcggtcctcccactccagggcatcaccccgcagcagccgtcccaatctctgccgtagcggttcttttttgtcctctattgccaccaccatgaacatcccttgtgccccctttgcctgtcctgttccatcctatgcgccactaggcccatttagtacaagccaccgggctggggcccgcagggcaagccgtccttcggacggctttgggggggcggccgtaggccgccccctacgcggcactccgtgccgcggccctgcgggccccgacgcaccccacccctgcctttccacctgctaaagctctcccccgcctcagattaaattccgtacatcccctcaatccatttccgccgtacagcgaacaaatgtttcacgtgaaacatttttgccgcaccaaaaataaccggccccattccggagccggtcaaaagattttattttattaccggatggccgctgccagcacttccagtgccttcttatagggggcatccagttcagcgttgcccaggatatcaccccggttactctcgctggccgccagttccacttcatagtcagggcctacgcctgtatcgccaaaggtcttttgcttgggcccggcatactgcgccgtggtgacctggatggccgaaccacccgaaagcttgaagatctcggtgatatcgccgttgccggcggtgcgggcgcctaccaccttggcccggccaaagtcctgcagcgccatcacaaagagctccgtggtgccaccggtggtctcatcggccagcaccaccagcggaatatcccagctgttcgcatcggattccgccacggcggtcaggttgccgtccttatcgcgggaataggccacagtaccgctgggcagcagcggatccagaagccggaccgcataggaaagctcattgctggtaacgccgcgtacatccagcagaataccctttacttcctgggccttcaaggcattcagctgggcgatgaactggtcggcagtggtaccgctccactcggtaaagctgatataggcggtatcttcacttaccatggtcgtttttactgtgggcacctcaatggcgcgcagggtcagctcgtagttgttctcctggctatcctgttggatggtcagagacaccttggtgtcggcttcgccgcgcaggcggcccgccatgctttcattgttattttcggtcacgcgggtgccgtttacattggtaataagcgcccccaccttgatgcccgccatctgcgccggagaatcgggataaacctcccgaaccagcaggtagccggaggaatccatctcggtcaccagacccacgcctacatatttgccgctgccggattgggtataggcctcatattccgcagcggtgaagtagcgggcattgctgtcctccaggccatcgatatacccgcgggcaatggcctcctgcagcgcttcctcattgatggagccgtagtaattttcccgcacatacaggtctacctcatgcagagagctgtacattttttcccgttcggtgatgcctgtcatcttcacattgaacaggttcatcgagtagatcatggtaagggaaagggccacagccgctacgatggccatataggcgatggccgcgccaagcgaaattttcttgttcatgctgttttatgctcctgttgtaacgccgcttacctgcacagtgccgttacagataattgagcggattggtatgcgcgccgttgcggcggatctcaaagtggagatgatagccggtagaccagccggtggtccccacataggcaatggtctgccccttggtaacggtatcgcctacattgacggcaaccgaggtgcagtgtgcatatagggtggaaaaaccgccgccatggtcaacgataagataattgccgtagccccatgccctgccgtaacccgcaccggtacgcacatgaatgacggtgccggaggctgaggcgcgaatgggcgtattggcaggtgccggaaaatcgattccggtgtgataatcggtattattgaagcgccagccgtagtagctgctgatgtaagtatagccctttaccgggtagataaatccggtggtgctgtaatccacctggctgccgttgccggcattggcagcatagatggcgtcgatatccgcctggatctgcttcatctccttctggatggcagcctgatcggcgagaaattcctgctccatctttttgatatcctgcagggtgctttccacctcggtcttttggctgttcaggctggccttcttgccctccgccgtcaccttggtatccgccaggtcctctttttcctcctgcatctgcgcctgcagcgtccgcagctcggtgatgttatccgcgagggcttgcagcagggcgctgtcgtgctccgagatgcggctgagatacttgccatagctgaggtaactgcccaggctatccacgccaaagaccatgcccaacatactggtgccgacgctggtcttgtagatagagcgaatgcgcttcataaagaggtcctgctgctccagtacttcgatgttcagctcgttaatgcgctcctcttt

SEQ ID NO: 1362 - DNA, 12731 bp, Unknown
  16S sequences of unknown bacteria
caggatcggcggcgacaggagcggcactggagatgtgatcgcagccatcattgcgtggccgtcaacaacgagaccggagcgatacagccgataaaggaggcctgcgccctgacgaaaagagcggcgaaaaacgcccttttccattgcgacatggttcagggcttcggaaagctttgcgaaagggcaaaaaacctcggagccgaccttgtctcgataagcggacacaaggttcacgccccaaaaggaatcggggccctttatgtcaaaaagggcgtccgtataaacagcgttcttttcggcggaggacaggaaaaaaatctacgctcgggaaccgaaaatcttcccgccgccgccgcattcggagttgccgtttcggaaatccccgatgaggcacaggctcttgaaaaaaccgccgcccttcgtgacaggctcaaaagcggtcttgaaaaaatcgacggcattgttttcaattcgccgaacgacgcgctgccttacattctgaatttttccctctgcggcgttccgtcggaggttatgatacattatctcgaggggatgaacatttttgtttcgggaggcagcgcctgttcaaagggagggcgcagccatgttctcgaggcgcagggactgcctgtcgaaatcatcgacagcgccgtgagggtcagcttttcgaccgacacaacaaccgagcaggtcgacgagctttgtcttgcggtgacgtcggcttcaaaaattttaagaaggaaaaaaagatgaaagaaatcatacttataaaaaacggcgaacttgcccttaagggtcagaaccgccgcggttttgaagaaacccttatgaaaaacatacgccgccgcataaagcctctcggagaggccgatgtgcacgccgcccagtcgaccgtttatatcgagccgaaggacgaaagtttcgatacggccgaggcggcaaggagggtttcgaaaattttcggcattgcggcatacaccccctccgccgtcaccgaaaaggacatggacagcataaaaaagacggcggcggaatatcttgaaaagcagctgtcggcggctaaaacctttaaggtggaggccaaacgcgccgacaagacctttccccttaaaagccccgaaatcgcaagggagctgggcggatttttgctgtcgaggtttcatcatctcaaggtggatgtccataatcccgacataaccgtcacggccgaaataagggaaaaggccgcctatgttcacggaaatcagattaagggagcgggcggaatgccggtgggaacgggcggaaaggccgccgtgctcatttccggcggaatagattctcccgttgcggcctacaccatggcaaagagaggtatcgagcttgtgggagttcatttcgcaagcccgccctacaccggcccccgagccgagcaaaaggtcagggatcttttgaccgtcgttgcgcagtacagcggaagaattcctctttttatcgtgccctttaccgaaattcagcttgaaatcggggaaaaatgccccgaggagctgttcacgataatcatgcggcgttttatgatgaaaatcgctcagaaaatcgccgctcgtgaggaatgcaaggcgctcataaccggcgaaagcgtggggcaggtggcaagccagaccatggacgccattttctgcaccgataaggtttgcgaaattcccgttttccgccctcttataggcagcgacaaggacgagatagtcaccgtttcgagaaaaatcggcgcctttgaaacctccattctgccctatgaggattgctgtaccgtctttacacccaagcacccgagaaccaagccccgccttgaatatgtcgaaaaggccgaggccgctctcgacgccgagggacttatagaacgcgccgttgagggagcgcgtcttgaaatcataagataaaggtgattttatgaattgtgaaattatcgcggtcggttcggaaatcacgaccggcgacgttacaaatacaaatgccgcctttctttcgggagagctgacctctctcggggtggaggtgacttgccagacggcggtggacgataaccccgctcacattgtggaggcgctgcgcgccgccgtttcgagaagccacatcattatttttacgggcggtctcggtccgacgcaggacgatttgaccaaggagactgttttcagagccgtgggacttcctctcgaaataaacgccgactctaagcggcgcattgaaaactattttgccgcaaagggcgtgccatgcccgcaaagcaacatgaaacaggccatgttcccgaaatcggccgttattttcgaaaacaaaagcggaaccgccgacggctgcgccgtcaaatcgggaagtcaatgccttattctgcttcccggcccgcccggagagcttgttcccatgtttgacgaagtcaaaagctttctcgccgaggactttctcggcataaagacctatgtcaagaacataaaggccttcggcatgggcgaatcggaaattgccgaaaaaatcgccggcataatcgaccgcaaaaccccgaccgttgcgacatatatcgaggacggcggcgacgtgagaatcaaggtttcggccttgggaaccgattatgacgagataaagtcgctgtgcgacaaaaccgcgggggaggtcatggacctgctcggcagcgccgtttataacgaccgcggacttcatcttcaggacgtggtggtggaaagtctccgtgcgagacaccttaaaatctccacggccgagagctgcaccgcagggctgctttccaaaatgctgaccgacgtttcgggttcttcaagcgttttcgaatacgggatttcggcatatgccaaccgcataaagaacgaaaaactgggcgtcagcgagcagctgctcgagcgggtgggagccgtcagcgccgaggtggccgaagcaatggccaagggcgccaaaaaagagggcgaggccgatttgggtctcggcataaccggacttgcgggtcccgaagggggaaccgagcaaaagccggtgggtcttgtgtttatctgcctttacgacggcgaaaagttcttcaccaaaaggcttaatcttcccgaaaacaagggcagggacgagataaggctgcgcagcgccatggaggctttgaacatggtcaggctttatcttgaaagaaacggagattttctgctgaccggcaaaaaggacaacgacgtattttcggtcagggagaatttcagtaaggctcccgacccctttgcggttcaaaagcccgagcagaaatttgtcaaaaaggagcctgtccccgtgagcaaagcgaacaccgctcccgcaaaaaagaagaaaaaaaagaagggcggcgcaaaggagattttccgccgtattgtcatgttcatttcggcgaccgttttcctttgctcggcgctttatatcggagactatgtctatcagggcattaaaaacaagcaggagatcgaccgccttaacggtctttattcgggcaacggtatgctggacgaaaacggcgtaaacacaagcttttatcagctcctcgagcaaaaccccgacacggtggggtggataaacgtgcccaatacccaggttcacaatcccgtcgtcaaaacaagcgacaacgacaaatacctcaccaccaatttcgagggagaaaagagcaaatacggaacggttttcgccgacatgaacaatgttttcgaaaagggccccgtcacgagcaccaacaccattctttatgcccaccacatgaaggacggtcagatgttcggcgagcttaaaaaataccgtgaccttgatttttacaaggaaaatcccgttataagctttaccactatttattctccgaccaccacccgctggaaggttttttcggtgtttatcatcaatacccacagggacgacgacaacggaaatctcttcaactatatgcggacggaattttcgggagaaagcgattttgaggagtttattcaaaactgctatcagcgctccataatcaccacgccggttcaggacgttaccatgagcgacaagctgctcaccctttccacctgcgtatacgattttgacgacgcccgccttgttgttgtggcgcggcaggtgagagacggggaaagcgagtcggtggacacctcctcggcaataatcaatcccgacccggtctatcctcaggtataccgaaaaagatacggcgccggccgaaccacgatggaatattcggtttcccccgcaggttatgaggcttataaaaaaattgcggccgcggcggataccgaccgccttaccgcttatataaagaaaagccttgttttttaggaagtgttcttaatgtcaattgaaaatgtaagaaaacagcttgaaaaattcggacttgacgaccgcataagggagtttgacgtgtccagcgcaacggtggctctggcggccgaggcgctcggtacggctcccgaattcatagcaaagaccattgccgtttcggacaaggacggggaaggtgccatgctcattgtcgcggcgggggacaaccgcctgtgcagcaggaaattcaaacagcacttcggctttaagcccaaaatgcttaaattcgacgaggtggagcaaaaaaccggccaccccgtgggaggggtctgccccttcggagcaaaggagggggtaaaggtctttctcgacgcctctctcgagcggttcgaaaaggtatatcccgccgcgggaacggcaaatacggcggtggaaatcaccctttgcgagcttaaaagggtgaccggctgcgaggaatttatcgacgtttgcaaaggagcggagcagcaatgaaaatcggagttataacaggggcgtcatcgggtatgggacggtgctttgccaaggagctcgacaaaaaggggctcgactgcctttggcttattgcgagaagggaaggccgtcttgccgagctttcggaggagcttaaaaccccggtcaaaatcatgcctctcgacctgcttaaaaaggaaagctttgagcgctatgcggacgagctttcccgccataagccgacggtgagctatcttgtcaactgcgccggcttcggaaaaatgggaagtgtggaggaggttgggataaaatccacctgcgacatgatcgaccttaacgtcaaggcgcttgccgtcatgactcaggccaccgttccctttatggaaaagggcgggcacattatcgagctttgctcctcctcggccttttatccgcttccctttttcgattgctatgcctcaacaaaggcctttgttcaacattacagctatgccctcgccctcgagcttaagccgaagaaaatttcggtgactcaggtcagccccgggtgggtggccaccgagtttttcgaccacaccgacgagcaaaacaccgagcacgcccccaaaagatacaagcccctttaccttccgaaggacgtggtaaaaagggcggtggaggacgccgacataggcaaaaaattctcggtttacggcggttttgtcaagcttcataaattcggcggaagatttttcccgagatggtttatgaacgctcagtggaaaagccgtttgaaataaagccgggcatctgttgcttaaccataacgcacatatccgaacacgcctgaaatagcctattaacggtgcttttcggcttgtcgtcgcatataggctgtcggattaacgagcattttaacataggatgtggggatttttctccgccaaaatcgtgttcgtatgtgtgtgttatggttaaactttcggttttgctcttgaccttgagggcaaactgctatataattactgggatataacttcaaatcttgggaggaataatcaaatgaaaaaagttttatgtatcggttcggtcacaaccgacgtcattatcaagccggtggatgcgctccccactcccggcgagcttcagtttatcgacagctcgtccatgttcgtgggcggctgcgcttccaacgcctccatcgaccttgcaaagctcggtgtgccggtttccctttgcgttaagctgggtaaggatcttttcggccactttgtttacgacacctgcaaggacgcgggcgtcgatgtgagaggctgcgttatggacgaaaacgttcagaccaccacctctatcgtctgtgtgaattccgagggcgagagaagcttcctttataacggcggctccacctccgccatgaccgataaggacattcccgacgagctcattgccgacgccgacattgttttcctcgccggcgctctgctgacccacggtcttgacggcgagcctgccgcaaagatgtttgcaaaggctcagagcatgggcaaattcaccgtcatggacaccgcttgggatcccaccggccgttggatgaagggcgttgaggccgctctgcctcacctcgatctctttatgcccagcatcgaagaggctcagaaaatcgccggaaaagaagatttcgacgacatcgccgacgttttctttgaaaagggcgtcaagaacgtcatcatcaaggccggcaaaaagggtgcatacatccgcgagggcggcaaaaagggctatttcgcccccacctatctctccataaagcccaccgacaccaccggtgcgggagattccttctgcgcaggcttccttgcgggacttgctcaggatttcgactttgaaaaatcggcaaagctgggcaacgccgtgggaacccattgtgttatggagcttggcgcctccacaggtattaagccccttgccgaaatttataaattcatggaggagcacaccgacgaggttgccctttaatcaaaggagattttaaaatgaaacgttcggaaatcaacaaaatcataaaagatgccatcgccttcctcgacgagcacaagttcctgcttcctcccttcgcatatttcacccccgaggagtggaaggaaaaaaatcacgagtatgacgaaattcgcagaaatgttctcggttgggacatcaccgatttcggttcgggcgatttccgcagctgcggtcttttcctctttacccttcgcaacggcaacgctttcaatcccgacgacaaaaaggtatatgccgaaaaaatcatgatcgtcgaggaaaatcaggtcactccctaccactatcactggtataagcaggaggacatcatcaaccgcggcggcggaaaccttatgatcaaggtttacggagccgacgaaaacgacaatctttcggacgaggatgtcgaaattcaggtggacggcagacattacaccgttcccgcaggtaccgttgtccgtctcacccccggcatgagcatgaccaacaccaaaaagctttatcactccttctggggcgaggaaggccacggaaaggtgcttgtcggcgaggtcagccagtgcaacgacgactccaaggacaaccgtttcttcgagcctgtcgacaccgagccttacaagggcgcaattaaggacgcggacacctcctccgcccgcttctttgccaaggtcggccgtttccccgaggtggaagaggacgaggctcctctctatctgctcggaaacgaatatcccgaggcaaaataagctttgtaaaaacaaaatcccattgccgaggcaatgggattttttagtatgtatatttcgtcagaccgttgctgcagcggcgggtttgccgtcctttgcggtctttgccgtgctgaccgaatattccagcactccggggatcgtttcgccgtcgatttgaagggcggtgggacggtcgaatttcaccgtgatttcgcggccgaaaaattccttgacaatgtcggcgtgctttgtaatgtgctcacccttgaaaatggaagggaaggcgcaaagggcgttaagccttgttttgccgttcatgaccatgagggcaaccgtatgctcgggattgagcctgttctgattgggagcggccatcatgccgccgccgaaatatctgccgttcatggtgggggcaagccacaccttttcaaaggtcatttccttaccgtcaagggtaatgacggcgttagcgggggtgtatcctccgaaaagacctttgacggcaatgggagtgtaatttatgcttttgccgttgagcgtccgctttttgtccccctcctcacagcaatatccgtcgataccgtagccgatggcgtttaaaaacagcgacgactttccgtttaccgtgacggtggggagatttttgagatatttatttattttaaagggaggctctccctttttcttttcaagatcgtttaaaaaatcgttgccgcttccggtggcataatagaaaatgtcgttttcggcatttatgcccgccgtgtcgtttacaaagcggttgagtgttccgtcgccgccgcatattatgacgggacagcccttcgccgaatcaaaaaaatcgccgtagctttttatttttgtcatgtcgcagaagtcgagactgtcgcccttcataagggagatgagctcctcggtggccatgacgcccctgccgtttcccgcaaggggattgaaaagaacgtaatatttcatgaaaaaaccttcgtttcggacttttttaaaaagaaccggcggcataatcacaaggaaaatgccgccgtgaggtggactttaaaagcctttagtcgagtatttcgccggtgaaattgggagagatacctgccgcgttgcactcgtcggtgtcgatgtgcatggcaagagcgaatttttcgctgactctgacgacgacgtcgccgaagatggtctctctgccggtgccggaggccttgaccgaaacgatctgcttgttttcaagaccgtatttctcggcgtcggcgggggtcatgtggatgtggcgcttggcgcagattacgccgtggtcaagctcgacctcgcctgcggggccgacaagcttacatccgttggtgccttcggtgtcgcccgactcgcgaatgagggcgttaaccccgatggaacgggcgtcggtgagggaaatctcaacctgggtctcgggacgaacgggtccgagaatggaaacgcctttaagttctctcttggggccgacgacggttactctctcttcgcaggcaaactggccgggctgggaaaggtcctttttgggggtcagctcatagccctttccgaaaagggtctcgaggtcttcttgggagacgtggacgtgacgggcagaggtctcaataagaacgggttttgacataaaaatcaactccaatttaatatctgacaataattttaacagaaaattcgacttttttcaagtcataaccgttgagtatttgaaaaaagtgtgataaaatagtgaaaataacaaaaaaggcggtggaaaaatgacccttgaagagcttcggcaaaaatgtctttgctgtgaaaaatgcgagcttgcaaaaacgcgcaacaacgtggttttcggcgtgggaagcgacagcgcgagagtcatgtttatcggcgagggcccgggagaaaacgaggatctgcagggcgaaccatttgttggcagagcgggaaagctgctcgacaaatttcttgccgcaatcgacctcgaccgaagtaaaatatacattgccaacatggtcaagtgccgcccgcccaaaaacagagacccgaagcccgaggagcaggaggcctgtatcggttatttgcgggagcaggtgagaataatccgcccgaagataatcgtgtgcctcggccgcatttcggctcagcgactcatcgatccgaatttcaaggtgacggtcgagcacggaaaaatcgttgaaaaaaacggcgtcctgatgatgggaacctttcatcccgcagcacttctgcgaaatcccaacaacaagcccgccgcttttgaggactttattaaaatcagagaagttatttccgagcagaccgagtcttaaaagatttgagaggccagcgccgggaaggcatagcatatgacggtgacgatggcggcggctataagtacgccgacggtcacggcaaacatgcttttcttaaagtcgatgcggaaaaggtcggccgcaagtgagccggtccaggcgccggtgccggggaggggaattcccacaaaaacgataagccccgcaagccagccattttcgatgtttttgcccttgtttttggtgcgttcctcaaaccactcgatgatttttttaaggtgcttggattttttgagaaaatcaagtattcttctgacgaatttaagcacgaggggaatgggaagaagatttcccacgatacaaatggggacggccacataccacttcattccgagcagcgccgccatgattatgccgccgcgaagctcgaccaccggcagcatggaaattatgaaaataacgacctcgttggaaagcccgagcccttgaaaaaattgcgtcaatgtttctgccataaaatttgctcctttaccgtttatactgtaaattttataaaatctttgtcaaatcggttatcgcaatacggtaaagtttaggtgaagtgatttttaccgcccgacaatcataacatatatatgccctttttgcaacaaaagaatggagatgccacatgaaaattaccgtgcttgacggctatacctgcaaccccggagacctgtcctgggctccttttgaaaaattcggggattttgaagcctttgaatacacaaagcgcgccgacgttttggagcgctgcaataaaagcgacattataatcagcaacaagaccgcctttccgagagaggtgcttgaaaagcttgataggcctaaatatatcggacttatttccacggggtacaatgtcgtcgacgtgaaggccgcaagggagcttggcataacggtgacttttgtgcccacctacggaaccgaggcggtggctcagcacaccttcgccctcattttggagcttgcgaatcatgtcgcccttcattccgacgccgttaaaaacggacaatggagggattaccgcaaattctgcttttggaacacgccgcttttcgagctcaagggcaagaccctcgggattatcggctacggaagaataggcagggaaacggcaaaaatcgcccgtgcctttaacatgaatgtcattttttactcccaccgggatatgggtgagcagcccgacaggcaggtcgacctcgacacgctgcttaaggagagcgacattgtctcgctccattgccccttaaacgacgaaacgaaaggccttataaacgccgaaaatctcggcaagatgaagaacacggcgtggcttattaacacggcgagaggtccgtcggtggttgacggcgaccttgccgaggcgcttaacggcggaattatcgcgggggcggggcttgacgtctgcacaaaggagccgcccgaggaggataatcctctgctgacggcgaaaaactgcatcatgaccccccacatcgcgtgggcggccaaggaaacgagggaacggcttatttccctcgcggcgcaaaatcttgaaagctaccttgcgggaaatcccgtgaatatagcgaaataattcaggaggtatttttatgaaagtcttaatgttaaacggaagtcccaataaacagggatgtacctttacggccctgaccgaagttgcaaaggaacttgaaaagcagggaatcgaaagcgaaatcatggatctcggaaaggtcgcaatacgcgactgtatcggatgtaaggcctgccgaaagctggactgcaaatgcgtctttgacgacgacattgtaaatgttattataggcaaggcaaaggaatgcgacggatttatattcggctcgcccgtttattattcccatgcctcgggacggctgctttcggtgctcgaccgtgttttctatgcgggcagcgcagccttttatcacaagcccggcgctgccgtcgtgtcggcccgccgcgccggaacctctgcctcccttgacgacataaacaaatatttcgcctttgctcagatgccgatggttccctccacctattggaacaatgttcacggtaataccgccgagcagacggcagccgatcttgagggtcttcagaccatgagaaaccttgccaaaaacatggcatggatgctcaaatgtttcgaggcgggcaaaaagcagggaatagaagcccctgccgccgagcgcggaaaccagaccaattttataagataattgccttcccgggaggccgttttgaaatgacttcccggggaattttgtttttaaaggccgaaagtctgcacccttaaaaagaaagaggaaacccaatgaaaaaagccgcagccgtcctgaccgcagtgataattgccgccgcaatgtgcttttgcacccttgccgccgccgagcagccccttgttttttgcagcgacaagacaaacggcacaaacgacggaacccccggaaccgacggactctccgatcccaccgccgaaacgggcttttcacaggccgtgggaaaattcgagcagctgagcgacagctccgacgcagttcccaattttcacggatataactataaaaacgtgtcggacaggtttaattttgcctttgtcatatgcgccggccttcttgccgccgcagcggccgtctttcttgtgctgatttttgtgctgaaaaagaagattttcataattttggcaccctgcttttttgccgcaggccttgcctttttcggggtgtcggtgctgaccgctcccgcaaaaaacgcatttgcccgggacgaaaaggtaaacgctcttcttatgcgtgaggaggttactcaggaatgccgtactctttggcatacttctgta

SEQ ID NO: 1363 - DNA, 30497 bp, Unknown
  16S sequences of unknown bacteria
gtatcgaaatcgaaacggttaaactggtcgaattcgaccgggttagaataaatatggcatgtttttagaaaaaagcgcgttttggcggtataaaactattgacataacatattttatcggatataatagtgcgatttagtggaataaccgctatttggcaggtatgggataagaggagatgttttatgtatcaatatgttgaaagcaatgaggtaaagagataccgttcctattgttctaaagttttagaagatgtaagggatgatttgtatgattcgtttgggataaatactaatttttctcttgtggggagtggcggagatgctcgaaatatggtcacaaggaatggaaatgctccgtttgacttggactacaatttatatattatatcgatgccagacgaattttggggtgatttacgaaaattaaaggagactgttcgttgttctttgaataaggcggttggtaattcgttcttttcggacggaaaagattcaacgtcggtaatcacgtctatattgcactttaacgattctccgaaagtggaattctcgtttgacgtggcaatacttgcaaaaaattcggacggtgattattgccgactcattcataataagaattacggaatatatgatcagtggacttggtgtcaggttccttcatccaaagatgtgagagataaagctattgctataaaagagaatagtctttggggtgaggtgagagctaaatatttggataagaaaaacatgtatttgttacgcggagatacaaatcatccgtcgtttgtggtgtatgttgaaagtgtaaatgaaatatataataaatactttgattgatacgttaaataggctaaaagaggtttgcccaataatttagggcaagcctctttctactcaatgacagagtattcgggctcggattcatcttgtaaagaatcatcttcgtcatcatcgccgatgtcgcccgagtaacctttagaataaagtctgcccatagacagacggtttgcacgggactttttcttgccgttatattctataatcatggtttcggcaaaccccatgcaaccggactttcgttcttttgcgacacgagtgagttgttttactgaaacggctccgagtttttctttaaaaatatcatcgttcagaccgtctccgaagacggaaataagttttgcgacggcgttaagaatgtttgcagaaaaagaatgaagatcgccttcccatgcgcctataatcaagcgtaaggttcgatttaatgtttgcattccgtaatttgtatatatattttccaaggtcgatacggcgcaaataatccccggacctttcttgtttcctattgttaagccgtatgattctactaaacttttaatgataagttgggtgtcgtttccggcttcgacgttggcattgaacacttcataaggttggagcggttttacaaatttttgctgatttgcaaagatatttgcttcggcggtatatgataagtcgtcgtaaatcatgcaccaaacgggagtttcacgcgaaccggataccaaggctacgatttctatggtatgctgaccgttaaaaacgtaatttacaccgtcgcgacggctgacttttacgggattgatttgatataagtcaaaattttctgcggcacggtttatatgcccgagggatagatttctttgataatcctgatttgatacaaggtctttaataggaatttgttcaaagtgaacgttcgggacgaattcactgtaatcgggcatgtttaatcctccttaatgagagcggtaacggtatcaatagccgctttcagcttgtctaaaatttcgagtagttgccgcttcgctttgtctgatacgtttgcgatggtggcagactccgtggctttttgtatggaagtaatccatgacggaacggtaaggcaaagttgaattacaggggcgtccggattatgctccggcatatcttttacagacggctgatgcggcttggtttcttctttaggctcattttcgatgatcgaacgggtggtgcaatattgcacgaaaggatgttttcctctgtctaatcgcacgttgagttgcgttagttccttaggacttaattgttcgagcgcaagaacgtttttatgtgagattttatatctaccggataaaatttttgtttttagttctgggcattgctccgcaatatggtcaagagcgcgagaaaaataagcatatttttggacggttgcatgggttatattattttcggcgcctataatatgtgcggttttgtttttcgatcgctgtatagactgttcgggttcggaatcaataatataatcctcgtcggtttcgtcttgtttagattgtaacgagtgttgatttttaccgcgtatgttttttttgctgtcgatgattttttcggattcgtattgccgaccgattagatattttcgcgtttcttccgtaatatttcgtctcccgagttggtttttacatatccaaacgataacttcttcacgcgaggcaaaatcttttgatacggtattgaaaggaattgagtatttagtgcatatcgaatagcggttatgtccgtcgatgatataatcattccagataattatcggatctctgcagccttcgtcaaggatattttcttctaattgcaagtattctttacgccttaaaggtcgtatcaggtctttaaattcaggatctattttgagtatagggagcttatccattgcaatcttcctttaagtctatttttcttaaggacgaaaacgagaatagagccatgttttgttccggaataatgcaacctgaaagcctgtaggaacttttcatatcggctatgcctaaaacattgcataacttattgacaagcattgtggaaaacacttcgtatgaatcgtcgggggagagattttttgtatttaccttgagcggttgcgcgtcggtaaattctttatctacggcgcgtatcgcgaaatttcgctgtttttgacttataaggaattggatgaatttgggatcgccgagagcgtgaagggtagttttgtataaacgtattctgctttttctcggatcgattgtaaggagtacgttattctgctgttcggttgtcatttaatacctctgagtggttatcttgtccggtttcttttatagaataaatcgcataaccgtcgaaaatattgatttgtaaggactgtttatgttcgttaaacggtaaaccgaattggttttgccaatcggacgggtaaacgggcgttcgggaaaccttcattttatcttcgccgacttttgcttttcgataaatttcggttgaggttaaatcaaacgcgatgaggtattcgccgttcgcgtgaataagtttacccaacagtttatatctgtaattcggattccaatccataagcgacacaagttttgcaaaaaacagtttgcatgtgatagactttgcctttcttttactgttagaagagttgcaccacataaaagaatctcttgcgccttcttcgcaagggcgcagagcaagaattttctttttttggtttatcagaacttgagcgtaagacgcattcggaaatttagagaggcaggcggcattaacgtataatttgcactcgttgaaggttactgacggttcttttatatgtgcaaaaaattctcgtctgacgacctgatagtcgtcaaaatcgaagccgccgctcatatctaatatttcatcgtctttggcaagggacggttgttgtgtgttgggttgttcttcttgatttaatgagtcgggcaataaatcgttcaatgtattcgtatcgctcatttgttactcctgtgtggtgatgctgcttatttcttgattgatataagtccgtaattcgtcgaaaccggttacgttcaggttgttacccgtatcgcaaagctgaccgtctatgcgtaatttccaatctttttcgctttgttcggctaacgcggcaatcgattgttcgtgaatatagtattgtttgccgaaactgtttgtccattcctgtggaattgcacgtatgcgttttcccgaaggggtgagatgctggatttttgcgttttcgtcttgttccttcggcaagatatacggtttgaaaaaggcttcagagttatctatgttgaaaacataggcaatttcattgtttttttcaagtaaagagccgataatgcggtatttataatcggtgttccacccgaacagatcgtatagcgtgttgaaaaaagcggaagccgggatttctcgcggaagatgttgacctatggataattttgaacagcatacgctttgccgatttgttttatccgtttggcgtatggcgaattttcgttctttaggatttacgagtaattcaatgtaatttttatcagcgaacttcttcgtaatcgtagcaccgaatttaatttttttatttgcaaaaacaacgtaaggttgttttaccgaatcgaaaaattcggaacgggtaatttcaaaatcccgtaggtcgaaatccccggcggcgacttctatctgaacttctttcgggttatcgtcaacaagagtcggttgttcggtatcggtttccgcaagttgttcgtaaatgctttgagcggcttgaagatagtctatttctttgaatgccgcccagcgcggatttattatgacaaaaccttttagtatgccggatgaaattactttcagttcgggtaaaaaagatttgttgccgtattttgcattgtcaagcatatgttgaacggcaataaaatcatcgcgggagacgattgcttcgtgatggtttttatataaactttgcggttttttgccatagtttttctttgctttatgggtatgaaagtcgggtgtataggtttttcttgtgagaacgtcgccgcaatgtctttcgtttcgtaagatctgaacgatagagtttgccgtccagcagatattcccgaggtaagatttgcgaccgagagcgataagagtatcggcgatttgttgagtcgaatagccgtagagatacatataaaagcataatttaacagtcggcgcttcggtaggattgataatgagttgcccgtcttcgtcatgagagtaacccaatagtttaggggtgaggggaataccgttatcgagtcgcatccgaagtgatgtttccatgcttctgctacgcgtgtgagattcttcttctgccatcgtggctaaaaaagataaagccatttgagaatcgtcgttcagcgaaaatatggcttccgattcaaagaatacaccgacggggtggtgtaatgcagccaagtctcttaccatgccgatacatataagaacgttacgggcaaaacgggatacgctttttgtaataatcatatcgagtttaccgctttttgcgtcggaaatcatttcattgaatccgacgcggtggtcgagagaggtgccgctgatgccctcatcggcataaattttaacgagcgtccaattggggtgttttgtaacgaaatcctcataatatttcttttgtaattcaaatgatgtggtttgccttacgtcgtcggtggaaacgcggacgtagattccgactctttgattgacgtcattgtcataatagtcggtttctttttgggcaggaataaactcgtagttattcggatcgactttaacttgcatcctttgccgagttttctttttctcctgttccttttgttcgcgtttttcaatatcaatcatctgtaatcagtccttttggctcttcgtcggggagtatcttccaatcctcggaagggaagaattttgtgtccctcaaatcgcgtgtatagtaagaggctaaagtaaaaatgtcttccgatataaaataaataccgataggcggattttgtgtggcaagtagtcgcgaacatatcgtcagttcttgcatatctctcgaaacgttaccgattttttgggtgataataagattgactttgccgtccatgcaatcttgcaataatcggctccattctttggcagattccatatgcggagctgtcgcaccctcatctatataaaaatcgacaagttcccatttcgggcaaagggcgatggtgtcgttaaactgttttttgtgatatgagagataatcttcgtattttgtctgattgaaatagcggatataaatacctattttataattagcctcggtattcggacgttcgtgcctgatgctttgcagccatgctttatgttctgcgattgctcttgaacgttcagagtcgccgaacatagtaagttgtgccggcgttgcgatagccgtgagtttatcgaatacgtttaattcttccatagtctctccctatgcttgttgttccgcaatcaattataatgtcttttcgcgtaaaaagaaataaaccgacggtcaagtcgttgaccgtcggtttataaaaacaaaagaaaaataaaaaaagttgccgagtaatggagattcggcaacatgattatgtgatgttgtgtgggttacagtttgtttgagtgaaaagtttttttgacgtcggaaacgagtcttataatagattccatctcggtgggggagcaatcggacagcaggtcgctgaattccgattggtaaataccgttcacattcggaacgtccgggcgcaggattgtatctgcggaaatttttaacgcttcgataatttttattaaagtaacgacgcgaaggttagacttgccgagctcgatgtcgctcattgtgctaagacttaaatctgcctcaaacgctaatgcgtcttggctcatgtgttgttcgactctggcggctcgaatacgattgccgatttcttttagttttaatgaatttccatcgtccatattccgcctcctgttttattcttgtgactattttatcgtctattggctataaagacaacagccgattgccgaaaatatagtgcaacggctataataatcatgaatatttttttggaggtttattcatgattaactattacactatcggacaaagagtaaaagaggcacggaaaaagaagcatttatcgcaggcggatttggctgaagcggtagataaatcgacgagttacataagttatatggaaacggggttgaagtgcatgagtcttgaaacgcttgtcgatgtggctaatgcgttggacgtttcggcagattacattttggcggactgtataaacacgcatgaaaacgtgtgcgaaaacgaatttgccgagcaaattaaagagtgtaccttgtatgagagcaggattatcatcgatatggtaaaggcactgcgggagatcctgcgggaaaatgcttttacgaagcggaacagtaaataaagtatactaaaagtgattgaattacaataaaccggtagtttaaaagttgacctgtggttggtttcgagttgaaacatttttcaaaaagttgcaacaaaaacagaaaattgaaatatttttctaaaagttgaaacgtttttgagtgggacgaaaataggtctttttttatgctataattttggcgagactattagtaaatatgggagtttctatggcaaaagaagtagaggtgatatttgaagtagaacaggaactttatgacggagtgcaaaagatttgtaaagaaaacggcacgacgattgaagaggtaacgcgagatttcttgtgtttctgtgccgatcctaaaaacacgccgtttttgcaaagatggtttaagaataatgagcaatagacagttttacaggcttcggcttacagactatgctcgtcccggcttttcgtccggatggaaagactattacggaacgcaggaagaaatcgagggcatgataatagcgatcaaaaacaataaatcgatagacaatgacgttgacgggctttatgcggctcttacggagtttaagtcgggaaacaagacttgcgagcattcgattgtgtatggcagaagtcgatttttaacgccggtgagactgataggcaaaagtgagcattatgagaaaaactataagtggaaacacgttaatatctggcactatccgtattacatgagggcaaaagtcgctacgtttcggcagatagtaattaaggacggaaaggattatatccgagcgataaaacccgagtttgagtctttagaatatgcgcttgccgaaactttccgacattcggataaagtaggagttatgttttggggcttccccgaaatgattcgatataatgatgatataaagactacttcgtcgcggctatacattcttgagaagcgttatgcggacaagttgtcggcgtgtgccgatttgaatatgaaagataaaatagaactacaatcgttttgcgacgaaattttcggagacggataatggaaaaacaaaagatattttttacgagcgatttgcatttcgggcatgaaaacgttttaaggtttgacaacagaccgtttgaaacggtggaagaaatggacgatgaacttataaagcgttggaatgacaaggtagccaaaggagatcttgtctacgttttaggtgatttgatatggaaaaccgcaacaaatgaagcggttcagattataaaacgcttgaacggacagattgttttaataaagggcaaccatgatcggtttttacataatgcggcggcaaagaaagcacttgcaggaataaaagattatgacgatattagcgttacgcttgacgacggcacggtgcgtcggtgtattttaagccattattttattccgttttacaacggacatagatataatgctattcatttgcacgggcattcgcattttacggcggaggcaacggaagaatttcttatcgcaaaaacattaaacgaaaaggggtatgatttacagatttataacgtcggttgtatgtattggaattatgcgccggttacgttagacgaaatcctgaaaacaaaagagcagaggatcgataagaaatgagatattatgtaatttctgacgtgcatagtttttacagtgaaacaatgcaggctttgtccgagaaaggtttttttgaggataaatctccgcataaattgattgtttgcggcgatttgttcgacaggggatcggaatcggtgaaaatgcaaaattttatctgcgagcttctaaagaacgatgatgttattttggtgcgcggaaatcacgaagatttaattttagatttgattcgcgacgcaaagcagttgttcggacacggaatagagtatacgcaccactgtagtaacggcacggttaaaacagttaccgatttaacgggaacggatatttttacggatgactacagggatattataaacaagttatgcgcaacgccgtatataacggaaattattccgaaaatgctgaattattacgaaacgaagaaatatgtgttcgttcacgggtggataccttgcaacaatcgtcacggctggtctgcaaattattattcgcctatagaagattggcgagaagcaggcgagtcgagttggaaagaagctcggtggataaacgggatgcttgcatactcttacggggtgacggaaaaggataaaacgattgtctgtgggcattggcattgttcgtggggacattgtcggcttgaaggaaagtgcagtgagtttggcaaggacagcgatttttcaccgttttatgcggacggtattattgcaattgacggttgcaccgcatattccggtcgggtaaattgtattgttcttgaagatgagaatatataaaagaggtataaaatgagttgggatatttctcttacggatagggtaacgggtgaggtgttacattcggattctccgcatatgatgcgcggagggacttttatgcttggcgggactacggaactgtggctgaatataacgtataattacagtaaaatttatcgtcgcgattccgtgttcgggaaagacggtatagaaattattttcggtaagacgggacttgaaagcataccgttgcttgaaaaagcgataaacgcgttaggcgacgacgtttcaaagaactattgggaagcaacggagggtaatgccaaaagaccattggtgcaacttttgacaatggcaaaaatgagaccggacggaatttggcaaggcgaatgacgttggtaacggataaagatttacagaggtaaaaatggacaagcaaataagaatgtcggcttctgaagtcgatttgtataagtatatttatcactcaaacagattaaatcataacgatatagcgttgacggaggcagggctacagtcagtgaataaattgctcggcgaaatagaaaaaatagaacctacttatcccgataaacggtgggagttctggttttccgtgccgagaggaacgttaaaacaatacataaaattcaataagtattacgctccggaagattgttccgaagagaaatttcaaaaagatatggaagaagaatttccgtggaaacgcgtatggttcaaaatcggcgtcatcaacgaaaacggttacgttatggtttttcttgacgataccgtgcttgtgcgcagaagcccagatatgaaaggggatttctttccggactctcggttagacagaatacttgaatttttgagtcaggtagttgctaacaccgtcggaatgttgcaacaaggcgtatataacgattatgttaaaaaggggttgccttacgaaaacagaaaagggtttatcaaccgcgcgctctattggaaacttgtcccgaaaagcaagaggcacgatcgtgacgggttaaaggaaaaagaaatagacaaacttatagagcatatcaaaaacgggaatgacctatttgcgacgaaggcggcggggcgatatgagcggatgtcttccggaaagtattacgaagtttgctcttattgctataccgccgcaggttataaggagttagaaggaaagacacctaaagaaatgttcaaacgtcacggcgacgatcgtgacggcggaatgagtttgcttgacgagaattcgcaagacgacttcgataaatggtttaagttaagcacgcaggaaaaatgggagatagaaaacccttcgcacatgtgggaaatctcttgcgggcatacgcatatgatgattcatttgtatttgttttgggacgacggatattggttttatctttccggcggaacgcattgtttgacgacggaagtcgtgcgtatgtataacgcgatgaaagataaaggcgttcccgttcttctcggacacgccgggcaaatagtagataaactgctcggaaacgatgatctcggcattattccgaataatgatatggggtggcgttattggtatggcgggttcccgaaagaagacgtaatcaattttgttcaattaagcgacggtaacgcggaaacggttatcaataatgctacttggtttgatattgacgacataaaattggcagataaataacataaaaagcggctacaaattcgtagtcgctcgaatgtttttcggcagaattctcgttgttttttcaaaaagaagttttataacccgccataaccccttgacaaatttcaataaaggggttataatggggttacgataaataaaggagagggaaagtgtaaaaatgttattaacatatgaagagatgcgtgaaagggcgttcgagttttatgatgacttacaaataaatataccaaagatatatgtggatttagcggtaagatctttgacaatgccgcagtatgcaaaagaatatcaagataaatacggagatacaataggtgatcatacggctttagcgacggttggagatgccgtatgcggcgcatttcttatgttggatagatatacgggtgaaaaaacctcaaaaacgttgactgaagaaaaagagattgtcaagaatgacagattaaatgttattggcaagaaaatgctatgtgatgaagatggcatcttcttatttgcagccaataacgatttggaatcgaataatgatgaccatccgaataaaaaggcttacgcaacggcttttgaggcggttattggttttatctctttgctggataaagatcaaaatacaaaaaacgcagatagaattctcaaagaacagttatcaaatgtctgacggagggcgcaatgaataatcaagaaattcaaaatgagcttttacaagttcaaaaagaaataaccgaactaccggcggggtatatctcgaagaaaaatataaacggtaaaacgagatattatctgcaatggacagagaatggcaaaaagaaaagtaaatatgtcgatgatgcgattgtagacgatttgcgcgcgaagatagaaagaagaagagagcttcaaaagagagaaaaggagcttacttttatgcttcccaaaccgcataaaacagagaagcaggaagaagaaaaacacgttttcaaaaccgacgtaatgctcggagaaaacttaaaaagttacgttcagacagtcgcaaattacaaaaagagaagtctttataagaatatttgcgattatgtttacggggatgttcgcgatagagtttttatcctttacggattaaggcgcacgggcaaaacgacactcatacgccaggttatagccgaaatgaaagacgaaaatttttcaaaaacagcatttattcaggtcagcgcaggaatcggtttaagcgatataaatcaggatttaaaatacctgatgaatagcggatacaaatatgtgtttatcgacgaagtaacgcttatcgaagattttatcgaaggcgctgcgcttttttctgatatatttgccgcttgcggaatgaaaatcgtgttatcgggtacggattcgctcggattctttttttccgaagacgagcagttatacgaccgttgcattttccttcataccacgtttattccgtacagagaatttgaagaggttctcggcataaaggggatcgacgagtatatttgctacggcggaacgatgagtctcggcggcgttcattataacgaaaaatccacgtttgcgaataagaaaagcgttgacgaatacgttgacagtgcaatcgcaaagaacattcagcactctttgaagtgttatcaatacggcgggcattttcgcgcgctttatgatttatacgagaaaggcgaacttacaagcgcgattaacagagttgtcgaagacgtcaaccatcgtttcactttagacgttctgacgaaagattttatgtctcatgatttggggatttcggcaaggaatttgcgaaacgacaggcagaatcaaaacgatattcttgatagaatcgacaaagaagaatttacaaagcggcttaagaatctgctcgaaatcagaaataaagaagaacaaatcgtaacgatttcggaagagcatagaagggaaattaaagagtatctcgacgctttggatttaacggttgatatcgacattcagacgttgcccgtcgggcgtgaaaaggactacaaaaccgtttttactcaaccgggaatgagatattcgcaagcaaaagaactcgtggaatcgttgcttgaagacggtgagtttcaggagctttcgatagatgaaagaaatgcggttatcgaacggattttaagcgatataaagggtagaatgatggaagacatcgtgttgctcgaaacaaagattgcgaatccgaaaaagcaagtttttcagcttcagtttgccgtcggcgaattcgatatggttgttgcggataatgcgaatgcgacttgtgaaatttacgaagtaaagcacagcaaggaacaggcgaaagagcaattcaggcatttgattgacgaagaaaaactgagaaacacggaattcagatacgggaagatcacgaagagaacggtcatctatcgcggagaaaatacaactctcgaaaacggaatcgaatacagaaacgtcgaagagtatttgaaatcgctccgttgaaatcgcgaagtgtgtggttcaaaaacggaacggaaaaagcgagaaaactgaaaaacgaaaagtcaaaacggctgataaaatcagctattttgggcaacgcagacaaaccgtttgaaagtaacatttcgaacggtttttatttataaagtttatttttttggctttaaaatttcgaggggatacacgacttaaaattaaacgctaaaaaatacagtttctctttttagaaataggaggagagatttatactctcccgagatataaaagaatagcgtttgtttcaaaaacgtgttttggggtaatttttttaaagaagaatagaatggagaagccgttttaacccttttatcaaacattcaaaagagattgagtatttggttttgtaaaggaagctatctgaaaagtcgcttaaattttttatctgtaatttacgaaaataatttgacatatcataaaaaagatgatataattagcctgtataaaaagtaaatagtttttgagatactataagcaaagttacagcgatgtaacgacgcaaagctatagggacttatcaagtcagccagttgccgtgttcccgtcgaacgggaatatgtcagcgggcttatttttttgagataaaaggaggtgccaggcggtgaaaaagtgcgggaaagacgaaaagaacacaaataccgacaaagatgaaaaaaagaaatctgcttattccgttcgctttttcagcgtaatcgccgctttgtttttccttttatcggcaacgacgctcagctatgcgtggtttcgcttcggttttacttcgggaactatggatatgaaaacggacggcgacgcttccgtgaaattatttacggcgaattgggccgccgccaccgtccccgcctcctatcaatgggataagggagtccttttaaaagcctcctcttcaagcgcttccgtttcgagcgaagaattttttggaaaagaattttcgcagaagactgacccgctgcatttcggtactatcgataatttatccgaaagggatgaagaaaatatcgtttggttctgtttggaagtaaagacagccgaagggagaaattttgagggattaaagctcatttttcaaagtgatccttttagtttgtatgaacatatagaagctaatgattcttccgcaatgtccgaagtagcatcgcaagaattgaaagacgcgatcgataataccgtcgagagtggaaacagaaatcgcctggaaagtctgctttgtttcgacaacgtaataatatccggaaccgcacccgacaagctcggcaatgagttttttactcaaatcgacgtaaatacgactcaaagcgatgcggaatttgtgaggaaacaggagaacggcggagctatccatggatataaggggcgggcggcggaaagtgaaatttcaggcgagcgctattatatttatttccgtgcctatcccaatctcgacgcatacgcggaaatagcggaatatatcagcgaatatatgccctgcgtgttgcagttcaatttgcaggtggaaatttcggtcaataatgcggccgcggattctggaacaagcgtaagctctgcggcgtgaagggaaaaactttttaattaaaaataaacagggacgtccctgtttccgtaatacatgggtattacggaaaccatcaagtatttgtaaggagtaaaaagcgttatgaaaaaattaaaatccgcacaacgaattttattgatcggtctgtgctttttactttttgtcgtatcgattgcagtggggagttacgcgtattttaagacggatttaagggtaaacggctatgccaatgtaaaaatcgaattgttattcgatatgcttgacgaaacggcgcggacggagtatcaggaaggcgtagagagcgaagagaagataacattgacggaaagcgataaaatttgggggcataagggtaatccttatgtaatttcggcgcccaggcacttacagaatttatccacgctgcaaaatatcgggtattttaaggcgaaatttttaaattcaaactattccgcggacggcacgctgacgggagattcgaattattccgacggatataatattccgtattttcttgtcagcgacgttaaaggaaagcccgtggtgatagacgcctcaacggaaacgataaaaccggtcggggacgacaaatatccgtttgtaggaagcgtcaaaggcgtatcgggcgtacagacggacggtaccactatatatgcggaaatgtcgataaaggaaaaaaagacaagtacctccgctattcatggcgttaaagtggaggacaattcgggaaaactcgattttggatttttcggaacgataggctatttgggggtggagccggaggttacagaagacgacggaacagagaaaacttttgaaggacaaatttctaccgtttcggatttgctcttttcggacgttcagatcgttgtaaaagattcgatatgggaaaaaatagtagatttattgacaaatcatagattttattccgatttgatcgcttctaatccggagaaagatcctcatgaaaatcaccatatcggcattgtggcgggacacgtagagtatgcgcaattcaaaaatatcagcgtatattacagcagtgacgacattgtggcgatcgatttactcgatttagccaaagacaccgacggaaacgctatgaactattcctccgcaacgggaattttcggctttttatataatttgaatccaaagtttgaaggaggctccataacggtcggctccggacttaccaataccgatatttcttacggttttgaaggtgggggcggtcaggaatccggctctatgcccggctatattcgcgccgatgaaatgtataactcctattgctattatttgagtgcagacggaacgacgattgaacagcagagcggaaaagtcgaaatcataaaagcgacgagcgcagacggaaaacaacaattggctaccgccgtgacgaacagcgcaaatcagacgatgtattattatacggacggagtctttacgtttgctttatcggacgggcaggattcttccaaggtggattacgacaaaaacgatacgttagaagatatatgggaaacggataaggtttccgattttacgttgagcgataattggacgattggaaaagccgatatggaactgaggtattataaaaatttgaccttagtgaccgagttgaatcaaatttccgatgataaaacgtactatatcggacgaatcgaaaataacgtattttattatatggatttgacttctgtcggaactactgtccccggaacccgggcgcaaggagatatcacgacggctgtcgataatcccaatcagtttgttttgtcttacaccgatacgcaaaagagagcgaccgatacggggtacgcagtcaaaattgacaaaaatgagaatgcagaaacatatcaaatttatttggcgaatgatgctactcataaattgggcgtaggagaaagtccccttttgaatttgcatacaatttattgcggtaataaaagtacctctggaggttttccgaattataatatagattatacgttatcattatctattgaaaataacacttggacattttatagtccgagcattgaacaacatatcggatatagcagtagcgataagaattttagtgtttccgtatggggaactacccaagctgttcctatttatatctatcaaatagacgacgatagggacgacgtcaacacgaatccgtattcctatgttcctacgaatcaggaaagcgcgcatcatctccctgccgatcaatatgtgttatatccgcaaggtgaatcttcggcttcggcgacaaaaagcgctacgccgacttatacgttgacctctttgtcggatctcaattggaaaaatcagaacgggcaagccatttggacgggagaatccaaacttaccaaaatgtttaacatgaaaaaagcggtggattggtcgataacggcaaatattttcggattcggagcttcgatcggttcgcaaggggggattatgctggctccggtgggaacgggagcctatcgaaaatcggtctatattcctacgggaagtttggctttttatatcaataaagttccgacgaacggcgcaaagatccgcgtaattgtcaaaattccgcaaagcgatcaatttgggacgctcggttttgattccaataccagcggcgaggattactacttgggaatatggaaaggaacggtgagaaacaacagttggattcagcttgcttcctttgataagagcagggcttataaaaaagtggaaatgccccgttcgcagcctaagttatataacaatacgataccggagcacgatacgacaaacggatcggacagcgataatgaatatatcaatgtgacttatggaaatacgacctataaaacttatttgcaaggcggacattatatgcttgcctacgaatttgtcgtcgaagaaacgggtgtttatattctcgccgcgtctaattccaatatgcagcttgcctattgttcggtagacggtatcgcttccgcggggcgcgacggcaccggcggttctccatggggcagcgtcgatttcgtatacgataacaatgtcgataaaattttactcgtaaccgatacagaccagagaggcgaaggagtcgaagaggattgttcgaattattattacggctctaactgcttgttgtattttgacaacatcaccgattctaagactacggcctatataaacgatgaaaggataacgattcgacgatggacgaaaacgaattccgcaggaggaacggatgccgcgggaaacgtggactcctatttgagtattcgtgtggaatcaaacgcagacgatcagaatcatgagtacgtcaaatgcgcgggatatggtactccgcacgataatatagtggggataacctcaaaggatgtcgagggaatcgaatataccaatcgctgattcagaaagatattttggaagctatcaagaggataacgcttttttaaatatccgttgaaaaaatgaaaaaggaggtacccatgtctgagataaacaaaaaagacaaacgttcattgacgcgggcggtatgtttgtttgccctttccttcgttatgctgatggcttccgtgttcacgtacatgggtactgccttcggatggttttcttccaataaaagcgtaggagccaacggcgccaatatcgacgtatctctgctcgacgttaaagcggaaataaaaatagccgaccgcgacagtcagaaaggacaggtggacgaaaacggaaatatctcctttataaatcttcgcccgggcgataccgtctgcgtagaattgacgcttacgaacaattcagataaaaaattgcaggcggacttttctcttttggcgcctgccggctgcgaaatacccgtgatttcagaggggaaatattattatctgggttcccaattgaggataaaggaagtttctttttccggcgaaatagtttctcagacgagcgaaatgtatttactttcggcagcatggggagaaacaacggaggcaaaggctcccgtcggcctttccttgcatacgggagcgacgctgcctgcaaagacggcggcaggaagcgaggcgagaacctttgcggtaactttcgaattcgtcaacgccgatttcgatcaaagcattctgcaaaattttggtgaagcggaaggtcaaacgtgttatcgccgtctggacgcagcgtatagcatagcgccataaattattttcttttaaaaattccgctttgagattccttttcacaaaatcgatagagcgccgggaaaagcggacaatttttaagcggatgattctcattgtagaaacaaaatcatttaaacggcgcaggggttcaggattctaaaaagtgaagcggtttccctcataagagttgtttttggtcattaaaaaaacgcatttcaattgagatgcgttttttcgagcttttaggaaagaaaaagacatattttaggaagaaagcgacatttgacctattgactatttcataaaaatgatttaatatataagagtcggaaaatccgacgggaaacgctttactgcaagagcccctcatcgcaaaaaaagacaaaattaaacgagagaaacaatgaaatgaaagaagaaatcgtcacagaaagaaacgccgtggaaaaagcccggcaggggattcggataaagcatgaaacgaaaaggcgcttagagcgttcagatataaatacaatatagaaaaggagaactgtatcatgaaaagaattttgcctgcgtaccccctttttgttaaagacccgaatttttccctttgggcaaaaacggaaaactttaacgaggaaaatacggagagttggtggggcgccgaaaaaaagctgtacggctttttgaaaacgggcggaaagacgtactgctttttggggaaggcggcggattttgcgtcctgcggcgtggaaaaggcgcgacagacttcgctttcggtgacggctttttctaccgactgcgaattcgaggcgggggacgtaaaactgaaaatccgtttcatctctcccctgccccctcaaaacttcgaacttctctccctccccgtctgttacatggaatacgaaacggagggcgcggaagaatcggaactgtcttttttcatcaatcgccgcattgcctacaacgacattggcgaaccctgcgaccgcagtgtgcgcggaggcgttttggaattaaacgggtttgaaagcgcctttttggggctgaaacggcagcttccgctctccaataacgacgacgcggtcggcgcggattggggatatttttatctttcgggcgaaagcgcttatttactcgacgaaaccgacctcgcgggctatcttgcgggcggatttaaagaattcgcctctgccggcgaggaacgctatctcggctctatcaaccgcgctccttcgggcgtcgtcatggtggcttacgacgacgtcgtttccatcgattacttcggggaatttttgaaaggatactaccttcgccggcacaccgtcatcgaggctctcgaatacgtctatgagcaccgcgaagccgtcgacggggaactggctgcctttgacggcacgcttcgcgcgcgggcggagaaatacggcggggagtatttggatatcctctatgcgtcgctgcggcagagcatcgcggcgcataagctggtcgaggacggagagggaaatcttctctttctgtctaaggaatgctgttcgaacggctgcattgcgacggtggacgtcagctatccctccatgccgctgtatctgctgtataacaccgaattgatcaagggcatgatgcgtcccgttttgaaattcgcaaaactacccgtctggaaatatgattttgctccgcacgacgcgggcgcctatcccgcttgctgcggtcaggtgtacggcctgaaaaaagagcgtacccgttctcgtgtggatttggacaaagacgggcgtatgcagacgcatttcccgctctaccttctccctgcgtctttcgacgcctatgacgtggatttacagatgcccgtggaggaatgcgccaatttattagtgatgtttctcgcttgctatcgtttcgacggggacataaactttttcaaaaaagagtacgccttggcggaaaattgggtggaatatctcgtcaaatacggtttgaaccccgaaaatcaattatgtacggacgattttgcggggcatcttaaaaacaatatcaatctggcgatcaaggccaccgtgggaatcgccgcctatgcggagctcgccgccgcggcgggaaaaattgaaacgggaggaaaatatcgcaaaatcgcggaagaattcgccgcggaaattctttctttcggcaaaaagtacgatcatttcccgatcacgtgggatacggacgacgacactttttccctcaaatacaatttcgccttcgacaagcttttgaaactgggacttttcccgcaggaagttttcgagcgcgaaacggacctttacataggcaaatgcgcaaagtacgggacgccgctggatagccgcaagagctacacgaagagcgactggctgatgtgggcggcgagccttaccgaccgggatgcaaaaaagaaaaaactgatctcggcgctggacggatttttaaaggaatctcccgaccgagtgcctttcggggattggtatgaaaccgagagcgggaaacatctgaatttccgcgcccgttcggtgcagggaggctgctttatcctgttgctcggcgagtgaaggcggaagtcttttgcgcgggaagcgttggaaatccatcttttacgcaccctcaccataggggcgcgtaaaggatagggaaagaaaaagcgcaaagaaaattgagaaaaagcgcgtcttcggcgcaggaggggagccaacgtatcggaggcggagcgcgcaacgggagagataagccgccgtaaaggaagaggagtcgcacaaaattttgtgcggctcctctttatgagagaacaaggggagtacagacagctgtttctctttttgtaaaattcatcggcgatgcggtctgattttttagctttcggactcagtgaggtcgtatttttcggttacttgccgcccgcgtatacatacgctcaacaagtgagctggggaatgaccaccgcgagaataacgacggcgccgagggcaatgcgataccatccgaagggcttaaagtcgtgctttttgacgaaattcatcaggaatttaatagcgatgagggaaacgacgaacgccacgacggaccccagcagcaaagcgaaaatttccgatcccgcgaatccgccgttctccaatacgaacttgacgatttttataaaactcgcgccgaacatgacgggaatggagagaaaaaaggtaaattccgcggcggcggggcgggcgacgcccacgagcagcgcgccgaggatggttacgcccgaacgcgaggtgccgggaatcagggacagcacctgaaacgcgccgatgatcagcgccgtcttccaatcgatttcgtccgtcgtattgattttgaagacgcggtctttatacttgttttccacgacgataaaagcgatgccgtagaggatgagcatggcggcgatgaccaaaggggtgcttattttctgatcgatttcgtatttgtcgaaaataatgccgacgactcccgcggggatacaggcgatgatcacttttccccaaagcttaaagatatccttttggacgacgggtttttccttgtccttccactgaaagggaaacagctttttccaaaacagaacgacgacggcgagaatggcgcccagttgaatgacgacgttgaacatatttttgaaagcgtcgctctgtcgaaggggaataaaggtgtccacgagaacgatatgccctgtgctggaaatgggaagccactccgtgataccttcgacgatgcccagcagaatgactttgagtatttctgtaaattccataaagatcctcccacgccgccgattttccgacaaaaaaggtgacggcagccgaccgccgccgtctataccatattcggcaataacaaaattataacacgaaatcctcctgatgtccacaaaattcacgagaatttctaaaaaatgccttaaaaaccactcttaaatcattgcaatctttaaaaagatgtgctataattaggatgtattcaaaatagaaactgtgaacggctacggttttgatttgctctgcaataacgagatcgacgtgtcttatgttcttattcggggtacaaaaaaaattttatttaacggaggtacccagaatgagtcaaggtacggtaaaatggttcaactcggaaaaaggctatggctttatcgctaatgatgagggcggcgaggatgtattcgtacattattccgctattcagtcggacggctacaagagcttgaaagaaggccagaaagtttctttcgaaaccgaagccgatcccaaaaatcccaacaagcttcgcgcggttaatgtttccgctctgtaagctctcggaaaacagaagtgcttttgtgtaagacatttttcttgtctgaaacggaaaacacttgcgacatcgaaaagtaatttttcaaccgcacttgtctttatttcggacgggtgcggtcttttatttgctttttttgtccataaaaggagtagtacgtccctcaaagccgaaaaacttaccaaatcgtaaggcaacccatagactccgttagacaaaaaagcggctgtctatgccataatagaagcgaaaatgtgcaggcacggaatatttgctgacattttcgcgaaccattcaaacgtagcgcagctatgctataatagaagcgaaaatacgtacttgcacggatattttcgcgccccattcaaagagaatgtcggtatacgagaaaagcgtaaacgtgcaaatgcaaagaactgaaagacgtcttcacgccttctgcaaatagattcttgcagtgcagggtgatgacagcagtcataaaacgggaaacaaagcgtatgcggaaggaaaaaactaaaaacaatccgtccaccgaagaagaaaaggaggtcctctccctgtcctccgagccgtcggcaaaagagccgacagccgcggcagagctgtccaaagagaaaacttccgaaaaagaagccgtcggcggcaacgaaatgccgcttgaaaacgaagggagggacgaacaggtatcctcgctgcggaaagagaaggaacacgaagccgttttgtcctctcctgagaaaaaagacagctctttgaaaaaggaaacggccttcgacgccgaaaagcaaaacgaagaatcggaaaagagcgaaaaagacgcggacgctcattccgcgaaaaagagtgcggatacgccggcggaattggaaacagacgaagggaagaagaccgcgcctgccgaaaaagaatcgtccgcgtgcgaaacggaaaagaaatttcgcgcggaaaaaacgtcggcggaaggcgaagagcgccccgaaggggaaagcgccgccccggaaacggctccgcgcaaaaaatcgatttttgtaaagattaaagagcgggcgctcgtgtggaaaaaagttcttttcgacgaagttaaccagcgttcgacagagataaagcacgccaagaccaagcggattttggttacggtgggaataggaatttttatattgtgtttcgccgcgttctattttacggtcggcaagcaaattgctttttttgtgaagaaacccgaagaattccgcgattggctggaaggcttcggaaagagcgccatttttatcttcctctttttaagggtagtgcagacggtcctcaaactcattcccggcgaagccctggaaatcgccgcggggtgtatattcggcacttgggaagggcttttgtggtgtctggtgggaagcatcatcggctctttgatcatcatttttctcggcaagaaatacggcatgaaaatcgtcggattgttcgtttctcccgaaagaatgcagtccctttcctttttaaaaaacaaaaagcggctgaattttacttttttcctgctctattttattcccggaacgcccaaggatatgttcacctggctggtctgcctcaccgacgaaaatccttttttgttcatcctgatcacttccatcgcgagaatcccctccattgttacttccacatggtgcggtcacgcattgattaagggaaattattggctctcggcgggaatcctcgtcggcacgattttactggctgtgatcggcggtgtcatctataaattgacgataaacaagaaaaagccgcaggcggcagccgcgggagaaggagagggagaaaacgagcgggacagcgaaaaataaaggggaatgtcggattgggtcgagaaaagcattattgtaaatatccttaaaaaacgacaggaaaagtaaaaaataaaaaaatatttcttcaaattttactttattccccagattgttacatttttcgacaaacatagacatttttcgctgttgaaattttgaatatatcatgttataatagaatcacaaatttatttgggaggatagtaacatgttattgaattattgcagcaagaaggaagaaaaagtttcattggaagagatgcgcgacgaagtgctggctatgctccacgtctgctttgagggcgaggtggaaagaaccggagatcagcttcgtgtcatcctgcccgacggctcggcgtttgcggtctatgtctgtgaagactgattcttttttccgaaaacaaaacttcattttgttcaagatagtgcggcgcgaaagcgtcgcattattttataagcaaagaataacgatggctgaataagcaggcgcctgaaaaaagcggagggattacaggcaaagtacaacgcgatagcacataggcgattcaaccgatataaaaatcaatggccggtatccgctaagcggttttgtcatcctcgggtagagcgcgcgcacaagcgaattttcgattgcgatgccggaactgcgggcgatagattccttcccgcttaaatagcgcttttcccttatacgtttttcgtgcggttgcgatgaccgctccaatggcgttgatcgcttagggggatgatgcaaagtctgattttaattcgcaaatactccattaagatttccgcgcgttttcatgcggcgatttttttgaacatagaagatttacgacagagaattttctcattatcgcgtgggcttttgatcctcaaaaagatatatggaaaaaatatgaaaaattttttcataccttttcacgattttagcaaggagaaatacggggcgcggagaaaagggggcggcaaaatatacgggaaaggaacggcataaaatcgaaagtacgtttttgggcaacggtgcttgtatcgtaagtggaaaataccgacagacggggcaggggtgcgatgaacggtgaaaagtgggaaatgcgctcgatcggacgctgaaaggaaaacagagcctcctcaaagcaaaatttaagggaaaggaagggcttttcgtaaaggaaaggatattttttggaaaaaataaaatgccgtacagagagtattttttctgatcttaaaaatggggaaaaatagaaaatgagcgttcttattctttcgataaagcagaaatagattttcctgatttgcggaaagggggatagctgcaaagccgcttacggctcgattcaaaagaaaaaatgcgaaaaagacagaacgctcttttccttcgtaaggtttataacttttacttttttcaacttatccccataaaacctccgcgcgctattgacaaaccgcgcggtttgttgtataatacctgaaaccggcgtttttgaaaaacgcggggtatttcacctaaggaggaaaatacgcgatgtatccccaagcggtattgacgctttacgatatatttattttgatcggcgttgtcgcggcttttttgctggcggacagaatgactcaaaagagaggcttttccgtcgagttgcagcggatcgtcatcatttgttccttgtccgccgtcgtcatcggttacggctcggcggtgctttttcaggccttctataactttatggaaacgggcaagttcgagatagccaacgacacgggcgccactttctacggcgggttaatcggcggcgtgctcgcttttttactgatctatttcgtcatgggcaaatatcgctgtaaggagaaagaggcggtcaaaaggttccccgatatgctggatataggcgcctgctgtgtgcctttggcgcacgctttcgggcgtatcggctgttttacggcaggctgttgccacggcaaggaaacgaccgcctggtacggcgtcaaaatgtgggtggaagtcgcaaacggaaaatacgactggcgcaccgtcgttcccattcagctttttgaaagtatctttctatttatcctcgcggcggcgctcattgtcctgttttataaaaacaacggcaaacacaaattccccctgatgcccgtctattgcgtggggtacggaatttggcgcttcctcatcgagtttgcgcgcgcggatgaccgcggcgccaccgtcgtgtccttcctttctccctctcagctgatcgcgcttcttctcatcgtcgtcggcgtcgtatactttgctctttggtatttcaaatggagaaagaaaactccgattgccgaagagtccgggaaggcggcgacgaacgatacagaaagcgaacgccccgataattcgcaggaaactcataaggacgaaattcaaaaataagaaaacgcaacttccgaaaccccgaaaaacaggtaaacgggcgcgtacactgtttggaaaatgttttttggaaggcggcggggcacgacttgtccctacgacgcaacgataagaggattttttaacggactaagttttttgggaacgtaccggagcagaaaaaaagaaatggcaagcgctttggaaacgtaccggagcgaagagcacaacggaccgatttttttggaaactaacaagacgaagccccaagcggtttgactctttgaaaaacgcgacaacgcggagaataaagtggcactctttaaaaacgcgataaagcggggaaaggagccgttagtcttttttaaatgcaacaaggcgcggaaggaaaagacctcaaaaacccgtcgcccataaaatcctttctaagaggagaaaaaatgttttatactactttacaatctcccgtcggggaattatatattgccgaagagagcgggaaaatcgtctttatttcctttgaaaaagcaaacgtggagaaggggcgtgagaaacagactccgttgctgtcgcttgcagagcggcaattgacagagtatttcgacggcgcccgcaagactttcgatctgcccttaaacccctcgggaacggagttttataagcgggtatggaaggcgctggaagaaatcccttacggagaaacgcgctcttataaacagatcgccgaggcggtgggcgcgcccaaggcgtgtcgggcggtgggcggcgccaatcacaacaaccccatcgtcatcgttcttccctgtcaccgcgtcatcggagcgcagggaaagctgacgggatacggcgggggacttgataaaaaggaatacctcctctcgctggaaagacgatacggaaaatgagcttgtaaaaaacacacgaaaaagacgagaaaaaaagagtcaatattaccattgacttttttttttgcacatgctataatcatatcggaaaaaaggcgaacgggaaactacaccttgatactttaacgttcaagtaacccttcgcaaagagaataaaaaatcgaaggagtatcaggcaaatggagaagaaggaagcggaggctttattcacacagctgttcggggggcaggcggaagacctgttcacggcggcggggcgcatcaacgttatcggcgagcacgtggactactgcggcggaaaggtatttcccgcggcgctcaatctcaactgcggcgtatacggcaggaagaacggggaaaacgtcattcgcgtcgccgccagcgattttaaggaagtcattactctggacatcgacaaactggattcttataaagggttaaaatggggcaattatcaggcgggcgtcgcctattatctgcaagagagcggcacgcccatcgtaggctgcgatttgctctatgactgcacggtgcccttcggcagcggcttgtcctcttccgcggcgatggaagtttccaccgcggtggcgctttccgaatacgcgggcgtgaaatataacaaagtcgacctcgccctgatctcgcaaaaggcggaaaacaaatacgcgggcgtcaactgcggcatcatggatcagttcgcttccgcaatgggcaaaaaggaccatgccattctgctcgattgcagcaccctcgaatacgagtacgtacccttgctgctgggcgattactgccttgtcgtcgccaactgcaataagccgcacaatcttgtggagagcaaatacaacgttcgccgccacgaggtggaaacggcgctgaaagccattcagaaagtcaagcccgaagtcgcgtgtcttgcggagctgacgccgaaggaatttaacgaggtgaaatacgttctttcgggcgtcgtgtccaagcgcgcggagcacgtcgtcatggaatgcaagagagttcaggacgcggtggaggccttaaaggcgggcgatctggtggaattgggacggcttctcaacgagagccattacagcctcagagatttatacgaagtgacgggcagggagctcgacaccctcagcgcgctggcgcgcaaagaaacgggctgtctgggttcgagaatgatcggcgcaggattcggcggctgcaccatttccatcgtcaaaaagagcgccgtggagggctttatccgccgcgtgggaaaggcgtacttcgacgcgataggctatcgcgcgagcttttatgaaacttctatcgaggacggcatcaccgtacagaaattatgatgaatcaagcgatttccgatttattggcatacgcgaagatacaccttggcttgaaagaaacggacgaagtgtatctttccaatcgtatcatagaaaagttgcgg

SEQ ID NO: 1364 - DNA, 5106 bp, Unknown
  16S sequences of unknown bacteria
gatcgctttcaaagatggaattaaatatgggattcaatgcaaatgctattcttccgccattggtaataaagcggttcaagaagcttttgcaggtaaagcatattatggctgtcacgtcgctgttgtccttacaaaccgctactttactgaaagtgcaaaggagcttgctaccgcaaacaaagtagtgctttgggatcgtgataaattacaatccctcatcgcacatgcaaacgcttaaaattgaaaggaggttcccctatgccactactcaaagaacacagttgcactattgatgatatctacgctctccctgccggtcagcgggcggagctgatcgatgggcagatctatgacatggcaccaccgagcacccggcaccagattatcaccggggaaatgtatgcgaccatccgggactacatccggaaaggcaacggtgcctgccgcccttatgtatcaccatttgccgtcttcctgaacgaagatgacaagaattatctggaaccagatgtctcagtgatctgctcaccggacaaagtggacgaaaaaggctgccacggcgcaccggactggatcatcgaggtagtctcccctgctacacagagccgggactacggaattaagcttttcaaataccgaaccgcaggtgtccgagaatactggatcataaacccgatgaaagaaatcgtcaacgtatatgactttgagaaagatgcccagacaggtctctattcctttgacgatgtgattccggtgtcgatctatcctggcttctctatccggatatcagacttattaaactaacgtaaaaaccgcccggcgatgcaacaccggacggccatgcagattctgtacagcaccaaagagggctgtgtaaaatcttccctagacaagaagattataccacatccttctttgatttgtacagggtgtattttttatacccattttacatatcttttcaaagggggtggtcttaatggataatacaatgcgttatggcgcgttatatatccgtgtcaggtgagcactgacaagcaggaagagctctcgccggacgcccagaagcggttgctcctggactatgcgaaggctcacaatatttttatctctccggagtatattttcgtggagaacggcatctccggccggaaggcggataagaggccggagttccagaagatgatcagcatcgcgaagacggatgagccgcccttctccctgatccttgtctggaagttcagccggttcgcccggaatcaggaggaatcgatcgtctataagtccatgctcaagaagcagcacggcatcgatgtcgtgagcatcacggagccgctgatcgacggcccgtttggcagcctgatcgagcggatcattgagtggatggatgaatactactcgatcaacctgtccggcgaggtcatgcgcggcatgacggaaaaggcaatgcgcggcggatatcagacgacgcccagcctcggctatgaggctgtcggccacgggcaaccatttgctgttgtgccggaagaggccgagatcgtcaaatatatattcgaccaatacgtgaaccaacacaaggatccaacgggcatcgcacggcagctgaacaggcggaagctgctcaccaagcgcggcaaccggtttgaaaacaggaatatcaatttcatactccggaaccgcttctacataggcaaggtcatctggaatgacatcgagcgggacggcacgcacgagaccttcatcagcccggagctcttccaggcggcaaatgaccggctggatgcgacctaccgcccaaagaaccgccgggagctttccggatgtgcacactggctgtccgggcttgtcaaatgctctacctgcggcgcgtcactcggctataaccggtcgtcaaagtatccgttcttcgcctgttggaaatatgcaaagggaatgcatccggggacgaacagcatcagcgagcgccagctcatcgatggcgtactgaaatactttgagcagctgctcgatggtgccgacttttcttttacctatcacacatctgagtcggatgagccggagctgccggacgaaaagtccatatatgagaaggagctggaaaagatcgatcagcggaaggcccgcatcaaggaagcatatgaagccggaattgattcgctggaggaatataaggaaaaccgggagcgcctgacggcagaggccgcacgaatcgccggtctgatccaggagctggaagcggcagagcctgtctcccctgctccggaaccggcagcgcacaaggctgaaatgctggaaaagatccgcaacgtgtatgatatcatccgaagcgatgcggtcgattatgagacgaaagggtgttttatgcggtcgatcgtggagaaaattgtgtgggatcgagaaagcaacacattgactttctttttgtactgttctagctcatccgacacataattgtttttattgtactttcatcaaaactttggaatccgcataaaataaggcttttttgaattacttatgagaacttgcagtccggtccaccgtattgacttaaaatgatctgcgcaatttttgcatttggtgtcgtgatattgactgggtattccaggcgtttttcataattccacatctagcaggcacctccttcccatggccacggctgctgactccagacgaaggaatcatgaatcgaatcgcgggccgtatccagagtcagcgggccgtacagacgttcatattccttcagtgccgcattgcgcatccggctgtgtttgcgaaaatacgccagagcatctgcatcgtccggatgtgtgtcaagaaaaagcagggcatcataagcggcaaagctcacttcattgatataattcaacagctggctgcggcttccggtcggaagctccggcagcatatcccggtcttctatctggtttttcattttgcactcatttgccatggcagttctcggtgcctgtgggttttcaccacattcctccatcccgcacctgctctccggcacaggcctccccattgccggattagaaatccggcaattacgtacattgtacatctgcggattctgattcatacaggaattccggttcatactctgcgccctcctttcccgcaaaacggcttatgaagttcatggaaaaccgttccgtactgcagtgctctggcgcgctcaatcggctgctcccagtgctgaaacggtacatagcccatcgcaagcggggcatttgcttcatatagatgatgatagattgcagcttcctctcccccggaaaaagccggggaacagctgcagtctgaagctctcagttcaggcataacaactccatcctctgaaataattctttctctacagaatatgcctgcctcgaaaaacttgtgaaacaatattgcaattgtccttgctgtttctaaaaagctgctatatgatagggatgcctgctaaaatagttcagacagaatattctgtctgataccttgacatcaaaggcaggattatctgatttaatgatacgatttcaaaggaggagattatgatcgttccaaattactttgaagaccttagcgtgcttcacaaaaatacgctcccgaaccgtgcttactatatccccacttctacaccgagggagctgctgccggaggaacgcgagacatcggatcgctttttgctgctatccggaacatggaaattccgatattatgaaaatgtctatgacctgaaggatgaattttaccgggaaggctatgatatgaccggttttcaggatgttccggtgccgggcatgtggcagaactacggctgtgacctgcaccagtatacaaacgactgctatccgttcccgatggatccgccgtatgtcccggtgatcaacccgtgcggtgcttatgtacatagcttttattatgaaaaaaatgcggctgtgccgcgtgcatacctgaattttgaaggcgtcgactcctgcttttatgtatggctaaacggcagctttgtcggctacagccaggtatcccactccacaagtgaatttgatgtcaccgctatgatacgcgacggagaaaatacgctcgccgtacttgtcgtcaaatggtgcgacggcagctatttcgaggatcaggacaaattccggatgagcggaattttccgtgacgtttatctgctgacccgcccggaagaaggcatctgcgactattttctgaaagcactgccatccagtgactataagaacggcacgatccagattgcatttacctaccgccacgcttcacttcctgtaaaagccgtgctcaaagacgctaacggtaccgtactcgcgacgaaaactgcagccgataagctgactttcgacatctccgacgcacatctctggaatgcggaagatccatatctgtatcagctcaccctcacctgcgcgggcgagtcaatctatgagcaggtcggtatccgggaaatccatgcaacagatggcgtgctctacatcaatggtacaaaagttaaatttcacggaacaaaccgacatgacagcgatcctgtcaccggctttacgatcagcatcccacagcttatgaaggatctgaccctgatgaaggaacataatatgaatgcgatccggacaagccactacccgaatccgccacatttttatcagctttatgaccgcttcggcttctacatcatcgacgaagcagacaacgagagccatggtacttctgacgtctacgatccggacacgagccggctgcaccgttcaaagagctggaatatcgcgattgcggacaatccgctgtataatgaaacgacgcttgaccggaccaggctcctcgtggaacgcgataagaaccgtccgagtgtcgttatctggtctatgggaaacgagtgcgcttacggctgtaccttcgaggaagctctaaaatggaccaaagcctttgacaatacacgcctgacacattatgagagtgcacggcatgtctctgataaacgcaaatatgatttcagcaatctggatctgttcagccggatgtacccgacaatcccggacatccatgcttactttgaaactgacggctccaagccgtttgtcatgtgtgaatactgccatg

SEQ ID NO: 1365 - DNA, 8830 bp, Unknown
  16S sequences of unknown bacteria
tgctggtctatgaccgactgagccatctttctctgcgccatgacgagcttatagtagatcgacttgtgctcaagaagctctgtgtgcgtgccgaactctgcgacgcgtcccttgtcgaggacgagcagcttgtcggcgtttctcagcgtcgagaggcggtgcgctatcgcgaagacggttctgccctcggtcagctttccgattgagtcctggatcatcttctcggtctcggtgtcgagcgccgcggtcgcctcgtcgaggatgagtatgcgcgggttgtggatgacagcgcgcgctatcgcgattctctggcgctcgccgccggagagggaatagcccttctcgccgaccatcgtgttgtagccctcggggaggttcaggatgaagtcatgcgcgttcgcgattctcgcggcggctatgacctgctcgtcggtcgcgtgcggcatcgcgtagcggatattgtcgcgtatcgttccggagaacaagaaggtctcctgaagcacgacgcctatctgcgtcctcagcgcgttctgagagatgtccttgatattgacgtcgtctatctctatcgcgccctcgttgacgtcgtagaggcgcatgagaaggtttatgagcgtcgtcttgccggagccggagtgaccgacgatgccgatcatctcgcccgggttcacgtggaaggagacgttctcgaggacaggattgtagctctcgtagccgaaggtcacgttcttcacgttgacctcgccctcgatgcggatatcgatcgggagcttgatatcctgcacttccgggttctcctcgagtatctcgaatatcttcgagaggctcgttaagaagttcgagatgtttctcggaatgaaggttatccagagcagcggcgcgtagatgatgttcgcgtaggagtttatctggtgcagcgtaccgaccgacataacgccctcgaacagcctgaggtttccgtaccagagtatcaggtagcttccgagcctgaccgcgaagccgagcagcgggaagatcgtgtcgaagatcttcgcgttcgcctcgttctggtcggcgtgcttgaccgacgccgccttgaagcgctcgatctcggctttttcacgtccgaagcacttgacgacgcggataccgttcaggatatcctgaagcaggtggttcgtgcgctgaccgagcacccacaggcggcggttgcgcatctggacgtgcgcccagaacttcgctatcaggaagacgacgaagggtatcgggacgaacacgaacagcgccatgagcgggctgagggcaagcatcacgacaagcccgacgatgaacgagaacgcctgaatgaacaggttcggcagctggtttacgatgaagtcctgcgccacgttgacgtcgccgttgatacgtcccatgaggtcgccggtcgactttctctgtatgctcgagagggacagcgactgtatcttctcgtagagcagcgcgcgcatcatcagcgtgaacttgttgccggtgatggcggaaagtctcgattgcagcacggcgagagcacggtgcagcaggtcaagcgagatgatcgccacgacgataagcgtgaacttcgtcatctcaccgacctgaccgtgagccgactcgttgagtatgtagttgttgagcgctatcttctggatctgcggcacgacgaactggaatatgaccgtgaatatcgccacgacgaacgggaagcacatcatcagcctgagacccttcgtcatagcgaagatcttcctgtagacctccatgtggtcgaggcagtacgggcagatattcgttccgcgcacgaacggtctgccgcacttcgggcagaagcgctccttctcgctgttggttatcggctcggtcttcgaggaatcctctgacagtatctcgcacgccttcacaagcaccgcgtagcgcggcaggtggcgtccggacacgaactgacagataagaaccgtaccctcgccaaagtccgcgtagaagccgcaggagccgtacatgacctcggtcttgaacccggtcgctcccttgatcgtgtacgcggcgagcagtttgtcgtcaagtatcttgtatatcttttcgtttgtgatcgcgatgaagccggagacgaacttgtcctcgagtatattgaacggcacgcagtacatcagcttttcagccggctgcatcgccgagtcgaggaccttcttttcggtctcgggcaggtcgaacattaatctcattggattatctccgttacatggatatatccggacaggacatatccgtttttgttagtgtctgcgtggcagactgtgtgtcagttttacagatatatctctatctttttcaggctggagggctcgagcttctgcggctcgagaatttcgaagacgtttccgtcgatgtcgttgatgagtatgcgtccgtcctcgagtatgcgtatgttcgagaaaggattgttgagaacgaaggtgacgtttccggcggtcgtgttgacgtcccagtagaggtagccgaacttgtccttgaccgagttgatcttcagtatctccggcgtgaagtagcggcggtcgagttcctccgcgaagagcttctgggtctccccgtcgaagtcggacatatgtcggatcatgcctatctccctgccgcgcccctgcttcttcgagtccggctccctgaccgagaggaactcgtccgggttcgtgacggggaaggagcggaggatgacgacccgctcgaaggactccggctcgcccttgtcatttatgatgtcaagcgagatcagtccgccgcccgagcgcctgaatttcgcgttctcaggcgtcagggctatcgagacgcgctcgtcctcgaggatcaggtcgccgtcgtcggagccgtcgcccattatgtcgttcttcggcttctttgtctccggttttgccccgggcttcttttcctcggtcttttcgtttttttcagccggcttttcagcgggcttcgtttcctgaccggtctttatgttatctgccatgatattgaccattccttttcataagagttgtggttttatttgtgccgcgtccgtcgaagtttatccgcccctgcggataaacttctttggaaaccgccgcgcggtttcctacataccggcgattatcttcttgttcgcctcgttctggagcatatacagccggtagaacgtgcctttcttcgcgaggagctcggcgtgagtgccttcctcggctatctctccgttctctatgacgaagagatggttgcagtccttcagggtagagagacggtgcgctatcgttatcgtcgtcctgccctcgatgagcgcggagagcgcgtcctgtatcaggcgctcggtctcggtgtccatcgccgccgtcgcctcgtcgagaatcagtatcgacggagcgagaaggagcgcgcgcgctatcgatatgcgctgctgctcaccgccggagagcgaacggcttccggttccgaccacggtctcgtagccctccgggaggcgcaggatgaagtcgtgcgcgttcgcgttcttcgccgcctgaatgacctcctccatcgtcgcgtccgggcgggcatagcggatgttgtcggctatcgtgcccttgaagaggaatatctcctgcgagacgatcgagatgttctttctgagggtcgcggtttcgatcttcttgatctcggtgtcgtctatctcaatctttccgcttatcgtgtcgtagagacggtttatcaggttcgcgattgtcgattttccggagccggtgtgcccgacaagacccacgtgatcgcccggctttatgtgcatcgagacattcttcagtatcgggcggttcggagcgtagtggaagcagacgttctcgaactttatgtcgcccttcagacggtcgaagtgaaccgcgtccggagcgtcggtgatctccgggatggcgtcggttatctcgaacatacgctgtgcgcagttcgccgtgtcggtgatcatgttcgtgaactgagtgaagaagttaagcggaccgaagatcattccgatatatccgagatatgtcgcgaaatcaccgtaggtcatatgcttgttcatgacctcgagaccgccgaagccccagatcgcctgcgacgacagaccgatcagcagtccgacgagcgggaatatcgttatcgacacgaggttagtctggaggttagccttcatgagcctctcggcgtagccgtagaagcggttggtctcctctgcctccttcgagaacgccttgacgacgcggataccggtcagcgagtcgccgagcatcgcgttcaggctcgaggaacgcctccactgcttcgagtacatcctccacagcttcggcagcgcgaacttgaatatgcagacgattatcggcaccggaatgaacacgatcagcgtcagcttccagttcagcaggaacaggaatatcgtaagaccgatgaagttcagcgcgttgatgacgaagttcggcacgccgtcgatgaagaacgcgcgcacacggtccgcgtcatagttgacgcgcgtgatgagacgtcccgtctggttgttgttgaagaacgagagagacaggctctggagcgccgtgaagatatccatcttcatgttgagcgtcactctggtcgacattgtcgcgttcgcacggttctggattatctgtacgccgagcgacagcagagctatgccgaacaccacgccgatcattatgtacagccagttctccgagtgcatcgtaccgacagccttcccggcaatgacgcccggctgcgagatgacctggtcgtagaggatctggttcgagattatcgggttgacaagctgtatagccgacgtcgctatcatgcagagaagcaccgtcgcaagctgtaatttgaacggcttgaagtaccggagcagtctcacgaagaccgcggactgattcgtgcagtgctcgcagatctttctgtcctgatcggtgtagaccctgccgcacttcggacagcgcgcgttgaactggtcgaagatcgggtcgtccggcttcacgtcctcgccgcgcacaaggcggttcataatgtcaaggaaggcgaacagcttgcgcttcttggcgttcgtcgtgaaggcgatgacaatcgtggtcgcgtccgcgtcgcgctccttctgtttctttttctcctcgtcaaggtcgaggtggacatctgacggggtgatctcgatatcgtgcggatggcttttcgccagcagacggttcgatgagacgaagttgtcgacatacgcgtcggacacgcgccgcatatcataagaggcgaaatcgcaccctttgaaaaggtcgggaatgaacaccttcttcggcgtcttcgagccctttttcgcggaatcctcagcggcctttctcgcctttttccgtttctgctcggtctcgttgtcggaggatatcgaaatgacgtaaaggcgcatttcctttttggagtagccgagccagctctcgccgaagttgccctcggtgtcaaggtcgagctcaagcgccaggtcgaggctgtccgggtccaccccgttctcgcggaagcccgccgctgcctcttcggtcagcttttcaagtggaagcataaagagatacacagtttccgcgctttgctgtaccataaatggcgcggaaccttctcctttcattttttcaaccaccgacggaacaagaaattaatagaaaaatattgaatgctccgttcggatgtgttataataagtatagcgaaatatttccaagtttcaaggggtattcggaaatttgttaaaaattagatggttgcacaaatacgaatgcctgagaactgcgaatatatgcactattacatcactcatcattaccagtaaaaacacgatatggatcaaatggcaataaacggtaatgcgggcgaaaaatcgtgaactaatgtcagtgatggtcagaacgagaggatcattttcatggggatactgaagagactgttcagaaacaagaacgagaactcggtcgctttcagacgggatatggcgaagcacctgtcggggagagcgataaaatactgcaccgagcgcgcgccggacggaggtgacaccgtcatcgggcacgcggggtcgctgtcgatcaaggacgacgagttcattgtgctctcgagcgcggatatcgtgttcagatgcaaggtcgacgagctgcgcgcgtgggagcttatgtcgaacgacggggcgatgctgaccggtccggacataactcagggaggcaaagagcggacggtcatcgtatactacacgtattatataaaataaggtaagaaaaccgttcgcagagtgaacaaaaatatcagacacgtttgtgcataacgctgatatattgataaatctgaaaaattttcggaaaacgtcttgcaatttgcgcggaaagagtttattatatatttgtgcggaaagcgccggacaggcgtgaaagaccgtcacggtatatgggcggcagaattccgccgtcgaaatgttttaattttggaggtagttgaaaatgactacaattggtgcaaacgataaggtaagagtcggtataatcggctgcggcggtatcgccaacggcaagcatatgcccgcgctggggaaggtgccgaacgtcgagatggtcgcgttctgcgatatcatcgtcgagagagcggagaaggcgaagaaggacttcggaactccggacgctaaggtctatgaggactacaagcagcttctcgaggacaagtcgatcgacgtcgttcacgttctgactccgaaccgctgccacagcttcatcactgtcgacgctcttgacgccggcaagcacgttatgtgcgagaagccgatggctataaactccgtcgaggcacagaagatgctcgacgccgctaagagaagcggaaagaagctcaccatcggttatcagaaccgtcagagaccggattcccagttcctcaaggctgaggcgctcaagggcactttcggcgatatatactacgcaaaggctaccgcgctccgcagacgcgctgtcccgacctggggcgtgttcctcaacgagtatgagcagggcggcggtcctctgatcgatatcggaacccacgctcttgacctcactctctggactatggacaactataagccgaagtactgcgtcggtactacataccacaagctcaacaacgataccgagaccggcaacgcttggggcgactgggatccggcgaagttcaccgttgaggattccgcgttcggcttcatcgtgatggagaacggcgctaccatcgttcttgagtccgcttgggctctcaatacgcttgatgtccgtgaggctgtcactactgtctgcggaaccaaggcaggcggcgacatggtgaatggcgtccgcattaactcgatcatcaacggtcgtcagtctgtgaccaccgctgacctgagcgccggcggagttgctttctacgcgggtgcgtcgaacgatccggcatatctcgaggcacagcagtggatcaacgctatcgtcgaggacaagaacccgtgcgttcttcctgagcaggcgttctgcgtgacgaagatcctcgagggcatctacacgtccgcgaagaccggcgacatctacagattctgattgaataaaccctcagcccccttgcccgatgtataaagtttttgcgggaggggggcgggagcttttttcaaaaagctccctcccccgcaaagctgacgcattgcagaaaggaaaaaatatgaagctttcagttcttgctaactgctatggcaataagactcttgacgaggcgcttgccatattttcgaagcttggcgttgaggctgttgagataggcgcgggcggatacccgggcaaggctcattgcaacccggcggagcttcttaaggatgaggacgcgttccgtaagttcatgggtacttttgataagtacggcatagagccctgcgttctttccactcatggtaaccctgttcacccgaataaggctatcgcggctcagtttgagtctgacttccgtgatactgttcttctggcagagaagatggggcttgatactgtcgttacgttctcggggtgcccgggcgactatgagggggctaagtacccgaactgggtgacctgcccgtggccggaggattttcttgccattctcaattggcagtggaacgaggttctgattccttactggaaagaggaagtcaagttcgctaacgcgcatggcgtgaagaagatcgcgttcgagatgcatccgggattctgcgtttacaatccggagactctgctgaagctgagaaacgctgtcggcgagactatcggcgctaactttgacccgtcgcatcttatctggcaggggattgatcctgtcgcggctatccgtgagcttgagggcgctatctaccacttccacgcgaaggatacgaagatcgacgctatcaataccgcaaagcacggtgttcttgacacgaagcattacggcgatgagatccatcgttcctgggtgttcagatcgatcggctacggcaacgatctccagtactggagagatatggcgtccgcgctcagaatggtcgggtatgacaaggtcatgtcgatcgagcatgaggacagcctgatgaccatcgacgagggactcagaaaggctgttgagttcctgaagcaggttatcatttccgagccgaagccgggaaccatgtcctgggcataaaggaaaccgcgcatcggtttccaagcgagaatgtccgcagccgcggacattctccgccacggatgaagtttatacaagatcccaaaaagtttccctttgctgccttcggggcagcaattccggaaataacgccacggcgttatttccggaaccgggaaacttcgcacctaatg

SEQ ID NO: 1366 - DNA, 3532 bp, Unknown
  16S sequences of unknown bacteria
caaggatataatcaattccgttttccgttattcttggtttcaattcgctcatgttttaatctcctcattctggctcatttttttgcaagtctggctctccagaaatattggtaaatctttggtaaatttgagattgaagcacaaaaaacgcttaaaaacgggacttatgagacgatatgagacttttcatcatgcccgggaaatcctgccgtggcacaccatcaatacgcttcgcaccggtccttcctccttttaggctttacaatggctattattttatcatatccccgcccaaaagaaaacccatccgctcgccccaccggcaaaatcgcacatttttcttctgttttccatccgcagggctttccttttccccgcaaaatgtgctacaatatcccacagtatagggcagtgccctccgtcggtccctgcccgccgcaggccggacgccccgcagggctcccgcccccggcagggggcgggagtacgggcccttcgggcccgttacggcggctgcgccgccgcccctgcggggcgcccacttggccacacccattcctgcattccacacccttcacaccccaaccagctcatcctttagggaaaccatctgggcgctgactcctgcggggtgccgcctgaccgtgcaccttcccgcgtcccgccgcctctccatccacccaaccacctgccaaggaggaataccgctatgccaggcaccgtcgttatgggcgtcatctttgtcgatatcaagggctttccgttcggggagtaccacgccaccggcaccaatttgggcagcattcgctttgtccacggcggtgtggcccgcaatgtagccgaggacatggcccgcatcggcagcccggtcaccttcgtcaccctgggggataccacccccatgagccgggaggcgatggagcggctggaagcgcaaaagatcgacctgcggtacagcatccgcatcccgcagaacggcgttggcctgtggctggccgtgatggatgaaaagggcgacctggccggcagcaccagccagatgccggataccgagccgctggcccgctacctccaggaaaggggcgaggagattgtctccggggcggatagcgtctgcttggagatggatatgggcgaagaacttagcgaatggatcgtagcactgtgccaaaagtatcggaaggatctctactgcatctccgccaatatgagcgtggtgcagcgccggccggacctgctgcggcacacccgctgcttcatctgcaatgatatcgaggccgaacggctgctgcaccaccccgtttcccgtgccgatcccgaagccgccgtagagaccatcctgcactacggccgtggcatgggtctgcgcagcatggtggtcaccctcggctcctcggggagcgtctactacgatagcatcaccggcgatgccgggcactgccccgcccaccgggtggagatggtggattccaccggcgccggggatgccttcttctccggtgttgtctcggggctcacccgcgggctttccctgggccgggccgtggccgcaggcacccgtctcgccgccctcaccatccaaagcgatgaggcctgctgcccctcgctgccggatttttgggaggagatgtacccatgaagaaaatgccccttgccgccgcccgccgcctgttcgatggcctggtcatcgccatgctggtgtgcgccgtgctgttcaccctgtccaataacttcttcctcggctgcgcggtgatcctgctgggacttgccgccacagccttccactttgcggtgctgcgctgcccccactgcggcaagcatcttggccgggaacggggcaatacctgcccccattgcggccgctccctaaccgaaaaataatctgccccgcccgttttttccgggtgggcttttctttttttgcccctgcaaaatcccggatccgggccgcaggccaaaccgtcctccggacggtttcagcgggcttcgcccgctgcggcggctgcgccgccgggcctgcggcccgtcccctgcctccccgccagctttcaaaaacgccaaaacaccggagagacccacaggcccctccggtgctgtattcacttgccggctcagccctccgcggatttttccgtctccgccgtcggggcagccgctttggccgccgcgtccttttcggcaatgcgcttatcgcagaattccttcaccagggcataaatcaccgcaaaggccgggatccccagcaccatgccggtaatgcccatcaggttgccgcccaccgtcagggccagcagcacccacatcccgccaatgccgatggaaccgcccaccacacggggatagatcacattgccctcaaactgctgcaaaacaacgaggaagatgacgaaaatcagcgccttcactgggtcgatgagcagaatgagcagcgccgaaggaatggcactgaggtaagcgcccagaatgggaatgatactggtggcgcccaccagcacgctgatgagcagcgcatagggcatcccgcccacaaaaagccccacgatggtaagcccgacgaagcacaggctccccagaatgcacgcctcgatgagctggccggaaataaacccgccgaatgcccggtcgatcttgcggacgatgtactcgatccgctcccggatgctgtccttgaagagggcacgcagcagccggtggtagatgtagttgaggtgttccttatccgccagaatgtagatggcgaaaatgattcccaaaaagccattgatgatgccgctggcaagacctgtgacaaaggaaagcagccatgtcgccgcgcttccaacaaagttcttgatgagggtaccggactgattgatcagctcttccccctgcttccacaggtagctgatgatctcgttttccatatccagccgactttccagcccgttgaagaagtcaccggcatcggcgagataaccgggaatgctgttggccaggctcagcaggctttcccctacctgcggcaggatgaacaggcacagggccgtgatgatcgccagcacacccaggatggaaaggacgatacataggccccgcttgccgcgtgccaggcgggggcagcgacgccacagtccggccagccatttggtttccattggacgcatcagcaggttgatgacataagccatgaccaccccaataatgaccggccgcaacaccgtcatgatgtagctgccggcccctgctaccagtccaatatgggacagcaccaggtacagcacaatgccataggtgataaggaatatgccgctcttcagtgaggatcgattcatggctgggtctccttttcgtccagttttttgtctgatctcgataaatctattatagcacctgccagtgggatgtaaagccggttcgcaccatatttccgcccggcttttttaagttttgatgaagattcttagccgcccgtctattgccggtttccgcgggaaattctcgtccagcccctgcagagggcgggtccgggccgcaggccgctcgcctccggcga

SEQ ID NO: 1367 - DNA, 16262 bp, Unknown
  16S sequences of unknown bacteria
aggcgacaatcaatggatactgacggtcaaaacaaaggttttgacccataaaatcgagattttaactcgattttatataattgcatttgctaatgcaattattcagtagacattatttatgcgtttatctgctttttaagctcctctgttttatctgtcttctcccacgaaacgccgagctcctccctgcccatatgaccgtatgcggaaagggcggaatacatgggctttttaagtccgagcttgtctattattgcggaggggcgcagatcaaacacctttttaaccgcctctgcgattttgtcatcggggcatattcccgtaccgaaggtatcaaccattaccgaaaccgggtgcgcaacacctatggcgtaggcaatctgcacctcgcactttttcgcaatgcccgcagctacaatatttttcgcgacatatcttgcggcgtaggcggcgcttctgtcaacctttgtgggatccttgcccgaaaacgctccgccgccgtggcgggcaaagccgccgtaggtatcgactattatctttctgccggtaagtcccgtatctccctgcggtccgcccacaacaaagcggcctgtggggttaatatatatctttgtgttttcatcgagcagctctgcgggcacggtgggctttattaccttttcgagtatatccgcccttaactttgataaatcaatatcggcgctgtgctgagatgaaaccacaactgcctctatgcgcgcgggtcttccgtcgtcatattcaaccgtgacctgtgttttgccgtcagggcgcaggtagctgagctcattatctttgcgaacctcggtcagccgtttagccattttgtgcgctaaagatatcggcagcggcataagctctggcgtatcgtcgcaggcatagccgaacatcatgccctgatcccccgcaccgcggagattatactcgtcctcctcaccatccttgtactcaagcgaattatcaacgccgagcgctatatcgggcgactgcttgtctatagccgtcataaccgcgcaggtgttgccgtcaaacccggcagagggactgtcgtaccctattctgcaaaccacatcccgtgctatctgcggaatgtcaacatagcagcttgtggttatttcacccataacggttatgctgcccgtggtgcagaaggtctcgcaggctacgcgggcttcggggtcgttcttcaaaatttcatcgagtatcgcgtcggatattccgtcgcagaccttatcgggatgaccctcggttaccgattcggatgtaaaaagcatttttgtcatttgcaattcttctttctgtgaaaaaattaaaaccgcctcggacgagacggtatatgaagcctcatctttcggataatccgccggaattggcaccttgattttaaaatcaggttgccgggcatcacagggccggttccctccgccgctcttgataaggataatattcagttctgtttatattttaccacatattgcgggtttgtcaactattaatttttacagggagtcaccgcatattcgccgtttcctttaccttacccgattcgtgaatatcgtctattgtgaccttgctttcgtgcggtatgggcttccaggtaacctttttaaacagcgccacatactgggtgtaccgcccgattatatcaaaggtgggccaagtaaaaatgtaaagcagcatttttgaaaatggtatttttttaatgcgcttatgctccacaataaaaatgtaaattgcggcagccgtgttttcaaggtatttgccgagcctgtataaaattctgagccacaccgccagcagcatacccaccgccattgccttcagacctgaagaaacggttatttcaatggggaataaaaagcgcagaaaccgcccgaggtaggtgccgcgggtaaataccgccgcaccgcctatgccgtaggcgtagcagtaaaagccgtaggctattacagataccaaaagccagcgcactatgtttataaccgaaaagggagtcagctgcataagcgtgtcgtatgaggcaaagcgatgccttaccgattccaaaaagcccttgcaaatatccttaaagccttttttcttcttttcttttttatcgtcctgccaacgcgtttttaaaaaatgctttccgcaaaacacgtttaaaagcaggtagggtcctgtttcggcaaaggcgagcaaatgcccctttgaccagcgcagcctttgccgcagcgctattttgaggcttgtgggctgctcgtcgtaaaactcggcggcgtcgttataggttatggcatagccctgcgccaccgcgtcggcggtgagggcgcggtcttctgtaagggaggtatacttccagccgtcgcgcactatttcatttgaaaaaagaaagcccgttccctgaatattggttgcaagccttaaaacagatcgcgcgcggtggtttgcccttatagagcgcagccagtgcagcgcatatgtagaggctatccagcattcgtcaaaattctttgtgttgcggtaagaggtaattatcttctcgcccgcgtcaaacgcgtcgttcatacgcgatatataatccgattttaaaagattatccgcgtcgaaaacaaaatatccctcaaagctttgcctgccgtaatcctcctctattctgtcaaacaaaaactgcagcgcaaagcccttggttttatgctcgtcatcaaagcgctcatagcaaattgcgccatgctcgcgtgccacagccgcggttttatcggtgcagttatccgccaccacaaaaaccgttacaagctcgcgcgggtagtcctgtttttttatgctgtcaagcaggttgcctattaccttttcctcgtttcgcgcggctattaccacggcgtatttatgctgcttcttcgccggcgcaaatttccgcgtgaaaaaaagcccgattattttataggctactctgtaaagcaccatagccgaaagtaccgcgcctattgcggcatacaccgctttaaggaacggataccagctgcctatagtctgtgcggcgtttaccgcacagcttaaattaaaaatcattttttgtcaccgtatttttcgttatagcaatttatgcagcgtgtaattatttcaacagctctttccctgtcgcctatttcgtccacggcggtctgcttgccctctaactgcttgtaaaccgagaaaaagtggcgcatttcgtcaaataaatggctcggcaggtcatgcacgctgcggtagtcgttataggtcgggtccttaaagggaatagctataattttttcatcgtttttgccgccgtccagcattgtaagcacccctatcgggtagcactcaaccagcaccagtgaatcaataggctcattgcagagcaccagaacatccagcgggtcgccgtcgtccgccagagtacgcggaataaagccgtagtttgcggggtactgcattgaggtatacaaaattctgtcaagaattatgcagcccgtttccttatcaagctcgtattttttcttatctccccttgtaatttctattaccgccagaaaatcctcgggttttatgcggctttcggatacatcatgccatatattcatacttttttcctcatttcggtaatttttttaattgtcgtcagttatcagtgcttcgtattcggcgtttaatttttcccattcgttcatagcggtatcgagctcggtttccgctaagtccagctcttctttgatttctgaaagctttaaataatccgatgcgttttcttccataccgagctcgcacctcaagccgtcggttttttcttcgagcagcgccaccctttcctcggcttttgctattgcgcgctcaagccgcgagcgttctttaaggggtgttgtaaagctttttttaggtttttcccttacttcaaccgatttttccggcactgctgtcggcgcttttttgctgtttaaatattgctcgtagccgtaggggtagtatttaacgccgtcagactcaaacgatataaggctgcttgcaattttctttataaaatagcggtcatgcgagacaaaaagcacagttcccgaaaaattcagcagcatatcctcaagtgtttcctttcccactatatccatatggtttgtgggctcgtcgagtatcaggaaattgggtctgcgcttgaacattttgcaaagcgccagccgtacccgctcccctcccgagagcatatccacggttttaaataccgtctcgccgctgaaaagaaatgcgccaagcgcgctgcgcgcctcaaaatcggtaattccgggaaacgcgcccataaaatcatccaaaacggttttgctgctcgaataaagcgcggtttgctggtcgaaatagcctatattcaccctcggcccgaatttataaacgccgccgagcgcgggggtcttacccaccagggttttaataaaggtggatttccccaatccgttgccgcctataattcctattcggtcgccgcgctttgcttcaaggcttacctccgataaaacctcggtgtagccaattttcagtttttctaccgaaagcacatccttaacgccggggtctgccggctcaaaatcggcgcggaacgtgcgcaggtcgtaagcctcgggcgcatcgataggcttcatccgctcaatctgctttagctttgattgtgccattgccgcttttgtgggcttatagcggaatttttccacaagctccgtaagccgctttatttcctttttctgcgcctcatattcccgcgcctgccgctcgcgcagctcctttttagccacggtaaactgcgtgtaattacccgcataacgataggttttcccgtgctctatttcataaacggtattcaccgtgttatctaaaaacattcggtcgtgcgataccacaacaaacgcctttttatagcccgaaagatattcctcaagccactccaccgccgaaatatcaagatggtttgtcggctcgtcaagcagcagaatatcaggctttgaaagcaaaagctttaaaaaggctatgcgggtgcgctgcccgcccgaaaattcagatagcgggcggtttttctgctcctcggtaaagccgaattgctttagcgccgcctcgtattccttttcaaaataaaagccgccgcatagggtaaaactgtcaagcaagttcgtatattcccgtatattttcatcggtctgatcgttttccatttttttctgtgccgcggcaagtctttctttcatttccagaatgtcggtataggcagagcgtatctcgtccttcagtgttctttcctcatcgtcaaaaaccatctgatccaaaacgcctatgcgcggcttgcccgatactgcgaaaaagctatcctcgtcgctgtcccgtttagtaagggagtattcgcccgaaattagctttaaaagggtcgtttttccgcagccgttccgcccgaccacggctatgcggcttgcgtcgtttatctctatattaacggaggaaagtatcggctgacccgaaagctcaaccactccgttctgaattttaagctgcataaaaaataccccctgtcatgcgacaaggagtattgtaccactttttttaagtttttgcaacaggcggaaattttttaacattatcaggttatttctgcataatgtattcatcgattgcctttgctgcggttttgcccgcacccattgcaagaataacggttgcggcgcccgtaacggtgtcgccgcccgcgtaaactccgtcgcggctggttttgccggtctcctcgtttacgattattccgccccgtttattaacctcaagtccgcttgtggttgactttataagcgggttgggggatgtgccgatggacattataacgcagtcagcctcaacctcgtattcgctgccctcaacgggaacgggacgcgcacgacccgattcatcgggctccgacagcttcatttcctggcagagaatactctttacccagccgtcttcaccctcaattttaatcgggttggtaaggaatttaaactcaattccttcctccattgcgtgctctacctcttccctgcgggcgggcagctcgttttcggtgcggcggtaaactacggtaacgtccgctccaaggcgctttgcggtgcgcgccgcgtccatagcaacattgccgccgcctactataaccgcctttttagcgtgcataactggggttgcgctgccgtcattataggctttcataaggttattgcgggttaaaaactcattggcggaataaacgccgcagagcgcctcgccctcaattcccataaagcgtggcagccccgcacccgagccgataaacaccgcctcatagcccatatcgaaaagctcgtcaaccgtaacggttttaccgattataacattggtatcgatttcaacgcccaattgctttagggtgtcaacctcttttttaactatagctttgggcaggcggaattcggggattccgtaaaccaaaacgccgcctgcggtgtgcagagcctcaaaaaccgcaaccttgtagccctttttggcaaggtcgccggcacacgtaagccccgagggacccgagcctaccacagccaccttatgaccgttaggctcggggcgggtaatattgcccttggcgtgctcgttgtgccagtcggcaacaaaacgctccagcctgcctatacccacaggctcgccctttatgccgcgcacgcactttgcctcgcactgcttttcctgcggacatactctgccgcaaacggcgggcaggcttgaggactgcgctattaccctgtaagcgccctcaaagtcgccctcctttaccttttctataaacgccgggatatgaatattaacggggcagcccgaaacacagggcatatgcttgcagttaaggcagcgtgccgcctcttcaagcgcggtttcctcgctgtaaccgagggcaacctcggaaaaattgtgattacgcacatcgggtgcctgaaccggcatctcgtgctttttgggatccatattaacagccattattaccgcgcctcctttttaaataaattgcaggtttcttcatatgcgtgtctctcgaaatcgcggtacatggcgccgcgcttcatagcctcgtcgaaatcgacctcgaagccgtcaaaatcaggcccgtcaacgcaggcaaactttgtctgcccgcccacggtaaggcggcagccgccgcacatacccgtgccgtcgatcatgatcggattcattgagaccaccgtcttaacgcctgcgggcttggtggttgccacaacaaacttcatcataataagcgggcctattgtaattacctcgtcgtaattctcgcccgaatcgatagccgtcttaagcggagcggtaacaacgccctttgtgccgtaggagccgtcgtcggtcattatcgtaagcttatcggagcaagcggagaactcgtcctccaaaataaccaaatccttattgcggaagccgactatggtatgcacctcgcagccctcggcgtgcagcttttcggcaatcggcagcgcgatcgcgcagcctacgccgccgcccacaacgcaaaccttgcgaagaccctctgtttcggtaggcttaccgagaggccccgcaaaatcggcaaggcagtcgcctacgcttttgtgattcagcttttcggttgtggctcccacaacctgaaatataattttaaccgtacccttttcgcggtcaaagcccgcgacggtgagcgggatacgctcgccgtcctcatcggtgcggagaatgatgaactgacccgcctcggcttttttagccacgagcggcgcttcaatgtccatcattgtaacggttgggttcaggtttcgtttgcttacgatcttaaacatttcttactatcattccttaaatagatttaaaaatccacctcagtgccgtagtaggtgcatttgaataacttagccatagtggcggggtcaattgcacgggggttagagcctgtgcatgcatcgcccacggcgttaaccgcaatttcgtcaacctttgcgttgaattcggcttcatccacaccgaattcctttaaggtgtgcggtatattaagctcatcgttcattttatcgatgagcgcgcagaggttttctataagccccttgttgctgttgccgggcagaccgagcattcttgcgatatcggcatatctctcggcggctctgccgtcatgcgcgttgtactttataacatacggcagataaattgcgtttgcgcagccgtgcggcaggtgtctgtccttcatgctgccctcatggaacgcagcaccggtcttatgagccattgaatgaactataccgagcagagcgttagaaaacgccataccggcaagacactgtgcgtcatgcatggcggcacgggattcgcggttgccgttataggatgacggcaggtaagccgtaaccatctcaattgccttcatggcaagcgcgtcggtataggggcttgcaacggtcgaaacataagcttcgattgcgtgggtcagggcgtccataccggtgtgagccacaagcttctgcggcattgtctgcgcaagctcggggtcaactattgcaacatccggggtaatattaaaatctgcgagcgggtacttaatgccctttgagtaatcggtgattacagagaaagcggtaacctctgtcgctgttcctgaggtggaagaaatagcacagaatttagctttctgacgaagctcggggaaattgaacggaacgcagagcgattcaaaggtaacatcggggtattcatagaacgcccacatagcctttgccgcgtcaatcggagagccgccgccgattgctactatccaatcgggctgaaatttacgcatggcttcggcgccgcgcataacggtctcaacagaggggtcgggttcaacaccctcaaacagctctacctccattcccgcctctttaaggtagcctactgccttatcgagaaagccgaaacgcttcatagaaccgccgccgacaacgactattgcccttttgcccttaagggtcttaaggttttccattgcattttcgccgaaatagatatctctgggtaaagtgaatcttgacatttgtcattcctccgtttttatttggtatcttcattatatacaaaataaacacaagaaggaaatatgattaatatatatcgggtatatatcacagtatatgtcagttttctacttaaaaggttaaattttttaagatatccttacagcagacagcacctttatccgattttccgcggcgcaaaaacggatctgcatatccttaaaggtaaatccgtataccctgtcagggtcgttttgataatgcgggcgcgggtcttcggctaaaattttccttaattgcaaaagcgtttccgcgtccagtgtatccgcaatgctttcgggaatttccaccgccgccctttccccgaatttttcatccgcaaagccgcagactgcatccgggtatgaatcggcaaagcttaaatacggctttatatcgtaaatcggagtaccgttcatcatatcgattcccgaaacctcaagcactgcgccgagctttttatcaaagcttattttttcaagtcttacggcggaaagccctatgggattcgggcggttgggcgagcgggtcgcaaaaacacccatgcgtttattcccgccgagccgcggcgggcgcaccgtaggcgaccaatcgccgccgtcaaatcccgaaaactgccacaaaagccatatgtgcgaatatttgtccagtccgcgcacggctgatatatcgcgatattcaggctcgaaaatgatttttccgcacagctcctttacaattccgctctgccgcggcagcccgaatttttcgggaaaatcggtatatattttcgctatcgggcgcattatccgtctcccccggatgatgtgtccgatgaagcgggcggctccgatgatgagctttcggaggatgaggaggacggagtatcgggctgtgaggttgaggtgtcggatgaagtacccgacggcgttgatgatgaagatgtgttttccgacgaggttaccgtagacgatgacccggaggaagacggtgcagagctgcttgaagacggcgacgacgaagaagacgcggcagatgaggaattataataaataggcgtttcaacctttgcaccctttttatagtagcctatgccctttttaacaacatcctcgctgtcctcaaattcctttttctcaagtcccttatgcacctccgccataacatcacgccaaatttttgccgccgcaccgccgttataaatattgtgcgataaatcgaagccgtaccacacggagcctacataataaggagagcctgcaaccatccataaatcataggattcgcttgaggtgcccgttttggcataagccttgagcttatagttaaatccccttattccgctgcccgtaccctcgctgccgtaaactacctcctgcaaaaggtggttcattatggtagctgacgcaggacttatcacctgttcgccggtttcatcgtatttaattacggtatctccgtttgcgtgcttaatttcgtaatatgtcgtaggtctgtggtaaacgccttggtttccgaagattgcgtaagccgcggcggattcggtagtggtaatgccgtagtgcgtgccgccgagagccagcgccgcaaggtttttatccgcctctaccaaatgcccgcagtgcagcttttgagttaagaaattatatgattccgtaacccctatctcctgcagcaaccgcacggggatagtgttcattgacttgcgtattgcgtagttaagggaaaccgtgcccttatagtagccgtaccattccttaggcccgcttttgccgtcgggatagtatttttctatcggcttatcgagcacacgggaggtataatccacaatatccttatctattgccagcgcgtaaacgcctatcggcttcatggtagatccgggctgacgcggcgaatcggtagcgcggttaagcccgcggtttgtggttttctcgcccgctccccccactattccgactatatggcccttatagtccataaccgtcatagcagactgcgcgtgcgcggtgactccgttatcataggtcgccttttgcgggaaataagtatcaatatttgtgtagaccttttccatttgcgcctgtatatcgggctttaaggtagagtatattttaaagccgccgttatagaacatggtagaagccatttgagtattcaggttatatttttccgcaagatcgtctattacctggtctatcagcgcgtcgacaaaatagctgtttatttcaccctcgtattcatccttctgcgaatcgtctatcttaagctcggtattatacgccttatcgtactcatcgtagcttatcatcttaagctccagcattttatcaagcaccgtttgccgccgctttttgttttccgccgagcccttttcggttatagggttaaaccttgacgggtttttggttattgccgcaagagctgcgcactcggttaaattaagctcgcttacatccttattaaaatagtagtttgccgccacctgaacgccgcaaataccgttgccgagagaaatcgtgttaaggtaggcttcaagtatttctttttttgagagcttgcgggttataagggttgcgcgcacaatttcacggaatttgcgcatcgcgtcgcgatccttgtcgttcgtgacattttttataagctgctgcgttatggtagagccgccgaattcggtggagttgaatttcaaaagcttattacccacagccgcaaaggttcgtttccaatcgactccgcggttttcgtaaaatcgctcgtcctcaattgcgataaaggcgttgcccaattgcttgggcattttatcgattccggcccacaggcggttttcgctgccgtgcagtcggcggtattcctcccactgccccttctcattctgaacatatatgacagtggtcatgttcatttccatatttttaatgttgcttacaattttattggacgagaaaaagtctatcttcctgtccgattttatataagtgggaataacaaagatcaaaaaaacagtcgttacaataagcaaacccgataaaaacacggtcagctttttaaaaatcttttccatagttccctgcccttcctgcatactgatttgattataacactaacttgcttatttatcaaatattttttaaacattcataatgtatttaaaaattgggaatataattcatatgtttggaggaatatggatgcttaaactggaaaatattaaaaaggactatattaccggggataccgcggtgcacgcgcttaaaggcgtgagcgttgaatttcgcaaaagcgaatttgtatcgatactcggtcagtcgggctgcggcaagactacattgcttaatattataggcgggcttgacagatacacaagcggcgagctttatataggcggcagggctacaagcgattttcgcgacagggactgggataactaccgcaaccattcggtaggctttatttttcaaagctacaaccttattccgcaccaatcggtgctttctaatgttgaacttgccttaacgcttacgggcgttccgcgcgccgagcgccgccgcagagcggctgaagcgcttgaaaaggtagggcttgccgaccagcttaataaaaagccgaatgaaatgtcgggcgggcagatgcagcgcgtagccattgcccgcgcgcttgtaaacgaccccgaaatactgcttgccgacgagccgaccggcgcgctggacagcgagacctcggttcagataatggagcttttaaaggaaatatccaaggataggcttgtaataatggttacccacaatcccgagcttgcaaagcagtattccactcgtattataaggctgcttgacggcaatattacggatgacacaatgccatactcgggtgaggaggaggaaaaaacggagaaaaaaagcggcaagcgcccctcaatgtcgtttttaacggcgctttcactatcgcttaacaaccttatgaccaaaaaggcaagaacctttttaaccgcctttgcggggtctatcggcattataggcatagcgcttattttatccctttcaaacggcgtaaacgcgtatatcgcgcgtgttgaggaggaaacgctttcaagctaccccataacgattgagcaggcgggaatggatgtaagccaattggtaagcgaccttatggggaaaaacgagccgaacggcgaccgcgaggacggcaaaatttacagcaacaacgtaatgaccgaaatgatgtctgccatggtgaacggcatttcggcgaataacctttcggaattaaagaagcatattgaaaaaaccgctgacttttcggataattcaagcgagattgaatataaatattcaacgattatgaatatttacaatgaaaagggcaatcgcgtaaacccgaacaccgtgttttcaaccatattccccgaaggtcagagcagcagcggaaatatgcaaatgtcctcctctttttccaataccgaggtatggacgcgcctttttgaaaacaaggaatttttgaaaaagcagtacgacgttattgctgggcgtatgcctgagaaatacaacgaaattgtgcttgcggtggacaaaaacaatcagataagcgattacgcgctctattccttggggctgaaggattcggcagagcttgaggaaatgatgaaaaaagcgcaggcgggcgaaaaaatagagcctaccgcagaggtcagctatacctacgatgatattttggggcttaaatttaagctgctttgcaataccgattattttgaaaagaatgccgacggcacctggagcgataaaacagaggattcgctttacgtttcttcaaagcttgagtccgcagcggaggatataaccgtggtcggaataataagacctgccgactcatcggttgcaaaccaaacgagcggctttgtgggctaccccgaatcgcttatggagcaccttataaacaaggtgaacgacagcgagatagtaaaggcgcaaaaagccgagcccgaaaaggacgttttcacgggcagaccctttgagaccgacgcggataatatgacctacgagcaattgacggcatatatagccaccctgcccgaaaaggagcaggcggaatatcacgcgtatataaaccaaatgaccgccgcggggaagaccgaagagcagataaccgagcagttcaaggcggcaataaagcaaaaaaacaatagctccacatatgacggcaacttaaagcttatgggcgtatcaagtcttgatgagccgtcggttataaatatatatcccaaggattttgaggctaaggagaaaatttccgaccttataaccgaatacaacaagggcgttaaggataccgaaaaaataacctataccgattatatagggcttatgctttcatcggttacaacaattataaacgcaataagctatattttgattgcgtttatcagtatttcgcttatagtgtcatccattatgataggcattataacctatatctcggttttggagcgcacgaaggagataggcgtgctgcgcgcgatgggcgcctcgaaaaaggatgtttcccgcgtgttcaacgccgaaacgcttatagtgggctttgccgcaggggcaataggcattgcggttaccctgctgctgcttattcccataaacgcgataatcgccgccataaccgatatttcggggcttgcggtgctgccgtttgcgggaggcgccgcgctggttataataagcatgctgctgacacttatatcaggcttattcccgtcaagagtggcggcgaaaaaagaccccgttaccgcacttcgcagcgagtaaaaacaaaatggttacaaaataaaaattgctattgaaattttccgtcgaaaggcttatacttgtaaagtatcattttaagcacttggcaggggtcaccctgtcaagtgtaatatttcacggaggaattttaatgctgaaaagaattttaccgctggcattggcgctttgcatgctgacgatggcgggttgcaaaaaggaacaggacagattaagcgtggataagggctctgagccctctatagtctcggagaccaagcctgtaacatataaaaacccgcttacaggtgtttcgggtatatccgaagaaaaaaccaaaaaccgtccggttgcggtcatgataaataacatttcaaccgctcagccggtgcagacaggacttaacaaagcggatattatttacgaaaccgaggttgagggcggaattacccgtcttatggcggtttttcaggatataaccaccgctgaaaaaatagggacaatacgctcggctcgctacccttatgttgacctcgcaatgggtcacaatgcaattttcattcactgtggtcaggataataaatactgcgccccgcacttaaaggatactgatgacattgaccttatggtaaagaattacggtgcgcgcattaaaaacggattagcctctgagcacacattgtacgcctacggcgaaaagctttggagctcggtgcaaaacgacggtcacaaaacaaccgcttcgaccgccgcaccgtgggtaagcttcgccgaggaggatgctcccgtagctcttgaaagcaccgcaaatacagttgatatcaaggcttctgccagctaccgcaccgtattcaagtatgatgcggcaaagggcaaatacacaagatattacggcaacaccattcgtaaggattatttcaccggcgaaaccgtggatatgaagaatgtgtttattctttttaccacgatccgcaattattccgataattaccaccgtcaggtaatgcttgaaagcggcgacggctactactgcgtaaacggcacgtataccgcaatcaaatggagcaagggagctgccaaaaacggttttaaattcacaaaggcagacggaagcgagcttacggtaaaccccggaaacagctgggtcagcattgtaaacataggcaataatcctaccttcagctgataagcggttttaccgataattaaggggcgcgttacataaatccgcgcccctcatgaatttctttaaaaaaagcttgaaatttaaagcttaatgtgatagaatagttgcgttgggttcttaaaacgatgctttcgcaccgcacagaccctgtttaatataacactatgggggcgtagctcagctgggagagcgtacggttcgcatccgtaaggtcgagag

SEQ ID NO: 1368 - DNA, 32759 bp, Unknown
  16S sequences of unknown bacteria
tttgggttagacccataattaggggctaaccctgtaacttaactaaatgacattgcttcagaagcttgtcccaaagccctgtcacgtccggcatcgccggcatcgaagtggaaatctccgctttctcgttcagatgctgatagaattcctcctgtgacagagtcagatcctcataatacagttttccattaatataaaacggcatcggaataatgtgaattccaagttctccggcctgtgtctgtgtaataccgctgttgctgtctgttacaatcgctactcttcccatgattcctccgatttgctcatttttcttttattcagggttgaaagatacgaagttgaatccgctgtctccctgattcggttaacatatttaactatatcacagatcacggcagaccgcaatctgttactgttcagggccaggcaaaattttatttgactctgaacaggcgatttcatggttgcatttccccctttttgaggctatactgaatatattcggcattatgccgcaaaagaaaagagaaaggaatccccatttatggaacttcttgaaacactgcttcattctttcgtaaatctggcaatgcttctttttgaatatatcggtgtcggcgtcatcacctatgccggtattcagggccttgtcaactatatgcgcaaagcaccggatacgcgcctcgtcctcgcccagggtcttgcaatgggactggaattcaagcttggaagcgagattctccgtaccgttgtggtccgcagcttaagcgagatcgcaatcgtcggcagcatcatcgcgctgcgtgccgtcctcacgatcctgatccactgggagatcaaaaatgaggtaaatgaaaaacaggtgccggaagcggcgcaggcagctgcggcggaagatacagctgtgataccgacgacatcaaaaaatgattctgatcatgacactgcaggcaaaaccgctatcgcaaaaacagaaaatgttattcctatagaaaacaaagaattaaccgcttcggctgaaaacgcggatgccgatacagcaaatgatagttcagactctcggccatcatctttgcaggactgatcgtatccacaaaggcacacgtcaggcttttctgctctccgcctttatcgcagaggcaggcaaataccatcagaagctttatcatgacataaaaaaatcccgtgcagcgcaatgcattacatacagcattgtaccgcacaggattttttatttgacactttctgtaaagcggacattcacaatccactttcacagctgcgctctatttagcgataggacgtaaatccaagatttctgagtgtcagatttgtattatttgctttgagcagatatgcccaggtctcaaatgagaactgcaaatacgtatttccgatcttctgaagctccgcatttgtaaattcatccgtgatgttcggatctgtgcgcatcgccacatagaacttctggttgctccttgccgtgtaggaaccggtcgcaaatgaggtacgcagaccaaatccctgatcgccgtaatccggcagcgtgacatccacctgagcagtcgctttcttataagcgttgtccgagaataccattctcgtctctacctgaagcgtcgaaccctcagacttgatctgcacccgtgtcttgtaaacgaacttcttattggactgattgtatgcgatctccgtaaaatatgtgcttccatcatcaagagctccggattccatcaaagcaaggaagccttttgaatctactccgccctttgccctgatcactttcagaagcttctcatagttgcctgccactccggtcgtagcagccggtttggtgacggtgacattgcacgtatatttctggccatttacaactgccgtgataactgcagttcctgcgctcttcgccgttacttctcctgatgtgctgactgtcgctacagaagtcttgttggtcagccagcgaaccggaagtgacgtagcgcgcacatacagctgctgcgtcgtaccctgtgtcatggtcaggctctttctggaaagatacggtccgtcgactcttaatttgcagatatatctcactccgtcaactacagcaaacacattcgtatttccgactttctttcccgtgatgacgccgcttgcggaaactgacgcaatcgcttcgttgccaacgctccacgtcaccttctgcgccgtaccattcagtgtaattttctttttctgattcttcacgatcgtcagcgaagtgtcggaaagcgccggtacctctaccgtcaccgtctcagaaaacttcttgccgccgactgttgcggaaacaacagtatctcccactctctttgcggtcaggacaccctgtgcagagacagaagcaacagacggattggagctgctccatcttaccttgagctttgtgccgcttaccgtaagcgtctgcttctgacctttgatcatcgtcgtcttttctgtcacaagctgcggctcctctgcaaaaattttgcaggtgtactttttgccctcatactgtgccgtgatcgttacggtacctgcttttttcgcggtgacaacgccggtcttgctgaccgatgccactgccgtattgctggatgtccatttcacagtgccttccgcgccgtttaatacgagcgtggtcttcgtgcctgccaccatgcggctgaccgtcttattcaatccgatcgtctctgccgcctgcgccgtccgcgccgtgccaaacggcaggcacagtacagatgctgaaagcatcagtgccatcagaaaaacagtcaggatctggctgcttctcccttttctggtttctcttttcaagaaaatccctcctccttttttcacagatcttcgtcagtgcaatcagatccccatgtaaagcggatctttgcgatcctcttttgcgattgccttctttccattcgaagtctgcacgtgatatagtagattgtaccatacttttcctgtctttgcattaagtatctgtaaaagttgaaaaagtgtccgtttctgtcgaaattttcactcaccaaagcacgtccggatctcttccatgctttgaccttcttttattgcgctgcacttccgatcagtacatgcttgctttctataatgtatctgccgtctcctttttcctctatcttatactcttgttccagcaacagctttttcgcattttcctttaatttcacgtcgattcttactgattgcaaattttttagcgtgtacaaaaaatccacattcgaaattttattcatacagcccaattccaaagattttaattttgtaagtttttccaacaccgaaaaatctctgattttattactatttatgattttgatttttttcagtgaatttgataaaccgattatttgcgatatatccgtcaaatgattcatatcaatcagttccaatgttcgcaaatgtgagaatcccatgattcctttcagcgttcttaactcgcagcaggataaactcatatgctctacttccggtgtgcaagaataatcagaaagccttttctccattttcccataaaacgaaattttacgaagttccggactttggcaaaattttcgtttgctcttggaaatgccatatgcttccacgcaataaagaaatatcatttcttccaattcatcgtaattatccactatagaagcgcgatccaaattttcaagcaaatttttatattttgttttattgtcatcataaatataaaaacttccgtttgcataatccagcaatattttccacggatccaggctctttatctgaatcaaaattccatccctgatagagtattcaaacgtaattctttctttcagattcagtatttccacgcttccaaattcatccagacccatatttttataacagtatgagatgcctgcactgtctcttccttgtacacttgaatgattatcttccattatatctggcctcccctgcttttttataagcagtcttcgtgtatttcttccgttcatctttgacaattcgtgtactttctgttcatcactttcgatactgaatcagaacagcttccacaagtattgcaagtcgatagtacactaccagctcatttttttctattcctgtcgattgatttatcaatttcgaaaaagctgccttttcggatttagaaataaactcgcctgattggagttcgatgaatttttctccgtttatcaattgtgtacaatatccccccagaatcgaatcaatggcaataagttcgggagcgcatttacgaatcgctactggaatatgagcttctacaaatgctcttaaaatgtattcatgttgtctattcttcattaaattcacctataccagaataatatcatatctcagcacttgatgtaagctttccaccactactctttccccacctaaatttgattgcctcaaattttctcatttttccccaggctaaatattctcccgtttatttccaccctgtattcttctatagaaaatttttttatataagcataataatagtatttttcttcggtcacataccttgaaaaaacagaatccatattatcacgaacggtcaggtcttttccaaataaacaacaaaattcccacaatcacttctgaaattccaattattactctcataaatgttcttttccctttattctatctctgtcacccgcaccatatacgcatcgtaatcttctcccaaatactcgatttccagtttctgcccttccgtgtattcttccggtttcggcgcacggcgattgatcagctcaaaaaagctgccatcttctgcatccagataaagataatcgtctgaattttcagagaacgtaccgctcacctgtttgatgccttctgcgtaggattctctggatgaacacggagccatattccggatgatcggcattccatacaggtcacataagtaagtaactctgacatagtcgccgcactctcctgaaatgtcccaggtcagtgtgctgtcagacacaaaagaaaattcctgaccatcctctgtctgcaacgtcactttcgtttcgtcaccttccgtgtcctttgccagaagcgttccctgtatcgtgtctatggtactgtaaagtgcttccatatcatcaagcggcgttgtatttacaccggtctgcgtcttttcttccgaatcgctctgcatttttatctttacccacggactcagaaccttcatcccgcaccattcgttccagatttccggatcatccatatatccctgctcgtaacgcggatacctgactgcatacacaccttcatttccttctcctgtcacagaaaaagtgttattctcatcatcggctggcgtctcaccatttgctgttacctgcagttcgaacagcaagccttccgcacctgcatcagatgctgactcatgagatgccttatggtaaaaaccaactttctcctcttccggaagtacaagaaggctgtcctcccactcgtccggaattctgacctgcacttcatcaaaatcataaaaaataaaatgattttcgtcgtcaacagacaccgtataatccatcggcgccgcaaatgcctggcttaacatacttccggccagaattgatgccgtaagaactgctgttataaaatgccatttttctctcactttttttcctctctttccttcatcttgacattgtccatagaaataatgtcatttattcttctgccgtattctcctgaatcagaatcgctccatctcccatcctgttcttcaggaatctccaacgcattttttctgcacagattacatttccgccgtactcctgcggatcttccacaaagcgctctgcctcatcataccaccagatttttccgtcctttatggtcagggaagcttccagtatttcgcaggtccattcttccgagcacggcctcatagtaaaaaaatcaacacctgaaaattccatttcaatcgttccaactgtttctatctgactctgaataatcagtttcagacatctctttgtattcagcggatacattccaaaatcttctgcaacgtatgctccgctgacgtaattcagctctttgatgcagctgtcgtgaaatccatataccctgttcacaaatttttcggcatccgcctctgttattatttcattccacatctctataccatccttatttctggctttttacgggtgatctacaacgtctgcataatccctgacaatctcacttgcataatagacggcctgacgttcatatttgctgcgatcttccaattcacaccacgcttcgtgatccttaatccaccgaaaataatgacttaactcatgtgcaatcgaatgcaatgttgctgccaatgcattatctttcgccctttgatagtcaccctcaaaattttcttccaaaagttcttcgtaatctcctgctgctatccggatatacggctcttcatgcaaatcaaacggtcccccaaaaattcctgacgctgtttcttctggttcttttactttaagctgtctgctcgccttgaaataaatcggcaccctgattggaaattcatattcttctctcaaccaccagacaaattctgtacatgcgcgctttacttccgggtcaacgcctttctcgaagcgcagtcggattcccgaacggcattcccagtctatgtattttccccagtctttgcattcccatagtcttcgcattctccgttcacctcagcctacttgaaaaaagtcagataaatactaatggccggtattccaatacttgcgccaacactgcaaagcatcagatgccaaaacgcccatttatatagaacatgctttatccctgtgacttcctcatccttactttttaaatacagcagctttaaagttggatatgcaaatacccaccagcccaaaatcgctataacaggcgaatgaagtgtgattttcagcactgtaccagctatccaaaaaaacagaagcgtcaatacaatcctcaatttcaactgctgatattgttttttcttctccatttttctcaaatccttttcatgctcacattgacaaccttatcaaaattcttactgcacagtatacaatcatgtaccagaaaactattttacaacctttttttataattttcggtaacttttcttcgcctctgaccagatacaaaataaattccagaggcaacaccaacaatatctgtgtaatgatgtctaatggtgccgaattagctgtaatcaaaacttctctgcctccagaataaaatgcgacccattccgcagcaagaatgcataccataattatataagttatttttcttctcattttcattttctccaacactgttcaatatttgaagaaatacttttttcattttctttgcaatattatctttccgttaaaaataaaaagtccgtaaaatatgattttgtttttcttcaatttagatattaacatttgaggcaacccggagactaccctatttttaataatctccgggtcaaaatcactttttaatcaaatctttctctgttatattccatacagtcattgtatatcatcaacagattattacttaattcttctaaatcaatgctaacttcaattttccctcctaatccaagatatccttctactcccaaactgaaagtattatcttctccttcaaatttttgctgtgccggacaggaacttttttcattatatgtagaatgccaaaaactgcaggaacaattttccgctccatacaaatgctgtcgaccttcagtatagcctatactcaggcaatcaaaagcactcacgctcgcagatgcagcagtcgtaatttttgtttctaatccatttgcaagactaaacgatgccgtatccgtagttgctgccataaaacttacccctactggaaaataacctacatttgcactcactgaaccacctattcccgatcctacaccagcctcaactttaatcgaaccagcaattgtttttgccattctccaaaagccataaattgtatgtactgttgcctcacatgctgctctaaaacttttaggccattttcccgataaatctaacgtcttaattgggttagaaaaacagtagcaaaatacgttgcttcccttaatatttccgcccacacttgccataattccatctgcactgataaatctccggatctccacatcataataccggctctgcagataatacatgccactctctgcatcgaagtagtatcctctgtagcggaacgggttcttcttgccgatggtcgctgcaagtgtaccggtgatactgatcgttttgccccagctgtcatatttgtatgatacgacacgttttccggcgctgtcaatcagcccgatgatatcattctgtacatttctcacgtagttatagcgtactccgccaaccaccattgccaccaggcgagctgcgctgtcgtactgataccagattgtctcatcaccggtgcgctcagatacgatcaggctgcctgccatgcgatattctgtggtcacaccgtcaacgacttttttcacacgcgccccggtatgatccgtttcttgtccttttccgggaaatcctaaatctcatcagaataaagtaacaagaatacgaagcacagccagcaaaacaaacattcgaaatttgcttcgctacttgctcatgaatgctttttcagatatttgtcaagatatttttccatatcacaatatatcggttcaagagacctttctggaattcccatttcccttaacctctccggactcaccccaaacaccatataccatggtaatacttcttctaattctatacctttagattccaaaaattttgcttcatttgattctatatacatactggcagaatattcatgtgccgtactttgcagacagcaataattatctttgtaaaagcataaatccattggagcattcggataatcccagttaaatagtcccccaacccgtacaagcgtctccaggcatttcatatctgaacgatagtaagcaattcgataaatatgcttttcatcccttgtcactgttcccggccattcctttgtatttttactgtaaattttatattttcttagctcatccctgatttgttttacgcttctttttaacggttcccgctcattatatcgaaaataaatgactgaaaagaaatcactatgttttaacatatattctataaatttcgcatatctttctttgcttttaaattcagctagataataccattttaacatttaatgcctcctcatataatcaagtgttttttattgaaaattcaagtttttttcaacctttcatatctcaatgaataagccaccgctatgagcacttcgatgtatcaggtactgaaatagcggttgaatggtatacgaaataaaacgtcaatgattttcgctttactggccttgtgtatacccttttctccatggcagctaatccccctcatctctgtttccagtctgtcctaactttctgcccataaccaaggtgtcagctatgctcctttgtcagagcatgccccatggaaaatatccctttgaataatgcaatgcatttaggctccatctttaggccggagatgcaacatcaattcgacacggcacacatcgaaaacgccaagtcttcgccctcgtaccgtttgggttatggtatgtcagtcactttcaccatctcaagtatcacgacccttatgatggttcacatatgttagccatgtgcatcaatcccttgcagttggacagatgtgacttctgcttatccgcgtttcccactgcttcacaccgttcatcgcttactaggcatttcgtggtagggatatcacgaatggaggtgatagcgcatacgcgcacttcaagcaacgaccgcaggtcgcaccgatatggtactggcattttcacctgatatgtgctaaacttttattgtctatttggatcgcctcctttgattttgagtttggcttgcgacaccattctcattatatcacaggaggctttgttttttatcctcaccacttccacttattccattctcccaaacatagctgggggattagacttttcattcaaaaaaccaaatatgtactgatggatagcctatatgattacgtgtcggatgataatgactgaaaaaatctttaccatgtttttctggtccaattgcattcacatacccgttaacaaaaataatatattttgcagcttcctcattccggcatatcacactttttaattgagaaactcttaaacaagcttcttctggtgttaaaggatctccacctacaattatcgtttttttacctactgtcactaaatcggcagtccaataattatattgttgtttaaattgtgcttctgttattacacgtgataaagcctcttcaagtcttttctctttttgactctttctataccgggaaaattcgctgactacccccgcaattgctttcgtaaaaaaatagcttgctcctaatgaaacgatcgcttcaaaaaagtaagctccgactcctgcaagaacagaaagtataaagtgtcctgacggatcctgaaaatttaccggattgtccgaacagtactcataaagatttacattctgatattctacagaagttccagtcacaataatattatccgcactgataaatctccggatctccacatcataataccggctctgcagataatacataccgctctctgcatcgaagtagtatcctctgtagcggaacgggttcttcctgccgatggtcgctgccagtgtaccggtggtgctgatcgttttgccccagttgtcatatttataagatacgacgcgctttccggttttgtcaatcagcccgatgatgtcgttctgggcgtttctcacgtagttatagcgtactcctccaaccaccattgccaccaggcgagctgcgctgtcgtactggtaccagatggtctcatcgccggtgcgctcggatacgatcaggctgcctgccatacggtattccgtggtcacaccgtcaacgacttttttcacacgcgtcccggtgtggtcgtagtagtagcggatatttttgccgttattaatcgccgacagttttctgccctgtgtccaggtaaaggaggtgtctccttttttcagcatgtttccgcacgcatcgtaggtcatctgggtgctgccccacttcagaagcttgtccttccacttttcatccatcacggctgtggtcagcttcttcggactgccggagagtgcttctgtcgtgtagtcatactcccgctcctcgcgcagattgccgccttcatcataataataagtgatcgtcttattcagcagctcgttattctcacgggtcaggcggttcattccatcataggtgtaagttatggtttttccgccctctttgatgctggtaatgttgccgttgttgtcgtatgtgtactctgtacggctgccgccgtttacaaccgcagtcggaaggctgataatgttctttcctgaatccggatactcataggagacacggaaaatctggttttctccatctttccagtcctgtgtctttacccgtccccaggcatcgtacgcggtatttcttgtaatcgcgccaagcgtcgttttgatctcccggctgtccttgtcatatgtatacgcactggtacggttcatgccgtctgcctcatggcggagacggatcatgttattattcgcatcgtaggtatactggtatgcattgcccttttcatccctgacacgcatcagacggtccagaaaatcataggacatccggtacgtctttccggacgcataatcagttgcccggtacagatttccttcgcggtcatagacataatagtgcagaagctgttctttctgtgatgccgcactgtaataatactcttttaccagccggccctgggtatcgtactcgcagcgcaggtaatccccgtttgcatactttgttttgagcagttctccgttgttttcctcatactcataagaaacgatggacgatccggcgactgccaccagtctcgtcttaccaaactcattgtagccaaaaccatagttgaagccgttgtgcgtgatccgggtcaggcggtcattggaatagccatattctacctttacctcctgatcctgtccttttgctttcacagtcttggaaactgaggtcaggtgttccgtcttcccgtcatacgtgtaatacgtcgtgctgcttcttgcatcttttacgctgtttaaaagatccttctttgtatcccagtcataggtgacctgacagccgcgcgcatcctttaccgtcgccacatgattctgatcttccgtcatcgtccgggtcagccaggtaccggttgtctcatcctccggtgatacggccgcactcttcagcacatttcctttgtcatcgtaagtgtaacgcaggacacatttttccgccgaagtacctttcgtcacgttatgattcttgtcgtattcatacttgaacgagtttcccctcgcgtccgtcactccggtcatgtcctgattgtcattgtactcaaacttctgcttctggttctgcaggtctgtcaccgcgatgatgttgttatccttgtcgtacgcaaacgtctgcccgaagccctccttaaagagtgacaggccgtcgaaaaatgcaaggttcgcattgcggcagtaagtgtaggagaccttcacgctggtatattcaatctttgccacatacacatcgctgagaaactgccagtcgaggatatccgggctgaagttggtgtaatgcacatccgtaatctctttgccatccttatccttgccaacgaaaacgacttccacaccgaaccggcggttctcatccgtggattccggcagcgcatcgccgcgtccccaggcgttgaccatgaaagtgtcacccttctttcctccaaggtcgagtgtcttcgtcagcttcttgtccttttccggaaagccctgaatcttatacacatgggtatccagcccggcgatcttttcctttacggaggtcgtcttaatggaatcgcaaaccacctctgtcatcacgttcagctgggtgagcgggtagtatgcaatcttctgcccggacatcacgccgtaccaggtgcttccgtccttgcggaagaccacgccgcgcagcgccagtccgtccccgactgccttcgcaccgagagaggaggcggatgatttcggctccagccgcaggtttccggcggtctttaccttcgcgtatgcctcattcattccgacgtacatcacggactcttccggcacatatccgatatagcgggtggattttccgtaagagatgccgatccgcacccatttctttccgtttgcgtctgtctttgtatcgcagattccgactcttgtgccgcggttcagcgcttcgagtaccggctgtgcgctgtcggaataagaagccctcacgacttcccctgccactgccacgatgccttcccgaatgccgtccccgcctgcggcgaagctcaccgtcgatgcggcgcggatgtaaccgatccggccatcttctgtctttacctggtaccacatcgttccgctgctgtcgtttcttcttccaagcacggaaatatgggtaaatttcttcaggcgctccagcaggtactgttcatccccgtccggatagcgctggaaggccgccgtatctgtcactaccatcgacgctgcctgtaccgggcggtaaacagaagcgccaaccgtagtcaggccgtccattctggtcaggccgtttcctgcaaagccggaaacggtaccgagatggaaatctccgttgtccaccaggttgcagcggttcggcgtgctgcccggctccagctgtgccatatcaccgtaaaagcttcccttgatgtggcgggaaaacaggtatacacggagtacatcggtcttcgcatcctccggcactgtcaccgtcgctgccagtctgacaaatccggaggtggctgctgtcagatgctcactgtcggtattgactgcatttccatccttgtcctcatagcgcacgcgcaggcaggcaaaaccatcgtctgccatatctgttttatccaaccgggtatgcatcgagaaggtataggactgccctttctttaccgtgacatcctgataccacatgccgaccgcagtcttgtcgctgcccgccacgcacagggaacgggtgcccgtcttcacgtaatcagcatttgtattgaccgtcattttcatcacatcatgatcagtcgcactgcttttccatccgcaggtcgccgcctggatgaccgggtctttcagcagctgtacgatgttgctctgcagcttcgtcgtgttttcaaggcagttcacatggctgccgctgcggttgaatcttgcaccgagcgcatggccgtagccgtcgtggatgtgcgtcagtgtgccgttgttgtcaaagcggtagatttccttgcgtcccttgttgtccgtaaactttgtgctgttgtagccgtaggtaagtgacaggctcttgccggccgtctccccggcatactctgcgatctttttcacgcggtacggatttcttgtgtcgtaggtgtagcgcagctcatagccatcaaaattcttcacggaggtgagcatttttctggtgtcataggcataggtgctctttttgccgtccggatcggtgactgtcgtcagttttccgtccgtgtaggcaaagctccataccctgccgtccggcgcggtcagcgtcttcaccctcgtctgctttccgtccgcatcggtaaaatacgccagcttcgcgacgcgtccggcaccgtcggtcactgcggtgatctttccatctccctttccaaacgtcacggtgatctggttggcattctggtcaatgatatggatcagatggcctgccctgccaaataccatgcggctgtggtccttgctctcgatcacgtacggctccctgctcgtatcgccgttgactttcagcgtcatttcctttccaagctcgtccttccactcctttttctccttgtcgtagtagaagtaacacttcgtgccgtccgcatcgacgtactcataatagtcggtcgtaccgatcgtctttttggcaatcgtctgatggtagttcagacggaatccatagccatatcccacatcctccgtgcggtcatttgtgttgtacacatgggcaatcgacatcggcataaggcttccgccggtcgccatatcgcttctgatcaggatcaggtttccgttgcagtcattgacatgcaccgctccggcacggcctgcgtcctggctgtgatagctccagtagtcctccagaccggagtagttcatgtacgtcaggctgatgtgcggacgcatctccttgaagccgtcatggcagtcggaggagaggaattcggtgtaaccggaaaactcatacgcatcctttaccatcagtccatagttgccaccattgatgtaccagttcttcacaagattggtaatgtcgagcgtcacgtatttaatctcgtcgcctgtataggtcaggcgatcttccacggtctcgtcacaggtcggacggttgttccagtccagcgtcgcagacgaccagctctgtttcacgcggtgcacttcgaccgtgcgggacttcttgtcctccgccagggacaccatcataagatgtgcgccgaccagcatatcaccggtcttcagctccggaagcctgaacttcaggaagctgcgctggatgttatcgcctcccatcgttttcagataaatactgttctgataattggttccatagttgaggttgtccacatgggcatcctcgatctcctcccgttttaaagaggaagtggtgatcgggtcgaccgtcaccggataaatgcgggatgcatcgcgcagccaggaatgattcggcgtcagtgtgatgcgccacgtatgctcagcgacttcctcttccagatgaagggccagctgctcagagcgtgagcctgccatatccagcatgagcggcgcggtaaagcagaagacttcctttccgtccgcatccacaaatgtgacctggctgccgtgctgcagtgcacttaatccctctgcatgatacaggaaagaaaactgctccggcacctgcgccgcacctttgaggatcaggttctcctttacggcctgtcctgcggtatggtattctgcatcgatccccggcgggatttccgggtagaccagcacctgatcatccttgcggcatgcctctgatcgtgctgcctgctccagctgccaggagacggtgtggtcaccgtccctgatcgtaatggctgactcgctgtctgcgtatgctgcaaaggatgcctgccagcgacccttgcggttcatgaatgccggagcggcctcgccctgtgtcttttcttcattcagtacgcccgcctcttctgcttcatctgttgcttcccataacgcagccgcccgctcaacggaagcatccacagcctttttctgcgttttttctgctgcattccctgtttctgacggtctctccacatccgccagtgtgtcgtccatctcctcccagcttccgtcttcggtctgataatgcaccggagagagatagatttctttggtgaacgaatgatccgggttttcatacgttttcgtactcgcggttcttcgttctctcagttctgttcgttcgtctttcatgaacatgtcctccttatctttctgaatcatcagcgattcaacctataaggagtcaaaaaagtcaaaactgtaaacaaaaattttcacttttttgcactataccacatttttcttctttataaccgaagtgtccgtcaaatgcggataagtgtccgccaaacttttttcaagcaggcagatgaaacacctgacacaggaagaacagcgccctctcttgaggtgctctgtctgctctgtgacaaactggaggtcgggctggaatatctcctgtctgattttctctctgaaagtaatgctgagcaaaatcctactatgcaccagattttagatacattgaaccatatggatgcagaagatcaaaaatttattctggattacattctgctgtatcaaagccatttgcaggatgtcaaagagggatcgcagcactgagtgttcagtgctttgatccctctttgtacaattccagcaatgcatatcccactccggccaacccattcataaagcccggattctgtgattcgtataccagatcttttgcatattccggcatgtgaagcagaagatcagatagaagcgcttcgtaagtccttacgtaggtctgattgtgctttccatatttcgataaataccgattcatgatgagcagattgcctgccgcaccgtggcaaaggcacatatgagcagctggattttgtgtaaataaagcagctgccgcaagcctgatatctttctccgtctgcacacctgcctcctccagcttcattctggcaagaagaattcccggcgctccatggcaccatgcgttcatcactctgatttctccaggcacacgcaggtcaagccagtttccatatttcttcgaatacaggaaattttcgtatgccagtatctgtcggatcttttcttcgtatgttttttctccggtaacacgcagcagttctgcatatgccatcagtattccactgctcccatgcgccataccggcaagcggaggaccatcgcaggtcttccagccaacaccttttactgcaataaaagaatgctcccatagctccttttcatatcgtttggccagttcaatatatcgtttatttccgatatttttatatagttttaacgaaagcagaagctgcccggctcctccacccatataatcatctgactggccgcacagatcttccactttctgaaactgcttttctgcatatcgaagatagtccatttctccggtgatctcgtagagcatgaggtaagccgctgcaatggaactgtcaccctccagcattccgttttttccattcttatcctccggacttcgttccatgtccgtatagacaaacagccttctttttaccttgtccagaagcacggctgatgctgcgtccgcaaactccttctgatatgctgcaagaaagaccgcaatgccggaaagaccatcgtacagctgcatcccgatcggaaccatattccacttttctgtgtctgtaaactgaagaccgatccatccgatctcttcatctgtatgaaaagcagtctcacagaaccacgcaaaaatttcattcagcctttttcgtatcaggatactctgttcctctttggacaatatctgatcacaggtatagaattgtgccccttgctccttttgcaaaagcccaagcgacagccgaatcagcttctgctgaatacgcagatcccgttctccaaactcctgtatttttttcttccaggcatcgtaaatagaacatgggaagtaattcggatattcctttccatctccatcataaagggacgtaccttttccatctgcctcaaaatacgggatatcaaaacgaaacagtgcttctgcctcatacgtgtgaatcgctccccactttccctgatcaccgtaaacttcaaaaagcagcttcctgcgtgcttctgtactttcacagagtttctgatgaatcgatgtaaagcgatgcatagcgtactgctgagtatggcggagcagtatccttgtgcgtgcttcaaaaaaaggctccattgcttttcgtattgatgtatcagcaagataagtgcgatacgccgatgtgaaaccggcacaaatctcttcctgatagtccagtggctgcatcacctcccctttgcaggttacaacacaaccggaaaacgtgagttctaccggctcatgttcaatatacatttccgaagtaccctgatttttgatgaccggcatccgaaacggtgtccgcacggtcgctccggtgctaagtgcactcacgattgctccgtctcctccccagatcagttctggaaggattccggtttttgccacagacgaattgatataattcgatatttgtttatcaactgtctcgccatctgccgccccggcataacccggaagtgtctcaaaatccagcaaaaccgggtattctccgcacgcaagaaagttttctccgtgcagatctgaagcagataaggcataggccaggaaaagatggattcccatgcggaggaagtagtgctttacctgctccccgttttcacagtccctttttttgacttccccctcccagccatagtcaccgcagtcgagatatggcactttccctgtatcagtcagatcttctcgctccgtctcacgactgcagtctctttgtattctgttttccagcccagcctttacacaaagcagctcatagatatcctgatagcagattgtctttttcaggctgtgtggcttataatagatattgattccgttgtccaacaatatctttgagacactgcgtccatagttgtgacgatctccgatattcagatcgatttttttgaatgttttaaatccttttccatggcaaacgttttgaacgatcgcctcatgatctttcgccagccgcgtcgttatctcctgataaaaggcgtgttcttcttcctccactgtctgacacaacctgtaagcctccgggtatttcccgaaaaatccctgttgatactcaggatctttgaggtaatgacggacgaaatagtcgtattcttcctctggcgtatgcccacaaagaagcccaagctttttcagaatatggagttcggatattatggggcggatggcgacggtaaataatatttcctttaacatcagctacagcagactattgtaaatatcggactaccaaaaaatgtcatttccctgcctatttcttctttcgtccccaactgctttgcttcttctatttctttttgaatttcctgatatattttttctgtatattccatgctttctcctcctattctttattcattcatacatttccaaatcgtaatctctactctgaagcttcctgcctcatactcaaatttaatgtctccatcatacttttccacgatatgcctcatactctgaattccccatccatgctcttttttattctttttcgaagtcagaaatcgaccatttttctgttctggctctatttgcgctgtattttccatcgtgatcagaaacattccatttacttctttcagccacaaactgattgcccgacttttcaacggacattttgcagccgcttctatcgcattatccaacagattgcccatcagtacaacaaaatcagattcatctatttttatcgaatcaatgtctgttttcactgtgaatttgatgccaagtccttcaattctgcggatcttcatattcaaaatgaaatcaagtgtagctatcgggctccagtgttttcgcctctgtgactccagttctgcttcgtacatgcctaaaaatgtacggactttttcatattcgtcattttccatgcattcccttaaatattgcattttatggcgctcgtcatgaatcagacagcgattttcttcataggcacttctcagttctgtgtattgacgtgctattgtctcactgcggatactgagcagctgctgttctgtgtgaaacgtttttttcaagagcaaagccagtaataaaacaatagtgaataccatcgctcctacgctaagcacaacactacgcaattcttcgtattcgattttttgtaaacctacatccgtagtaaaatttaagatcagaatttctgtcaacccaatcaaaaacatctgccatttatactccagaagcgcttttcttaaaatctttccattaataaaaactttgaaaacgatgaatataataatatatagaatgattccaaacgtaagcccggagaatgtattcatattctccagttccagatcaaaaaaggtacgtcctgttgttcctgctttgcagaacaggtatgcactctttaatatctggacaagccctaaatacagcatctcccatacgtatgcctgcgacaatttgcattcaaaatacttacagcaaaaaaatggcaggaaaacatttcccataagtgccgccaatattgaaatataagccattcgataattccatgaaatcaagcctgtaattatcgaaaactccgttacagttacaatcaattccaatgcttttcgatattcttttttaatcttgccgctttttacaattttccctcgatacagagctatcataaacagccagcaccctcccactgctatttttcctggaatcgtcagacgtttttcaaaattccagaaaataataaacagcagcagcccatgcaacgccatttcatttaaaatcagtctccagccccacacctcctcttttcgtttgggaaatgcctgcgaaaatacccagataccaaggacattttccaaaaagaagcctgccgtattcagcagaagaatttcacttcttgtcatcccctccgcctccaatacgccgcaatctgcttcctgacctcggtgagcttgcttgcgccgacaacaacggtctcaccattgcgaagcagaatgcgatgattctgcatggacatcacatggcgcaggttgacaatgaagcctttactgagtcggatgaattcttctgtggccagttcctcataaacttcactgattgccttgcgcacccgtttcttctgcccgtttctgcagtgaatcaccgtgtagcggtcatctttctccatatagtaaatgtcatcgtagaagatcttttccacgtttgactttttctcgatcacgtacacttcgttttcctgttccagaaggtgcggcagcagtgcgtcatacgcctcggtcagctttttttttcagcttctttttttgaatataacgccacgtattcacttcatacgcgtcgatcgcgtactccggataattggtcgcaaatatgatgatcggctccggatattccgcacggattctttttgctgcctcaatgccgtccattttttccattcggatatccatgatgtaaatgtcatactgctcctctttaagaccccggatcatccagtccggatcttcaaatggctccactctgcaaagaagcccttttttccggaaatattcttctgtgatctgcacctcctcattcaaatccactctgttgtcatcaacgattgctatatttatcatctgtcacttctccccagaaagccgtcgattttgtttgccgtctttctcctttgtgctttttagcgcaaaacgaccggccggaaattgtgcaccggctatgcaaaatgcggactgttgctctcaaaacatttctgttaatctacttaactggctccaaaatactttcgtattttgctgttttgacctttgcaacgggcaggaaagaggacacttatgatccgcttcgcggcctatatttaaaacccgtctttcctttttcgattcaccgtcacgcacttcctacactataccatacttttcataaaagcggagtaagtgtccgtaaaaaatgagtttctgtccgttttcaattgctttgatacatacgttcttattctggcagattcattttacagtagatttgaattccttgtatataaaaaaacttccgcagacccgtttcttttccggtccgcagaagtttcttttttatatttctctgttttatcatctttctgtaatttcatcgcggctgccatcgcgaggccatccattttgggcatatagatgtcggatatgatgatgtgcgaccgcagctggcgaatcagctccagaccctcgagaccgtcctcggccgtctcgacaacctcgcatccgtacttttcccatggaaccatttttgaaagtcccttcacgatgaccggtataatgacgattgtcacgaccgctgccatcaggccttcctgaatcaacagtttcgaatcatgacttctatcccgattatccgcatatccattcacccagcacgacgctcgccgcgatcccacacacggtcgcaaaaaacgcacccggaagcgtataccgtgtcttttttacgttcacgctcaggaaatatacactcatcgtataaaaaatcgtttctgtgctcgacatcatcagggaggcgatcactccgatgcgtgaatccggtccatatttctgatagacatccagcagcaatccggtcgcggcacttgatgaaaacagccgcagaatcgccatcggaaacagacaggccggaaataggctgtctcctgcgacctgctccagaagatgagcaatcagatccagaaatcccgaagcccgcagcacaccggtcgccagcatcagtccgatcatggtcgggatgagatgcaataccgtcttcatccctgcttccgccccttccacaaagctgtcataaaccgggatctttttccacatgccaaaagcgatgatggaaacgatgagcattggaaggattaattttgatatgtttaaaaataactgcatgatagtttgtattgcttcccgccattctctttattcattttatgagcctgtgcttctcccaatgtcaaatttctcttttcctgttcaaagccgcactcccactgactccagacagtaacaaaaaacacctccgcttcccgctctgcgcgttttggcgaaggtgtttcttcctattataatagggttgagaatactgttctatgttctatgttttattttctgtgtttctttttctttgaggtgagaaccagtccaaggatcacaaccacggatgccacaagcactgctacatttggaagtatcggtgtctcgtctccggtcgatacatcgccgttcgtgcttccaccgcttccgtttgaggaataaccgcttccgcccggctcatcaccgatgttgttgtcatctttgttctcgatgcttctccagtcatcatcgtttacggaaccgtagactgcgttcagcaggatcgactgtacttcggtgcggtcctgactgaaggaggccgttgcatttaccactcggatatcgtagccgaattccttgctgctcttgacaagctttccgtttttgtccacctcagccacataaatcttcgcctcagatgcagagccaagattcagcgtcagcttcagtgtcagttcgctcttgccgtttaactgcatcgggatcgggtttgcatacagctgtgtgaactccggatctttaaacagtccggcgtagaaggtctcgttgaccgcgtactgggaagttcccttgtagaccttcttggtcagatacagcgttaccttcgaaatctttgtcttgttcgtgattgtcacgctggcatcttctccctttttgacggtcagctgcggctgatcgatcgtcggcacataaccgaaatcagaattgtctgtaatccgctgtccctgctcatttatctctgcgatgtagtagttcagatcatcgctgccaggaagcagaattcttctgcgctctgatgcctctgaagcattgttcagcgtaaccggaatgatggtcggcgtatcgctgtaatcctgcgtacggtaaatgcctgcatagaatgtcttcgatgcggcttctgcctcgccggaagaattctgcagttttttcgtgatcgttaaggtcgccgtgtaacggtaacctctcggaagctccgaataaacattctggatctctgcggtcgcatttcctttgatctgcagcttgcccgcattcgtgtatttcacggtgcagctgttgctgctctcaactacatttccgtactgatcggtctcgcccagatagtaagtgccgttttccagcttgccaaatgcagccgtgccgctcagaccatttactgtaatctcttttacatcactgactttcttcgtccgctttgcatctgcataaagtgcggtgtaataggtgtaacagccttcctgcgcatacgttccggcggctgtatcctgtgcgtacacctgatgctctccgctgtagacctgtttcatgacagtcagcgtattgtttcctttggctttcttatttgtcagaataacctctaccgtctgtgcctcttccgcggtaaatatcacatcttccgtattgctgtagccatccggcgcggtcagctctgtcagaatataagaggtgccattttccagcttgttctccagtaccagagcttttccggtcgattcaaagactgccttctggtttaccggtacgacctctcctgtttcctgctttttcagtacaagctttgctccggaaagaagggttcctttttcatcctccacctgaatctttactgttgaattgttcagctggttctgcagggtaccttctgttttctctccgcatactacggtgagcttaccgtctgcatgtcccggatacgtaacagtgtaaaggaattcatccttatcggacgtgatcagatttccgtctttatcgacctctgccatccacaccggcacactgctgtcagtcatttttacttttacagtctcttttacggatgcggcatctttcagtgccagcttaaccggctcctccagaagtgcttcctcgtgatctgcgtctgtgtagagcattgcgtaaaagtcttctgtcacttttttcgcttttccatcgtaattctttacctgctttatcagggtaatcgatgcctcataactgaaatcatcggccggatattctgtatactggtattccagggctacggcttcttttccgctctctgttttctttaccgtaatcgtcgtatagctctggttctctttggctgtctcgcctttctgcaccagattaaaggactcatcactgaccggatcgccaaactcatcggtcggtgcaagataatacgttcctttctccacgcctgcaactgccgcttttgccgttgtcgtttttccttccgcataagtcagcgtgatgacattgcttacttttttcttcagcgctttgtcctggaacagtgccacataatagtgatcctcatattctgaggtcaataccgtctgattaaaagtgctctgtgcggtcagttccagcgtctgtgcgtcggatgctgtctttgcatttgacacgatcagctctaccggcgcggctgcgtctgcctctatcgtaaatttccggtctgccgccggctggtatcctttcggtgcggaaatctcggacagcaggtacgtgcctgcctccagtccgtttatgctgacttcctcgccgttaaagctgatatagtattttggatatcccttttcatcccggatgatctgtccgtcttcatttttcaggacaaatgctgctccggaaagtaatttaccatcgctctttccgtctgctttctgaccggtgagccgcagctttgcctgcaccttttctgtctttgcaaggtcaatcgaaagcacatttttgctccaggtgtaccagctgccgctcccttcaaagaccggctttccattctcgtcaatgtaaaaatagatacgggatggaatgacgtacgattccgttccgccggaaacagccggtgctttggtcacctccagataataggatccgctgtaatgaagctttgccgatacctcggaggctttgctccaggtaagctttgctgcctcgtcatcttttttgaaaatctgcgttccatcttcatcgtaaagctcatccacagaacggattactgcctcgccgcctgccagtgcctgatcctttgcatcgtccgcatcggtcagtttaaatttcagttcaacacctttttgggaactccatgtggcgatcgcccgcgtgctcaggaaagagtagagggaaattccatcgtcgattgtgatcatagaatcgcccgctgtctcactctgcggagtttccgtttcctccgtctgctgcggagcttccgttgtcggctcgatcactgcttcggattccgtctcggtctccgtagttatttcgcttgtgacctcagtctcggtctctgcagtcgtttcgcttgtgacctcagtctctgtctctgcagtcgtttcgcttgtgacctcagtctcggcctctgcagtcgtttcgcttgtgacctcagtctcggtctctgcagtcgtttcgcttgtgacctcagtctctgtctctgccgctgtctcagtggtagcttctgtctcggtctctgtggtagcttctgtctcggtctctgtggtagcttctgtctcggtctctgtggtagcttctgtctcgctctcggactccgtctcctccgccttcgcaccctcaatcagcacgatccgcttcagatctgaaacgctgtccgccactgtaatcttatccgcataaacggcacccgccagatttgacttcacttccacgtcaccttccggtgcgaggaaagtaccctgtagtacttccgtgcccgtcagcgtcaccgttccttcaaacggagcataattttctccgtcaagccatgcaaaattgtaaaggatatcgcccggctgtgtctcatcggtgtaacgcaccgtctgacctgcatttaccattgtgtaaccggagaaatcaaggttttgatctttctggtccgcgatcacattgacgaccacgtactgattggtcacgtcgatcgtctcgctctgaaatgcatctttcaactgctttgtgtcaagtgttccgtctttgtctgcatagacattaatcacacgcactcttgaagtggactttccgtccgcaagcttttcagaaagattttccagcccggaaagtgcagtacggcctgcgtctccggatgcaatctcctctgattttgcaagggaatctgcgccatttacttcctgcgctgcgaagagatacggaactgcacctttcagtccctgccgcagtgtctgcaattcaattttctcgccatcgttgacgcgctcggagcgctctgtctgtttttccgtttcggtttctttctccgtctctgtctcagaagaagtctctgtctctgtctcagtcggagcctgtgtctcggtctctgttgcaggctgcgtctccggttcggtcggtgcctgcgtctccggctcggtcggtgcctgcgtctccggctcggtcggtgcctgcgtctgcggttccgtcggtgcctgcgtctccggctcggtcggtgcctgtgtctgcggctcggtcggtgcctgtgtctgtggctcggtcggtgcctgcgtctccggctctgctgattgtgcttcttccgatgcggcctgtgtctgcacctctgtctgcgtttcattctgtgcagccgcctgcgtctgtgcttctgatgtctgctcctcctgcgcgatacctgtcactgcacactgctggaacagcattgccgcagacagaaaagaggccgctattcttttaaatcccgtattcatcaaatcctctcctttccaaaaaatgatggtaactgttcagagccaacctccaaaatgctacgcatttcgtcggtgtggcgtatccgccaaataaaatttcaaaaacaggaatcaagcagatattcgcaatccgctttcgctacttgctcataaccgaataactgcctcgcagtttattcggttaaaatgcaagcattttccgcctgttttatgaaattttgcttggctctgaacaattacaaatgatgttttgaatcatttttgaatgtgtttcttcctattatatatagtcccgttcagactcaggtggaatttccaaaacctgacactgaacgatctgcttacagaagcaatcatatgaatctttatcgcttctaccctgtctcacagtataatacaatccgcaatccacgtaaagactcaagattcttaaaaagtttttaaggccgcagaaaaggcaggtactcccgcacctgcctctcactttgtttgtgcttattttgtaccgaagatacggtcgcctgcgtctccaagtcccggaacgatgtagccatgatcgttgaggtgatcatccagcgcacctacgtagatatctacatccgggtgtgcttttttcattgcctcaagtccttccggagctgcgatgatgcacatgaagcggatattctttacgcccttgtccttgagcatctggatcgctgcgatggaagaaccgccggttgccaacatcgggtctacgacgaatacttccctctcgttggaatctgccggaagcttgcaataatactcaaccggttttaatgtctccggatcacggtacagaccgatatggcctacctttgctgccggaatcattgccagcataccgtccaccatgccaagacctgctcgcagaatcggagcaacagccagtttctttccgctgagttctttcgccgtcgttttgcagatcggtgtctcgatctctacatcctgaagcttcagatctctcgtcgcctcatagcacatatacattgcgatctcactgatcagggcacggaaatctctagatccggtgtcctttcttcggatcagtccgatcttgtgctgaatcagcggatggtccataatcattactttctgcattttctttttcctctttctttccttttgtataaccaaagcggatattcgcaatccgcctcgctgtttgcagaatcataagcatcatcgtgtctgattaatcctcgtcgatcatgcggatccggcgtgcatgacgctctgcaccggaaaatggtgtatccagaaacgtatccacaatcttaagtgcaagtcccgttcccactacacgtgcacccatggcaagaatgttcgcatcgttgtgaagtctcgtcgcctccgcgctgaagcagtctccgcacagtgctgcacggatccccttataacggtttgcggtgatcgaaatgccaatgcctgtgccgcagatcaggataccgcggtcacatcttccctccaggatctcttttaccacctttttggagtaaaccggataatccacggagtcttcggagtatgtaccacagtcgacatacttaagccctctctcatccaggtgtttttttacttcctgcatcagaccgtagccggcctggtcacaccccagtgctaacatagtaattcctcctcattgagctgtactaccagctttgaaatcaatgtctccagttcggtaaaacactgcccataatctgccagagaaccgccatatggattaaaaatctcctgcggcaccccaacgaatgtattcagcacctgcatgctgtcggcaaattcgtctccgaattctgtgcgtaccttctgctttacctcttcgcttaccgccagcagcagggtacgttcccctgcatcctcttttaccagcgggtcactcatgtgatccttcatcgtcagtccattgctgaccagaatcgcctctgctttcggattgatcggctccggaaaaagaaccaccacgccctttgacgtaatttccagctcctcaagcagatatttgctctgcaggatcgcctctgccatcggtccgacagaggtatcactgctgcttacaaaaatcagcctgtcgtatcgtttcactgcctctgctccctgctttcctcatactttaatgatctggtgtcctgccgctttgatcagacgattcatgatcgcctggccgatctttggcgtctcaaaggattcggagtagatcacggagatatccgattcatcaaagtcgcgcagaatgctgtacagatgctgtgcgatcgtaatttcctctttgcgggaaccgatcgagcgcacatccccctccttataatatagaagagactcatccgttccgatcacacccgcttttttccctgctgcaaggttttctgtgacaagctcattaatcttttcgcgcacccgcgccgcttcgccctccacaatgatcagatctgctttcggcgcataatggcggtatttcatccccggtgctttcggatgcacattggaatccggtgagatcagcccccggtccatttccacttcatccagcacctgctccagcatttcctgattgatgtagcctggccgcaggattgtcggtttgccctcggtcagatctacgatcgtcgattccagcccgatattggcattgcctccgtcgatgatcatctcgatctttccgccaagatcctgtgccacatgggccgcacatgtcggactcggtcttccggacgtattggcacttggagccgccacataaccgccgcccgcacggatcagcgcacgcgccacctcattactcggcatccggatcgctaccgtgtccagccctccggtcgtagccatcggcaccgcgtctgattttttcaggatcatggtcagcggtcccggccagaatgcatccgccagttttttcgcttctggcggaatctcggaagcgatcttataaatcgcatcccaatccgcgatatgcacaatgagcggattgtccgacggtcttccctttgccgcgtatattttggctgaagcctgcgcatcgagcgcatttccgccgagtccgtatactgtctcagtcggaaaggctacaagcccgccttctttcagtatatctccagcacgccggatctgcgtctcatcaatcccgtcgtgcatgactgctattattgtctgcataataagttcctgcctttccaatcgaacctagtataccacctcagcgcattttttgaaactgttttctgcatttttaccaaataatgttggtttctgatcgcttcgtgtgctacaatgtatagaaagaattcgaaaagaggtataacacatgagtgaagaaatcaaagaagaattaaaagaggccaccgcagccgctccggagaaagaagaaaccatggcggattatgaggcagagatcgccgcttccatgaagccgatccatgagggcgacatcatgaccggcactgtcatcggcatttctgagacggagattacgctggatttcggctccttcactgacggcatcatccgtcttgaggacgcaagcgacgatccgaacttcacattccgtgatgtggaaatgggtcagaccatctccgctacagtcatccgcagagatgatggcagaggtcatatccttctctccatgaaagaggcagccgcagtccttggctgggagcgtctgacgcagcttctgaaggatcagtccaacatcaaagtaaagatcagtgaagcagtaaagagcggagttgttgcgtatgttgagggcatccgcggatttatcccggcttccaagctttctttaggatacgttgaaaatccggatgagtgggttggaaaggaaatcgaggtgcgcgtcatcactgcagatccggaggatcagaagcttgtgctctccgcaaaagaaatcctgcgtgagaaggaagcagaaaaccgcaagcagcgcgtttctaacgttgaggtcggccttgtcaccgagggaaccgtagaatccctgatgccgtacggcgcattcattgacctcggaaacggtctgagcggactcgttcatatctctcagatctgcgacaagcgcatcaagcatccaggtgctgttctcaaagaaggccagaaggtaaaagtaaaagtcatcgcggtcaaagacggaaaaatcagtctgagcatgaaggcactcgaggatgttgctgcagtcgagattgaggaagagacgtacgagatgccggagacggaggaagctacgacttctcttggatcgctgtttaagaatatcaggctgtcctgatgcaaaaaatatttcaaaaatgatatgatatttcactgaaaaaaagaagtctgttttctccaaatatgaaacagacttctttttattctcaccgcagcgcgtccttcatctctttcacgtacgctgccacatacggcacgcagtctttgccatactgcccgcagagcttcacgatcgcggaaccgacaatcgctccgtctga

SEQ ID NO: 1369 - DNA, 32759 bp, Unknown
  16S sequences of unknown bacteria
ttccttcacacacttgagaacatgggaccgtctccggagccgaacctgacagttctttactcagaaagacttccggaaaacttcaagaaatatacatctttgatttctgtaaagacaagttccgtacagtacgaaaacgatgatgttatgcgtccggtttggggcgatgactacagcatctgctgctgtgtatctgctactgagacaggtaaagagatccagttcttcggagcaagagcaaacctggcaaaatgcctgatgtatgccatcaatggcggtgtggatgtgaagaccagagaacaggtgggaccggcatataaaccgatcacttccgagtatctggattatgatgaagtcgttgccaaatatgatgtaatgatggactggctggcaggactgtatgtaaatgtactgaacctgatccagtacatgcatgacaaatattactatgaggcagctgagatggctctgatcgataccgatgtgagaagaacctttgctaccggtattgcaggattctcccatgtagttgactctttgagtgccatcaaatatgcaaaagtaaaatgcgttcgtgacgagactggtattgttgttgattacgagaccgagggagatttcccaagatacggcaatgatgatgacagagcagatgatattgcagtatggcttctgaagaccttccttgacaagatcaagaagcatcacacctatcgtgattctgagccgactacctccattctgaccattacttccaatgtggtatacggcaaggcaaccggaagcatgccggatggaagaaaagcaggtgaaccgctgtccccgggagcaaatccgagctacggtgcagagaagaacggtcttctggcttcccttaactctgttgcaaaacttccttatgaatgggcattggacggaatctccaatactcagaccatcaacccggatgcactgggccacagcgaggaagagcgagtgaacaatctggtacaggttatggacggatactttgatcagggtgcacatcatctgaatgtcaatgtatttggaaaagagaaactgatcgatgcgatggaacatccggagaaagaagagtatgcaaacttcaccatccgcgtgtccggctacgctgtaaaattcatcgaccttaccagagaacagcagatggatgttatctccagaacctgccacactgctatgtaaggaatgacggatatgacagatacggcattgacgggacaggtacattctctggagaccttcggcctggtggatggtccgggagtccggtgcgtggtatttttgcagggctgtaagatgcgatgcagatactgtcacaatccggagacctggagtcagcagggcggtgagacctggacagcagaagatctgttccggaaagtgtaccgctatcgaaattactggggaaaggacgggggactcacagtcagtggtggggagccccttctccagatggaatttgtaactgaattttttaaactggcaaagaaaaagcaggtgaataccgcacttgatacttccggcaacagtttctgcctggaatcatcttatctggaacgatttgacagactgatggatctgacggatctgtttctgctggatatcaaggcagtggacgcctctcttcacaaacagctgactggacaggataacgcaggaatcctggcactggctcactacctggcggatcatgggaaatccttgtggatccgaagggtactggtgccggggcttacggattctgaagaggatctgacggctcttcgggatctggcaagatccttgccgaccctgaaacggttggaagttcttccttatcatacactgggaacgttcaaatgggagaagcttggcattccctactcgctggaaggcacaccggtgccaaccaaagagcaggtggcacaggccgaagcaatcctggaagtgaacaagtatcaataaagactcttatcaataaaattcttcaacaggaggtgccaaacagtgcctcctgttgcatttttaatgaaagaatttttgctgttagatataactaaaaaaattaacgagaacttttttcaataaagtgagttaagggtggaattttgtcgaatgagaacgtataatgctggaaaacaaaacaactggaggtaaatatcatgaaaaacatttttagtagtattgactggaagaagactggattatttgcagcaggtgttgcatttggaaccgcaggcattaaagtcctctccagcgatgatgcaaagaaagtatataccaactgtaccgcagctgttcttcgcgcaaaggattgtgtaatgaagacagctactaccattcaggagaacgcagaggatatctatgcagaagctgttcagatcaacgaggacagagcagcagaagcagatgcaaaagtagaagagtctctggatgaagaagtatctgctgatgaagagggtgcagaataagcattatgaaattcataatcaaacatgagatcaggggccgcattcgtatacatgcggcccaaagtcggatgagcgctgttcaggcagatacacttgcatattatgtaggaaagcttgaaggcgtgacttctgtaaaagtgcaggaacgtgtacaggacgcagtgatctgttataccggagaccgagagacactgatcctggcgttgcggcagttcgcttatgagaatgtggaagttccggagcaggtactggcaagctccagccgcgcactgaacagtgaatactgggagaagctggtgacagccgtggtcttaagagccggaagtaagatgttcctgccttattccatccgttctgtgatagcagcagtaaaatctgtaaaatatctgtggcatggaatctgcacactggcacacggcaagctggaagttccggtactggatggaacagccatcggtgtatctgtgttccgtggcgatatggagactgcatcttccgtgatgttccttctgggaatcggtgagatcctggaggaatggacccacaagaaatctgtggcagatctggcgcggagcatgtctcttcacgtagagaaggtatggctgcagcgtgacggacaggagattcttgttccatctgaacagattgaaccgggcgataaagttgttgtccgcatgggcaacatggttccgtttgacggtgtagttgtaactggtgacggtatggtcaaccaagcctctatgactggtgaatccattccggttcataagagcgaaggaagcactgtctatgcaggaactgttctggaagaaggcgagttgaccgttctggtccgtgaagtgactggttctggaaaatttgacaagatcgtatctatgatcgaagagtctcagaaactgaaatcctccatggaaggaaaagcagagcatctggcagatcgtctggtgccgtatacactgggcggaacggcattggtctatctgttgaccagaaatgtgaccaaggcactggcggtactgatggtagatttctcctgtgcactgaagcttgctatgccaatctcggtactgtcagctatcagagaggcaggaacctatgatgtgaccgtcaagggcggaagatatctggaagctattgcagaggcagataccatcgtctttgataagacaggtacactgactaaggcaaaaccgacggttgtggatgtggttccattcgtggatgaagaccccgatgaactgcttcgtctggcagcctgtatggaagagcattttccacactctatggcaaaagcggttgtagaagcagcgaaagtaagagggctgtcccacgatgagcgtcatgcaaaggtggagtatgtggtggcgcatggcatttctaccacgatcgaaggcaagaaagctgtgatcggaagccagcattttgtatttgaagatgagaaatgtgtgattccggagggcatgcaggagagattcgatgcagttccggaggaatattctcatctgtacctggcggtggaaggcaggctggtagcaatcatctgtattgaagacccgctgcgtccggaagctgttgatgtaatccagggccttaagaaagcaggtatcagcaaagtagtcatgatgactggagacagtgaccgtaccgcccgtgctgtggcatcaaaagtaggcgtggatgagtattattctgaggtcctgccggaagacaaggcatcttttgtagataaggaacgttctgctgggagaaaggttatcatgatcggggatggtatcaatgattcaccggcattgtccgcagctgatgttggaattgctatcagtgatggcgcggaaattgccagagagattgcggatgtgaccatcagcgcagacaatctggaagaactggtgaagttaaaacagatcagcaatggactgataaaacggatccatcagaattaccgtgtgatcgtaggattcaatatgggtctgatcattctgggcgttgcaggtatcctccagccgaccacatccgcattgttccacaatacttctacactgttgatcagtttgaagagtatgacggatctgctcccggaagtgtaaaatcgataatgaatcaaatataaaataagcaagaaggactgttggggtggacttgacagttctttttgcatattctgcaaaatattttttgacaaaaaaaacacaaggctctataataaagacagatttgggcatataagcaataaggaggactcagaatggaagagagacagatctcaaaagcggtaatcaaacggcttccgagatattaccgatatcttggcgagatgctgaataatggagtcgagcgcatttcttccggtgagctgagcgcgaaaatgcaggtgacggcatctcagatcaggcaggatctgaacaattttggcggatttggacagcagggatatggatataatgtgaaattcctgtacgatgagatcggcaagattctgggtgtggacaagaagcatcctatgatcattattggtggtggtaatttcggacatgctctggcaaactatgattttgaaaagaacggatttatcacaaaggcaatctttgatgttcgtcccagcctggtaggaactgatgtgcgtggtattccggtactgatgatgaatgagctggaagattttgtggctcgtgagcatattgagattgcagtactgacgcttccgaaggatcgtgtggcagagacggctgaccgtctggttcgctgtggaatcaaggcattgtggaactttgcacatctggatctgaaagttccggatgatgtggtagtggaaaatgttcatctggtagacagtctgatgcagttatcttatcgaatcagcagctatgaaaatgaacacaaaaaggaagaagtataaggaacgagggtctgttattgtatacagacccttttgctcatttagttaaaatggaagagtatagaaacgtagatcagaagattctggaaaaacttcctgaaagaccgaaaaggtctcataaaggaatgtttggaaaagcattgtgtatagcgggaagcgttaacatggcaggcgcagcatatttgtgcgcgggagcagcgtatcgaagcggtgcaggtctggtgaggatcctgacaccggaagaaaaccgggtgatcctgcagacacttctgcctgaagcagtgatgactacttttgaacagaatgaacgggaagcgttggataacatactggaagaagcactttcctgggcgacagtggcagccattggtccagggcttggaaggaagccatgggcatatcacatgatgaagctgacgcttcagaaatttcacgggccgctggtgatcgatgcggatgcgcttaatattctgtcagaacatatggaatggctggaacagcatgaaggggatgtgatcctgacccctcatgtaggggaattttctcgacttacaggtgtggaaccccggaagatcagtgaagatatttcaggatgggctgctgcttttgcaagagaacatcattgcatctgcattctgaaggatgccccctccgcagcagcactgtcagatggaacttgttatgtgaacactacaggcaacagtggaatgtccaccggaggaagcggcgatgtgttgacgggaattctgacaggcctgctggctcagaaagttgatccttcagatgcagcgcttctgggcatgtggcttcacggaagagccggggatctggcgatggagcaggaaggcgtatatggtcttctggcaaggcatctgctggagtatctgcccggtgctatgaagaaagcataagtccggacagatgaaagacggatttaaaatataggcgacaaaaggagaatgagacaatgaaacattacatgagagtatgtgcagagatcaatctggatgcagtggcatataattttaaaagcatgaaggataatctgacgccgggaacgaagatggtggctgttgtgaagacagatggttatgggcatggcgcggtgccgatcgctcagatggtggaggcatatgattatatctggggatatgcagtggcaaccattgaggaggcgctgctgcttcgcaaggcaggcatcaaaaaaccaatcctgatccttggatttgtattcccggatgcctatgaagaagtggtgaaatacgatatccgtccggcagtattcaaactgtccatggcccgtcagctttcggaagaggctgttcgccagggtaagactgtccatgtacatattaaagtagataccggtatgtcccgcattgggtttaaagataatgctgagagtgctgatattgtgaaagagatcagccaactgcccaatctggacacagaaggactgtttactcattttgccagagcagatgagacagataagacaccggcagaggtacagttaagccgttatcttgcattcagcagacttctggaggacagaggtgtgaatattacgctccatcactgttccaacagcgcaggtatcttcgatctgaagcaggcaaaccttgatatggtccgtgcaggagtatcgatctatggcatgtacccgtctgatgaagttaataagtttgcagtgccgatcacaccggtactgtctttgaagagccatattgtctatatcaaagagctggaggctggtgcggctgtcagctatggaggtacctttgtagctgagaaaaccatgaaggtggcaacggttccggtgggatacggcgatggatatccaagatccctgtccaataagggctgggtactgatccgcggacagaaagctccgattcttggaagagtctgcatggaccagatgatggtggatgtatctgctattccggaagtgaaagaaggagatcaggtaacactgatcggctctgacggcggacaggagatcacgatggaggatctgggagacctgtctggaagatttaactatgaacttgcctgcgaccttggaaaacgggttccgcgtcggttctggaaagacggcaggatcgtagccacacaggattatttttcatatactggaatagaatagaaatagacaggaaatactctgactgcaaaataaaacagatcggagtgaagaaaattgatgatcagacgcggtgatgtctactatgcagatctcagaccggtgatcggttccgagcagggtgggatcagaccagtccttatcattcagaatgatgtgggcaaccgtcacagcccaactgtgatctgtgcggcgatcacttcaaagatgaataaggcgaagcttcctacccatgtggaactggacgcagaaatctgtcatatggtgaaggattcagtgatcctgttggagcagctgcgtactattgataaaaagagactgagggataaagtgtgtcatctggatggaattatcataaaaaaaatcgatgatgcgctgaaaatcagcctggagttggatacatagaccttgcaaagaagaaatcaagatgttacaatgtatctttaggaacgaaagagtagtaaaggagagttatatttatgtcaggacattcaaagttcgccaacataaaacataaaaaggagaaaaacgacgctgcaaagggtaaggtttttaccattatcggccgtgagattgccgttgcagtcaaagagggcggtccggatccgaacaacaacagccgtcttcgcgatgttattgcaaaagcaaaagcaaataacatgcctaatgatacgattgaccgtggtatcaagcgtgcagcaggagatgcgaatgccgttaactacgagcacgttacatatgaaggatatggaccgagcggaatcgctattattgtagaagcactgaccgacaacaagaaccgtactgcttccaatgtacgtaacgcatttaccaaaggaaacggaagtctgggaaccagtggctgtgtatcctatatgttcgatcagaagggacagatcatcattgaccgcgaagagtgtgatatggatgctgacgatctgatgatgatggctctggatgcaggcgcagaggatttctcagaggaagaggacagcttcgagattcttacttccccggatgatttctcaaaagtccgcgagacactggagaaggaaggcattccgatggctgaggctgagatcaccatgattccgcagaattatgtgactctgagtgatgaaaacgatattaaattcttaaaccgtacactggatctgctggatgaggatgatgatgttcaggcagtctaccacaactgggatgagtaaaatctatgtttaaagaaggaatatgcccgtgctgccatgagaagatccaggttccggaagacagggatcagatcatctgcatgttctgcggaaaagagatttctgtggaggaagcactggaaaaacagaagagtaagatccgtaaagtatcgcaggaagagtatgatcagtatatggatacagcaaaagctgttcttgagaagctgatcagggagtgtgataatcctatgcagaatttcagaaagaacctgtatgagggtgctttcaatgatttctgcagtatcaacagaccactgtttgaggcagtggatataatctgcggcaatgcagaggatgcagacggtgtgacaactgaactgacagatcatttgataaatgctgcaaaagaggaactggcaggtgtgaagttcaaaggtcataagaaccagaagcagatggactataattttctgctgagtatttatctggtgccgtcggcggtgaaatatccgggtgagtattcagagcaatttgcagatcatctgctggcagactggaatcaggcatttggaaccaatcttgggaaagccacctatgagggaattgcaggcggcttccgcagaaaactgtgttatgtgactacggctgtgtgcgagggccttggaaaaggaaccgactgctatgagctgaacgttctgaaacgttatagagatgagtatctggagcatgccaagggcggccatgaacttgtggaagagtactatgacattgcgccgaccatcgtaaaacgtatggaaaaagaagcggataaagagcagatttacagagcattgtatgaagactatctgatgccctgcatcaggaagattgaagcgcaggaatacgaagaatgtcgtgatctttatgaatctatggtggaaacactcaaagtaaaatatttgatgtaaaaagctgccgtggaggaagatgctccacggcagttctgatataaaataaaaggatcgaggaggattttacgaatgagtaaagagttcagaccagataccatctgcgtacaggcaggttggaaaccaaagaaaggtgagccgagagtactgccgatctatcagagcactacatttaagtatgatacgacggaagaaatgggtagattgtttgcattggaggaagatggatatttctacagcagacttcagaacccgaccaacgatgcggtagcagagaagatctgtgaactggagggtggtgtggctgccatgctcacatcttccggtcaggcagcgaacttctatacgattgctaatttgtgccaggcaggggatcacattgtatgttctgcaaaagtatacggaggaaccttcaatctgtatgcagcaactatccataaaatgggcatggagtgtacgttcgtagatccggatgctccggcagaagagattgacaaggcatttcgtccgaataccaaggctgtggtaggtgagaccattgcaaatccggctctgacaattctggatattgagaagtttgcaaaactggctcatgctcatggtgtacctctgatcgtagataatacgtttgcaacacctatcaactgcagaccatttgagcatggggcggatattgttacccattccactagtaaatacatggatggacatgccatggcactgggcggatgtattgtggacagcggtaattttgactgggatgctcatgctgaaaaattcccgggtctgaccactccggacgagacctatcatggcgttgtctatacagaacggtttggcaagaaagcatttatcaccaaggcaactgcacagcttatgagagatctgggaagtattccatctccgatgaattccttcctgctgaatgtgggtcttgagacattgcctctgcgtgtggaaaagcattgcagcaatgcaaagaaggtggcagaatttctgaagaatcatgagaaagtggaattcgtaaactgtggtatgctggaaggtgaccgttattatgaagtcgctcagaagtatatgccaaacggaacctgcggtgttctctcctttggtctgaaaggaaccaaggaagatgcagttcgtttcatggacagcctgaagctttgtgcgatcgtgactcatgtggcggatgcccgtacctgtgtacttcatccggcaagccatacccatcgtcagatgaatgaggagcagctaagagaagcgggagtgacccctggcatgatccgtctgtctgtgggaatcgagaatccacaggatatcattgatgatctggcacaggctcttgcaaatgtataaatcaaatataattttataaggatacatagaagatcggcttttctggcatactgagaaaaaagtatggcagaaaggctggttttttatatggcagaaaatcaagatgaactggaaaaatacggacagccggagcaaagaaggagagaggaatcttctccgatccagctgctcacgatcatcggagaagtagaagggcatgaatgtctggccgcaaacagtaagacaaccaaatatgagcatgtgattcccgtgctggcggcagtggaggaaaatccacagatccgggggctactggttctgatcaatacggtaggcggtgatgtggagagtggacttgccattgccgagatgatcgcatccatcagtaagccctcggtgtccctggttctgggaggcagtcattcgattggtgttccgctggcggtgtccacggactactcctttattgtaccaacaggaacgatgatgatccatccggtccggatgaatggtctgattataggggtggcacagacctttgaatattttcagaagattcaggaccgaatcgccggatttatcacggaccatagtcggatttccaaagtgcgcctgatgcaactgatgctggaaaccggagaactgaccaaagatgtgggaagtgtgctggtaggtgaacaggcagtttccgaagggctgatcgatgagctaggtggaatccatgatgcttatgacaaattgtataaaatgctggatttgacagaaacgaaataaataaaattaacactgaaaagaggtcaatatgacagctccgggattcttcccggagctttttttcaggcattcttaagattcctgaagaatttccaaagtcggtatttttgcgaaaaaagtatggtaatgtataaaagctacttgaattgttgtttacaaaacaagatgtatatgttattatactaagcacttaatacaataattaaatagtacaaaaaaggaggcataagtaattgatagaaccgtgatcagggtcagagatctttgcaaagtatataatccgggggaaaatgaagtgcgtgctctggatcatgtagatctgagcatcgacaagggagaactggtaggcattatcggacattcgggatctggtaaatctacgctgatgaatatgcttggatgtctggatgttccaacgtccggcaattattatttgaatggtaaagacgtgtcaaatatgacggatgatgaactgtcggatgtgagaaatgtggagattggatttatctttcaaggatttaatctgattcccaatctgaccgccaaggagaatgtggaattgccattgatctacagaggtgtttcaaagaaggaaagggaagacctggcagtggagtcgttgaaagccgtgggactggaacatcggatggatcacaagccaagcgagatgtcaggaggacagcagcagcgagtggctattgccagagccattgcggccagaccgccggtgatactggcagatgagccaaccgggaatctggattcccgttctacacaggagatcatggaagtgttaaaggaacttcaccgaagcggacggaccgtgatcctgatcactcatgacgatgagattgctgcacaggtgaatcgggtgattcggatcaaggatggaaaagtagaagcagactttatgaacaagcagacaggagagaagtacaatgcataaattttggagaaggaagaaagaacagagcgagaacacgacagagcttgtaaaggcagaactgacaccacaacagaagaaaaagagaaagaagcggatcatcggaggtgtgatcgctgccgcactggtgttatttattgtaagccgggtactgacaccggcagcacttccgatggtcatggtgcgaagtgccgagaaaggaaccgtgaaacagaccatagacaccagcggtacggtaaagaccgaacagcagaagacctatttttcaccattagctgccaaagtagaagtatgtaaggtgcaggaaggcgatgcagtagaggccggacaggtgcttctgacctatgatgcgcaggatctggaaaaccggaagaaagaagcagcgctgcagaacgacgaagcatattatggatatcagaacacgatggataagaacagcaaagatacttctgagtatagccgttccagccatgatgtggagatcctggagcaacaggtggagaatgcgaaagcagaggtccgtgcgttgaaacaatatctgacggatatgggatgttttttgagagaagcacagaatgacaatcacaaaaatctggcagaagaatatcaggccaagatcgatcaggcaaccaatcagttggctgtgaaggaggaggaactggcagaatttcagagtgatctgtctgaacagaaaggaatcaaaaattctacagaaagtacgatgatgacagcagacgcaaaaaagcaggcagaagctgccaaagagctacaggcactgaagtctgccgaggtgaccgatgcggtggcacaggtcagtgatggtatcaaagccgactttgcaggtattgtgactggtgtcaaagctgtggatggcagcaacgtggaaaatggcggagaactttttaccgtcagcagtatcgagaaggtgtgtgtggatgtttcgtttagtaaaagtgatctggaaaagatagaagaaggccagaaagctgttgcgactatcgcaggaaaacagtatgaaggaactgttacaagaatcagtcgtgcagctgccaagaatgaaaaaggtgcatcgatcattcagggtgagatccatatcgataacccggatacagagctctatctgggtgtggatgccagggtgatggtggaaggcaacaaggcagaaaatgttgtgatgatccccgttgaagcgatcaatatcggtaaggatggaagttttgtctatgtagtaacagatggcatggttcagaagcggatggtgacagcaggaatctcttcagatgagtatacagagatcaagaagggtctggaagtcggagaacaggtaatcatcagtgtggatgccggcatcgaagagggcatggcagtcaatccggtggagggttgagtatgggacagctctgggaatatgtaaaaatggctttggccaatattcgcatgaacagaggtcggtcgttcctgactatgctgggcattattattggggtatcatcggtgattctgatcatgtcggtgggcaatggagccaggatggagatggagcaggagctgacagctgtggcaggcggacaaatctatatctatgtcaacagtaatctggaagaagtgccggtgattaccgaagcggaccgggaggcgatccgtatgctggatggagtgaaaggctgtacttctacagcaggaaatatgctgaatagtgttacaacaggaaaaggaacctttgatgcgatcgtgaattatgctgatccagatgatgagttttcaaataattctgttatggcctgcggacattggtacacctgggatgatttttacgcaggaaatgatgtggctgtgatcagcgaagcagatgctgtccgtatgtttgggactacagatgtgatcgggctgacctttgaaatggatgatggagatgttattaaaaatatgagaatcgttggtgtaaagaaatctatagatggtgcttttgtggcaaccggatatggggatgcttatctggacatcaatgtaccttatacttcggattcttactgggcacagtttaatgattttgacaatgtctatgtattttcacagaatagttccggcacgaaggaaattgcacaggaggtaaagagcctgcttgaagcccgtcacggaatgaccggtcaggatgctttcctgatcgaagactttgaaagccagatggcttcagtgatgcaggtgctcagtatgatcaccatctttattatgctggtggcggctatttccctgctggtaggaggcattggtgttatgaatattatgctggtatcagtgacagagaggactcgtgagatcggtattcgaaaagcattgggagccagaacgaaatccattctggttcagtttctggcggagtcagccatcatcaccggtattggaggcgtgatcggtattgtgctgggtatcggtggagcctatgcgatctgtgcacttcctatggtggctttttctccatctgtcagtatggcgactgtattgactgcaaccatattttcctgtggtgtcggtattttctttggtatctatccggccagaaaagcagcgcatttaagtcctattgaggctttgcggagaaattgataaaatgggttgctcaaaccgtaagaaaagtatatgctgagggtaatgatatacgaaaaaggggagcaacgataatggaaagaacagaacgggatacgccggagcgttttttgcatgagatcctgatcatgggagaactgatgcagacctgcggagcagaggtgttccgggtggaagatactctggcacgaatgggaaaagcctacggtgtggagcgtatgaatgtgtttgtgatcacttccagtattgtgatcacaatggaattaaaagatggaagagaactgacccagacccgcagggtcaggaaagcgggaggtaatgattttaccaggctggaatgtctcaatgtgctgagccgggagtattgtgatgatccgtttccggaaggagaacttggacggaggctggcgcagatccgtaagatcaggatcccgcgacgggaacggtatgtaggaaatattctggcagcatcaagctttgctgtgttttttggaggtggatggaaagatgctttgatttccggaatctttgcagtggcgatcagccttttgcaggattatgtggagttgatctgtatgaatactatggtatttaatgtgatcgcttcttttctgacagggatcggtatccggctcatatgccggttggtgccagggcttgatatggatatgatcatgattggtgatattatgctgttgattccaggtattcctatcaccaatgcggtgagagatgtgctgaccggagacaccatatcgggaatcatgaggtttattgaagctatgctctgggccggatgtctggcatttggttttctgagcgcattctggattgtaggaaaggtgtggtgatcgtatgggagaaatagctacatgggggaagctgctgcagcttttgatggcattttttggatcggccggatttgcgatcatgtttcatcttcgcagaaattttctgatgatcgcatcctttgggggactgctgacctggctggtgtatctgatctgtgcacctgtcatgccaggatatttcttcccgtctctggcggcaagtgcatttggtgcattgtatgcggaagtgctggcgcggtggctgaaagcaccgtccacattattctttattgtggcgatgatcccgctgattccgggaagtacattatattacagtatgagctgtgcagtgtacggacaactggcacaggcaagtatctatggcttacagacttttcagtgcgcacttggaattggtacaggcatgagcattgtctgggcactgtgtgatttttcaagaaaaatgcaggcgtggtggaaggaacgcgagtgacatgcagaaaatatatactttgaatatcaaagtatattgacaggatgccgcatatgttatatactttgaaagtcaaaataatattcagaggtgtatgacatatgtggagagacagaatcaatgtcctggataagaagagaaacagaattttacaggcgggtggagctgaccgtattgaaaagcagcataagagtggaaaacttacagcccgtgaaagaatcgatatgctttttgatccaggaacttttgtggaagtagacagttttatagaatcaagaattgatgattttggtctggataagaagagagtgcctggagatggcgtagtgaccggatatggtgagatcaatggacgtacagtgttcgtgtcttctgaggactttacagttatcggaggatcactgggtgaatatcattccatgaagatcgcccgaatccaggatatggcttatgatatgaaggcaccgatcatcatgatcaatgacagtggcggagcccgtattgaggagggtatcgactctttgagtggttatgcaaatattttcctgagaaatacaaaagcatccggcgtgatcccgcagatcgcagtgatcgtaggaccttgttccggcggagcatgctattctccggcaatctgcgattacattttcatggtagatgatatcagtaaaatgtttattaccggaccgcaggtagtaaagactgtcgtaaatgaagaatgtacagtagaagaactgggaggtgcgaaagtgcatgccaccaagagtggtgtgacacattttacttatcaggatgaaacttcctgctttgagggagtgaaacagcttctgtcctatctgcctggcagctatctggagaagcctccggtaaaggaactggccgatgagaccaatggaaagaaatcactgctgtatgcactgaatacactggtcagaggtaaaaagatggatacccaggactattgtggagaactggtggatattgtgccggacaattccagaaaggcatatgatgtgctggaagtgatcgaatgtatctgtgataaggacagtttcctggaagttcagaaggattttgcaaaaaatattgtagtaggatatgcaaggatcaatggagagagcgttggcatcgtggcaaatcagccgatggtgctggcaggaagccttgattatgatgcatccgacaaagcggcaagatttatccgtacttgtgactgctataatgtaccgttggtagtgctggtagatgtacctgcatttatgccgggaactgcacaggaacataaaggaatcatccgccacggagccaagatgctgtatgcattttctgaggcgactgttccgaagatctctgtgattatgagaaaagcatacggtggtgcttatattgccatgaacagcaagaacatgggagcagatctggtctatgcctggccgggagcagagattgctgttatgggagcagaaggagctgttaacattgcgttccgtcgtaccatcaatgaatcagaagacaaagaagcaacacgagcacagcttgttcaggaatataaagacaagttcatgaatccatatgtggcagcatctcgtggatttgttacggaagttattcgtccggatgagacaagaagccgtctgaaagcggcattaaaaatgctcaaaaacaagcaggtagcacctgttccgaaaaaacatggaaatattccattgtaaaagagtggaaaaaattggcataaaagacataaaaattccatataaagatgttttgtgtaataaaataattctcaaaaattaagaatatataaaaaaaataaaaaaacaaagaaattatattgtgcaaatgtgacaataggaactgagcacaacctgtggtatactacattagacagcataggaagaaaggaggaaaaaagatgttaaaggatttgacaagtgagaacctgatccgccttaatatcgaagctacagactgggaagatgccgtacgtaaagctgcgcagccgcttcttgaggctggcaaagtaaaacagtcctatatcgatgatattatcgttggagcaaaggaatctggtccttattttgttcttgcacagcatgtggcactgccgcacgcaagaccggaggctggcgcacttgagagtgctatcggcgttgcaacacttgctacaccggttgagtttggaagcgaagcgaacgatccggttaagtatctgttctgtttaagcgcaagaaacaatactgagcatcttgacgccctggcagatctggccgagagactggaagaccaggagttcttcaaaatgttggatcaggcaaccgacccgaaagaggttctggattacctgagcaagtagtatctacaaaacaaattaatcaaggaggattggattatgtacaaagcattagtttgctgccgtgcaggcatgggttccagtatgctgctcaagatcaaagctgatcaggttatcaatgagaataacttcccgatcaagactgagcatggcaacctggattctatcgtaggtttcactggagacctggttatcactatggatgacctggctggagagctgaaggacaaagttccgtatgcgcttggtatccgcaatatcgtggataaagcagagatgaaagcaaaactggaagagttccttgctactaaacagtaatcttatttttgaatgaatacggcggcgcatcaggcgctgatcgtgaatttatgttaggggagaaaatttaatgttagatgcaattttagcacagtcacgtaatacggctcttattatgggtcttgttgcactgatcggtctgcttcttcagaagaagagtgcagtagatactatcagtggaactgtaaaaacagttattggattcatggtattcaatatcggatccaatgcaatgtccgcagtagttaatgattttacaaccctgttcaacaccgctttcggtattgcaggtgttaccactcaggttgagcttgcaactgctctggctctggatacttacggaaccgaggttgctctggtatttgttatcggatttatcatgaaccttgtatttgcaaagttcacaccgttcaaatctattttccttaccggacagcacttcctgtatttcgcatgcgttatcgctctggtatttatcgctaacgatatgccgatggctgtaaccgtagtagttggtggtatcctgcttggtttctgtggtgctgcactgccgactctgtgccagcgcttcatgaaagatctgaccggcgctgataacttgtctatgggtcacttcaactgccttggatatgcattctccggatatgtaggattactgttcgagaaagctggcggaaacaaagagaagagtgatgcaagcaacgtgaatatgccgaaattcttcgagctgttcagagacttcgtattctctgtagctctgttcatggtagttctgttctacatcgcagtaatcgcttgcgttgtaaacggacatatggatgttgttcttgagaaatccggaaacaatatctggttcatctatccgttcctgcagggtctgcagtttgcggctggtatgagcgttcttatttatggtgttcgtcagttcatcgcagagatcaccgcagcattcgttgcaatctctgagaaatacatcccgaactccaaaccggcagttgattgtccggctatcttcccgttcgcaccgactgcagtattgatcggttttgttggatctttccttggcggacttgttgctatggctatcatggttgctatgcacagcagcactatcatgattccggcagctggtatctgcttcttctccggcggtacttgtggtgtattcggaaacatccatggtggatggaaaggtgcacttgttggttcctttatcgtaggtctggctctgaccggtctgcctctgattctgtatccggcatttgctgctctgggaattgctgatgcttccttcccgaacgttgactacaacattctgggtgctgcactgaacgcaatccttggaatctttcactaattaaaacatttgggcgggggaaactagtttttccctgccttttttagcgagaaaatgatggaactcaaagagttatggcttaaacaaaaattaaaaggtgtgtttgttcagacggtggacagtcctgccatgccgctgattgcgcagcaggctggaatggatttcatcttttatgactgcgaacatggttcttttacgtacgacaagctgacaaacctgatcctgcttggaaatggaagaggttttccttctattgtaagagtggcacagcttgcgcgggctgacgtgtctggtattctggactgcggagccagcggagttatggtacctatgatggagacaaaagagcaggcagaacagtttgtgggctggagtaaatatccgccggaggggatcagaagctattctggtggacctcatacggattttggtccgagcggaaaccatgagcgccgtatgaaagagatgaatcaccgtacaatgacgatcgcacagatcgagactgtcaaaggtgtcgaaaatgtagatgagatcctcagcgtcaatggtattgacgcagcaattgttggcccgtgtgatcttggtatttccatggggaatccagataatgtcatggacgaacgggaactggcaatgatccagaaagtagcggactcctgcagaaagcatggaaaagcatttggaatcattggaggaaatcaactgctcaagcatttttataaagatgtcaatattctggtttcggcaattgatgcccatatgctcagagactgcatgaaaaaagcggtagaagagtataacaatctgggagaatgacagaagaaagggacttattatggcaacagatagagaacagatcaaagaatttcttgatattgcttctgaacagatgaagatctggatggacagtattgatgtagaagctctcagcactgcaaaaaaactgatccttgatgcagaggcaaacaaaaatcgcgtacacgtaacaggtattggcaaaccaggccatgtggcaggttatgcagcatctctgctttccagtactgcaactccggcatatgagctgcacggaacagaggctgtacacggaagctcaggacaggtccttccgggagatgtagttattgcaatctccaacagtggtgagaccatggaactgaaggcgactgtagagactttgaagaaaaacggagcaaagatcttgccctgaccggtaaaccggaatcttggcttgcaaaagcaggtgatgtagcactgattgccggtgttgcacaggaaggggactctatgaacaaacctcctcgtgcatctatccttgttgaaatcatgatgctgcagtgcttaagcattctgcttcagaatgagaaacatcttgatccgaaacagtatgtgaagtggcatccaggcggatctttaggaaagagcatcagagaaggggaaaaataattatgatgaaaatggaaggcattatcactccaatcgtcacaccattccatcgtgacgcagagcagagcattaactatgaggcaactgaaaagctgatcaaccacctgatcgagcatggtgtaaacggtatcttcatccttggaagtaacggtgagttccatgtgatcgatgaggacgagaagattgagatgaccaaacgtgtggttgagatcgttaacaagagagtaccggtatacgtaggaaccggatgctgctctaccagagcaaccgtacgtctctcccagaaggtagaggcagcaggagcagatgcactttctgttatcactccgtacttcctgaaaccgaccaatgagaacctgtacgctcattacaaagctgttgctgagagtgttaatattccgatcgttctttacaacatcccgaaggctaccggctgcccgcttgatccggaactggtagatcgtctggctgattttgataacattcaaggtatcaaagattccagcggagagattgacagactgcaggcttatgctgagatcagcaaacgtaaagagcttcagcttctggtcggaagtgattccaagatctcttatgcatatggcctgggtgcaaccggtgctgtagctggaaccagtaacgtaatcgttgacactctggtaggtcttgacaaagcacttcgtgcaggtgagactgagaaagctgagaagcttcagaaagatattgatgttctccgtggcgtcctgaaacttggaactgttccgagcgttatgaaacgtgcaaccgagctggctggcatcgctgagattggtccggcaagaatgccggtacaggagctgagcgctgctgacgatgagaagatcaaagagatgctgaaatattacggtctgtaagctgaaccaaaacaaaaagtaaggaaaagaatataacatgagcgactatgtagtaattgaagaagaccgcgtaaagctggcattgtataccgcaggaaatctgattctgacacttgtgctgatgtttatctgtgcagagttcatgaaccgcatcttctatctgggtgtgtttctgggtgcaacaggtatctggttttctgtaaagtatatgttccgctatgggaaaaagctgtttgcaggaacgccagtgtgcgagtttaagaaaaaagagcttgtgattcattcccttcccggtaatgcagtgaccatgcagtacagcaagatcaaagaagttaaagtacttcgtgactggaaatctgtgaagatctttattgcttccagcgaggtgaaacatccgtccggctggaactatgtgggggtcatctggcctttccgcagaaatgagttggccaaggtggaggcagaagtgatgcaggtactttccgctcacaggcttaaagtagaaaaagtagagaaaaagtaggaggagctgttattatgcagaaaatcgaagtaacaaagagaattgcagacactggcgcaatggcaattgtacgtgtgaagacggtagagagaggatttgagatcgctcagggatgcctggacggtggaatcgactgtctggagatcagctatacccttccgaatgcaggtgaggtaattgctgcacttcgtgagaaatatggtgacaaactggtagtaggtgctggtactgttctggatgctgagaccgcaagacatgcaatcctggctggtgcacagttcatcatcgctccgaacctgagcaaagaagttgccatcgtttgcaaccgttatcagatcccgtatgcaccgggctgcacaagtgtaactgaggctgttaccggtcttgagtacggtgctgcatttatcaaagcattcccgatctctgacttctatggtccgaagatggtatctgtattcaagactccgatcccgttcatgccgatcctggcttccggcggaatcactcttgacaatctgaatgattatgtaaagagaggcgttgactgctgtggattcggtggacttcttacgaaaggaaccactgaggagatcgctgctaacgctaagaagatcaagactatcattgatgagactcgtgccgctatgtaacgagtgcaagtgagtcaatgtgcttgcacatttgacgaacgacgaagttactgagtgagctatgctcacgatgtaatacacgcaagataatatcaagcggtaatattgatatgtttatacaaaaattccgcaggtatggaatttcccgtacctgcgggatttttttgcatggaaacttcattgaaaaaatagagcggatatgatagactgctacaggaagattacgaaagaacagaggatttttatgagtatattaaatgtagagcatttaagccacggatttggtgatcgcgcgatctttcaggatgtgtccttccgcctgttgaaaggggagcatatcggtctgattggtgccaatggtgaaggaaaatcaactttcatgagcattatcaccggaaaactgcagccggatgaaggaaaggtcgaatgggcaaaaaatgtccgtgtaggatacttggatcagcatacagaactgaaaaagggaatgactgtaagggagactctggcctccgcttttgcatttctgtttgatctggaagaacagatgaaccagatgtatgataagatggcagatgccacagaggaagagatggcttcttatatggaggagactggattgatccaggaacttctgtctgcccatgatttttatatgatagatgcaaaagtagaggaagttggccgtgcacttggacttgcagaagttggtctggacagagatgtgacggagttaagtggtggacagagaacaaaggtacttcttggtaaactgctgttggagaagccggatattctgttgttggatgagcctaccaactatctggatgtggaacatattgagtggctgaaacggtatctcaatgattatgaaaatgcatttatcctgatctcccatgatattccgttcctgaacagtgtagtcaacctgatctatcacatggataatcagcagttgaatcgttatgtgggcgattatgacaagttccaggaagtctacgcagtgaagaaagcgcagctggaggcagcctacaatcgtcagcagaaggagattgcgcagttaaaagactttgttgcgagaaataaggcccgggtttccacaagaaatatggccatgtcccgccagaagaagctggataagatggatgtgatcgagctggcagcagagaaaccaaagccggagtttcattttaaagaagcacgtgtgccgggcagatatatttttaagaccagtgagctggtgatcggttatgatgaaccgctgtccgttccgctgaatgtggagatggaacgaggagaaaaactggtgcttacaggagccaacggaatcggtaagacaaccctcttaaagagtatccttggactgattccggtgctgggtggcagtgtggagctgggtgactatctggagatcggttattttgagcaggagatgagccaggatattgaaactacctgtctggaagaactgtggcaggagtttccggcatacagtcaatatgaggcaagatctgctcttgcaaaatgtggattgaccaccaagcatattgagagtaaagtaagggtgttaagtggaggtgagcaggcaaagcttcgcctgtgcaagctggtgaaccgtcagagcaatctgcttgttctggacgagcctaccaatcatctggatgtagatgctaaagatgaactgaagcgagcactgcaggagtatcgtggaagtattttgatggtgtgccatgagccggaattctatgaaggactggcaaccaaggtgtgggactgcagtaaatggacgacacgtgtgtaggtgacaactgcagacagatgaaagaaaaaatgggaatgaacgagaggagtgcatcaatatgggaactatttcatatggaaaactggtgatcataggagcaggaaatgtaggaagtgcgatcttgaattcagtgcttcggatgaatattctggatgatattgtggtagtgaaccgcaatcagaagaaagcactgggagaggtgctggatgccagccataccactgcatttgcgtacagtgccaatgccaatatccgtgtgggtggctatgaggagtgtgcggatgcgcagatcattgtgatcactgcaggtccgagcattacaccgggaaattccagagaccgcatggttctgctggagaaaaatgtagatgtaatgaacaatattatggaacagattacccgttacacaaaggatgcgatcattattgttgtttccaatccactggatattctgacttatattgcgcagaagaaatttgattacccggcgaacaagatattcggaacaggaactctgctggatacagctcgatttaacaagatgctgggtgatctgtgtggtgtggatgctaaaaatgttaccggatttgtgctgggagagcatggatcgacctcttttattccatggaacacagttaatattgttggggttccgttcgatgaattcgaaaagcagtttgaactgaaagaaaagctggataaggagaagcttcttcatgatacaaaggtgatcggactggatattgtagaactgaaaggttacaccagttctggtgtggcattaagtgcctgccgtctgatcggaagtatcgtccgtaatgaaaaatccgtggttccggtgtctacggtggtatccggccagtatggaatgaacggcgttgccatgagcctgccatgtgttatatccaagaacggcattgatcggatcctggaggttccgttggatgaagagggaaaacaggatctggagaaatgctatcattacctgaaatctacgattgaaagtgtatatacggaataaatgattcatatgagcgaaaaaatatcgttctatgcactgggcaagtgaaaatggttcgtgcataaaatgaaatcgattcattgacaaatgaaaatgggtggagtattataagcatcgttatatggaacttcgcaatgacgaggacgagtaactggaaggaaatctacagagagctgcgattggtggaatgcagtgaggaagcttcagtgaaaatcacctctgagcatctgagtcgagaagcaaaacaaaaataccgcgtagattcagacggttgacagtcgttattctgtcgctcattataagatgagaaacgagtggtcatgaaaatgacaaaaagagtggtaccgcagaggatagaaacctttgtctctttataggggcagaggtttttttatgccggaatgtgaagaagcatatacaaatagggaagagaaagaggagactgaaatgaaagtacttaagaaaatcaccgattttgtaagccgttatatggctgccatcgtaatcctgatggctttggttgcattatttgcaccgtcaactgtaagctttatcaaaacaagctatgtaaacacattacttggaattgtaatgtttggtatgggactgaccctcaaacctggcgactttaaggttgtgttcagccgtccgaaggatgttatcattggatgtgttgcacaattcaccgttatgccactgctggcatttggtctgacaaaagtatttaacttaagcccggagctggccgttggtgtgatcctggtaggtacctgcccgggaggaacctcttccaacgttatgacatacctgtccaaaggtgatgtggcactgtccgttggtatgacctctgtatccactatcctggcaccgttcctgactccgcttctgaccaagctgtatgccggacagactgtagatgttaacgtagtaagcatgttcatatccatcatcaaagttgtgatcgtaccgatccttcttggatttattatcaatcatttctttaagaaatttacagaagctgcagttgaggtccttccattgatctccactacggcaatcgtggcaatcgtagcagctgttgtatctgcaaactctgcaaagatcatgacctgtggtctcctgatcatcggtgtagtgattctccacaatgtacttggctatctggttggttatgcagttggccgtgtgctcaaactggatgagagcaaatgtcgtgcaatctctatcgaggttggtatgcagaactccggtctggctacttcactggcaaccgtacatttcgcacagtatccgctggcaaccattccgggagctgtattcagtgtatggcataatgtatccggtgcaatccttgcaaacttctatgcaagaactgctgagaagaaaaatgcataagtaaaaagaaagaaaagatctgcattgtgagagcattacaatgcagatctttttttgtagtgcggaaaatatgcgctgcatcttccgttgtgcatacagcgataacatgttataatttttaaaataatgagctactataataaaatcgtggaggatataacatggcaaaacaggttgacattgtagcactgggagaactgctgattgattttacagaagcaggacagagtaaagacggaagaaggttgtttgagcagaatccgggaggagaagaagtggaaaaacaattggaagaggtcactgcatgaacgaattatatgaagcgatcgaactgaaaataaagagttccgggtatccacggaaaatttccggtgcggatgtgtacaatgatatttgcgatcagatcgaaggaaaagagaatggaacctatcttctgttatctaagtttgaagaagatgtggtctttgagtatcatatcacgattcaggatgagaactttaatctgggcatcctgaccatgcgcacaccggaaggtgtgtttgaagtagattttgatgcagaatagctatagagaaaatgataacgactaggaggatagaacatgagaattggtattttaggatatggaaatcttggaagaggcgtagaatgcgcgatcaagcagaatccggacatggagcttgccgcagtgttcaccagacgtgcaccggagaaggtatctattctgacaaagaatgcagaggtttgttctgtgaatgatatagaacagtggaaggataaaattgatgtgttgatcctctgcggtggaagtgcaaccgatcttccagaacagacaccaaagtatgcagagttatttaatgtggtagatagttttgatacccacgcaagaattccagagcatttcgatgatgtggatgcagcagcaaagaagagtggtcatatcggaatcatttctgtaggttgggatccaggtatgttttcactgaaccgtatgtatgcaaatgcaattcttccagaaggaaaggattatactttctggggcaaaggtgtcagccagggacactctgatgcgatccgtcgtgtagagggagtaaaagatggcaagcagtacaccataccggtagagtctgcgctggaggcagtgcgaaatggagaaaatccggagcttactaccagacagaaacataccagagagtgttttgtggttctggaagaaggtgctgatgcagcaaaagtagaagaaaccattaagactatgccaaactattttgcagattatgacacaacggttcattttatcagtgaagaagaactgcagaagaatcacagcggaattccgcatggcggttttgtaatccgttccggaaagactggttgggatctggagcacaatcatgtgatcgagtatagcctgaagttggattccaacccggaattcacttccagtgtgatcgttgcctatgcaagagctgcatatcgtctgtatcaggaaggacagagaggctgcaagacggtatttgatattgcaccggcatatttgagtgcaaaagatggtgcagaacttcggagaacacttctgtaaaacacttgttttcaatagggggtataagatgaaccaagttaaatggggcgttatgggaacagcatacatttttgaacgtgatactgcgaggggaatgtcacttgcggataattgtgaattgacagcgattgccggacgaactctggaaaaagcagaagcattcaaagaaaaatatggttttcagagagcttacggatcttatatggaattattagaagatcctgaaatcgaagcggtgtatattgcattaccaaatacgttgcattatgagtggacgattcaggcattgaaacatggaaaacatgtattatgcgaaaaaccactggcaccgaccggacagcaggcaagggaaatgttccagacagcaaaagagaataatgttctgcttatggaggcatttgcatatcagcatagtccatatatcaaagaaatctgtgaacttgttcaaaaaggtgcaatcggagttgttcgttatgtagaggctgcattgatcacatcagattatgatcgcagtaatattcgcatgagaaaagaaacatgcggaggaagtacctatgatgtaggagtctatgcgttaagctttgtgcagcggatgctgggcagaaaacctgaaaaattacatgctgtatccagtatttctcaggaaggaattgatatgtacacatcagccataatggaatatggggatggattaaaagcacatattgattgtggaatggtactggcaacggaaaagaatcaggcactggatcgttttcagatacatggaacggaaggatgtattacttcagaagtattcggatttaatgtaccgggagaattgacctatcgtgttcatatatttaatggagaggacaaagtaaaaacagtgcaagtaccgaacaattattgcctggaagtggagcagtttggccgctgtatcaaaaatggagaagtgccttatcttacagaaaaattcagtgtagatatggcagacacggtagatgaaatattaaagcagattggctactaaacgtataacatatgaatgccgcaaggtccaaggatcttgcggtaatttttttgaaagaaactgccacctccatgcatatgttagatgtaaggccttaaggagagaagatatatatgtcgaaagaagaatttgcagtttttgccggagagtacatggacatgatctatcgggtggcatatagctggacaaaaaattcccatgatgcaaatgatgtgacgcaggaagttctgatacaactgtacaagacgacgaaggaatttgaatcagattcccatatgaaaaactggctgatcagagtcacggtcaatcaatgcaaaatgctgtttcgttccccgcggaatcacatggaagatattgaagactatgcggagacactggggtttgaagataagagctatctggatctgttctgtgcagtgatgaagctggacaagaagtatcgggtgccactgttgctgttttattatgaaggatattccacgcaggagattgctgatctgttaggtcttcctggaaagaccgtcagcaccagactttcccgtgcaaaaacaaagttaaaagcatatctgaaggaggagtaacgggatgacagacagagaaaaatttcagaagacattcagcaaattgcatgcttctcctgatttgttgacggaggtaatggagatggcagaaaagagaagatatcatattccgaaggtagctgtggcagcgattgcatgtgtggttattctgggatccggaacggcggcctatgctatgaatgtgggtggaattcagagaaccattcagatctggatccacggagatcagaccgatgcacagtttgtagtggaggatggaagctatacacttgattatgaagatgagaatggcgaagcagtgcacagaggtggaggcggcgttgccattgaagacgatggaactgagcggtcactgacagaagaggaactgatggaagagatcaacagtccggaagtggagtatgaggaagacggcagtgtatggatttactacaaaaatcagaagatggacattactgacaaatttgaagatggcgtctgctatgtggaattgaaagatggagacacgatccagtacatgaccgttaagtatcagaacggatatgcattgagtccggaacgttatctgacaccggcagaatttaactaagattgtccttgtgaaaactttaaaatatcggtatactagaggggatattttaaacagatggaggatcacagcatggataacatgacaggacgtaacgtaggaaaaacctgccgtacacattacagaggaacttttaatgatggaacacagtttgattcatcttatgaccgcggagaaccgttggagtttgtctgcggcgcaggtcagatgatcaaaggatttgacgcagcagtagcggatatggaagtgggagaggtaaaagagattcatctgatgccggaagaagcatatggaatgccgaatccagaagctatcatcaaggttgagattgctcagcttccgggttctgaggatcttcagatcggtcagcaggtatatctgagcaaccagtatggtcagcagtttccggtgaaagtaacagagaaggatgagaccatgatcacctttgacgctaaccatgagatggcaggaaaagagctgaatttcaagattgagcttgtggaagtaaaatagtttctgaaaatctggacagactacactgcaaaggatgtaaaagcagctacatcagcaggaggcagtcatgaaggaaaagaaaaagacaaaccagcagctcattga

SEQ ID NO: 1370 - DNA, 19973 bp, Unknown
  16S sequences of unknown bacteria
ggaggcgggcctgccggcgctgtatgattatctgagccaggccgggatccgcatgaaggtgaagatggaacgcgcggagaacgggaatgacatccctgccgtgcaatgcgccgcatctgccaaagagcggccgcctgaaccgcagccggagcggaaaaagtatcgccgcaagagcgtcaagccggaagatcatatcgcgctgccgatccgggatcttcaggagggcatgtctgatgtgatgatcaagggccatgtcttccagagcgaattcaagacgttcaagaccggcaaaggcctgcagacgctgtatgtcagcgatgatgatgaggcgatcatcatgaagcgctttgagcgcggcgcgatgagccgggaagtgctggaggagatcaaagaaggcgactatgtggaagcgtacggcagcgtggtcaacgacgatttcctttcggatatcgtatttatgcccaacctcgtcaaaaaggtcgatccgcccgccgtgcgcaaggatgacgccaaagaaaagcgggtggagcttcatctgcacaccaatttctcagagatggacggcgtgtgcgacatcgcggagtacatcaggaccgcagacgcgtggggcatggacgccatcgcctgcacggaccatctggtcgtccaggcattccctaaggcgcagtccaccctggctgcggtgaacaagaaacgggagaagccgatgaagatgctgtatggcgtggagatgaacatggtggatccggcgctgcagatcgtttacaatgccaatgacacggtgctggaggaaggcacatactgtgtattcgacctggagacgaccggattgtcctcgcgctatgaccatatcatcgagtttggcggtcagatcgtggagaaccgttcctgcgtgaagagcctgcagctgttcatccgtccgccccagcagctcagcggctttacgacagagctgacgggcatcacggaaaaggatgtggaaaacgcgccgacatttgaggaatgtgtggatcagatcctcgacttcatcggcgatcatatcttggtcgcacacaatgcgtcgttcgacttctcgttcctgaattcttcgctgaagcgcatcggcagaaagccgttggacaacccggtgatcgatacgctggatctggcgcgttcgctgcaggcggaccgcaaggcctatacgctgggtgcgatctcccgctcttatggcatcacttatgattcggaagtggcgcaccgggcggattatgatgcggatgtgctggcgcagacgttcctgcacatgctcaatgagctcaaggaagtgaagacgctgcgcgagctgcaggatatgcagaatccggagagcttcaagaaggtgcgcacgaagcacgtgatcgtgtttgcgcgcaatcaggcggggctcaaggagctgttcgagctggtcacgctcagccatacgacctatctggcttacaatggcaagacggcgctctccggcgtggcggagccgcgcatcccgcgcatcgagatcgagaagcgccggatgaacggcaacctgctcatcggcagcggatgcgccaatggcgaggtgttcgagatggcccagaccagggacgcggacgtgctggaacaggtgatgcgcttttatgactatatcgagctgcagccgctggaaaactaccggtatctgatcgaccgcaattccatcgtcgatgaggatcggctcaaggagatcctgcagggcatcatcgatatggctgaccggctgggcaagcccatcgtggccaccagcgacgcgcactatgtgcatccgcgacagaagcggatccgcgacatctacatcaattcgcaggcgaccggcggcgtccggcatccgctgtatgtatacaatgcccagcgccgtcatcataccatcgcgccggatcagcacctgcgcacgaccggggaaatgctcagcgagtttgcctgggtgggagatcgggcatatgagttcgtcgtcaccaacaccaggaagatcgccgatcagatcgaagtgatctatccggtcaaggataagctgtatccgccggatatcgaaggctcagaccagaagctgagcgatatctgttatgagaacgccagaaaaaaatatggcgatccgctgccggagatcgtggaacagcgattgaaacgggagctggacagcatcatcggcgccggctactatgtggtctattatatctcgcatctgctggtgaagaagagcctggaggacggctatctggtcggcagccgcggatcggtgggatcgagcttcgtggcgacgatgtccaacatcaccgaggtcaatccgcttccgcctcactatgtctgcccgaaatgcaaatattcgcatttctatacggacggcagcgtgctcaacggatttgaccttccggacaaggcatgtccgcactgcggcacgatcatgcgcggagacggtcaggatatcccgtttgagacgtttttgggctttgaaggagacaaggtgccggatatcgacctgaacttctccggagattatcagccgacggcgcatgcctacaccaaagaggtgttcggagatgagcatgtcttccgtgccggaacggtcggcacggtgcagacgcagacggcattcggctacatcaagggctatgaggaagcgatgggcatcgagggcaccatccgcaatccgaagcgcgtagagctcgctaaggagtgcgagggggtcaagcggacgaccggccagcatccgggaggcatcgtcgtggtgccgctggatatggatgtgcatgattttacgcctgtgcagtatccggccaacaatccgttcgcagagtggaagacgacccatttcgacttccatcagatccatgacaacatcctgaaatttgatatcctgggccatgtcgatccgacggcgatgaagatgctggagcgcatgagcggcatcgatgtgcgcaccatcccgatgaacgatccggacacgatgagcatcttctccagcgtggacgccttgcatatcgacaccagcaagaatacggaagcgaccggcgcggccggcattccggagttcggcacgacttttgtccgcggcatcctcgagctgacgaggccgacgacctttgatgagctgctgaagatctccggattgagccatggcacggatgtctggctgggcaatgccaaggatctgatcgatcagcatatctgtacgctgaaaagcgtcatcggctgtcgtgatgacatcatggtgtatctgctgcacaaggggatgaagccgaagctggcgttcaccatcatggaatcggtccgtaaaggaaaagggctgaaggatgagtggatcccggaaatgaaggcagcgggcgtggaagactggtatatcgagtcttgccgcaagatcaagtatatgttccctaaggcgcatgcggtggcctatgtcatgatggcgatccgcatcgcctggttcaaggtgcatctgccgctgttctattactgcatgttcttctcgatccgctgcgatggctatgacatcgagacgatgatcaagggcgaggcgagcatccggatgaagatggatcagatccgggcgctgtcgcacagcaatgaacgcggcgtgaagccttccaagaaagatcaggatgtatactccaccctcgagcttgcgctggagatggtattgcgcggctatcggttctccaatatcgacatcaaccggtcggccgccgcagaattcatcgtagatccggatgataagaacgccatcatcccgccgtttacgagcatcgacggcctgggggagagcgtggcggagtccatcgtcagggcccgtgaggaagcgccgttcctctctaaggaggacctgctcaagcgcacttcgctgagcctgacgctcatgaagaagctggaggcgctcggttcgctggatggcatgcaggaagaaaatcagatgacgctgttttgatcatgatacacttcgctgaagatgatccggatgagggatcatccctgaggcggggtgttttttttgcctgatgcggcaaggaaggaaaaatgaaagggctggcagaaaaaagcaatgacaatttcgcttgaactgctctggaatggctgtacttttgaaatcaatttcaatataatagtacggaaaaggagtggaaaagaatgacttttgtaatgttcctgctggggcttgtcccgatcctgtggatgatcctggcactgatcggcttcaaatgggccggctataaggcgagcatcgtcgcgatgctgctggctgcggtcctttctgtcaccgtctggaagctgccgctcatcgataccgcgacggctgcgctggaaggcttcgctatggcggcatggccgatcatcctggtcatcatcgccgccgtctttacatataacctgactctgcgcaccggcaagatggaggtcatcaagcggatgatcaccagcgtgtcgagcgacaagcgcatcctggtgatcctgatcggctggtgtttcggcgggttcatggaaggcatggccggatttggcacggccatcgctatcccggcgggaatgctggccgggctcggatttccgccgctgctcgcctgtctggtctgcctggtcgccaatggcacgccgacgccctttggctccatcggcatcccgaccgtgacgctggccaacctggtcggtctggacaatgcggcgctggcgttccccgagacgctgcagctcgcgccgctgatgctgctgtccccgttcatcatggtcatgatcaccggcaaggggttcaaggccttgaagggcgtcagcctcatcacgctgatctccggtctgtcgttcgtcctgccgcagctggcggtgacatatttcgtcggcagcgagctcgccgtcgtggtcggttccatctgctcgctgctggtgaccatcgccgcggcgatgctgcatgagcgcagggcttccgctccaacggaatatcggatggagatgccgaagagcgatcattcgctgacggtcaaagaggcgctggtcgcctggtctccgttcatcctcgtcttcgtcttcctgctgtccaccagcaagctgatcgcgccggtcaacgcattcctcaatcagttcagtacggcggtgccgatctataccggggaaggggccgcgccgtataccttcacgtggatcaacacgccgggcatctggatctttctgtccgcgttcatcggcggcttcatccagcgggcaacgctgaaggagatgctctatgtgctgaaggcgacactggtgcagatgtccaagacgatggtgacgatgctgtgtgtgctggcgacggctaagatcatgggctattccggcatgatcaccagcatcgcgaatatgttcgtgctcacgcttggttcgctgtatccgctggccgctccgctgatcggcgccctgggcacattcgtgaccggcagcgggacgagctcttcggtgctgtttggcaatgtgcagctgcaggccgcaaacgccatcggcgccaatgcgtattggatggtcgcgctcaacagcctcggcgtggcagccggcaagatgctggcgccgcagagcatcgcgatcggccttgtttcggtcaacgagagcgggaaggacggcgagctgctgaaaaaggtgctcccgtataccgtgctctatctggtgatcatggcattgatcgcttatttcggccttccgctgtttgaatcattgcatctgttttcctgatcatctggcacagtcttcggattgtgccttttctttttgcgctctgcaactttgtcttctgcttgaatggtcttatatatgcaggggaggagagcttatgcaggagcagatcatcgatggcagatacaggatatgcgggaggatcggccagggcggcatgtcgacggtctacttggcagaggagctgcagacgaaggagcaggtcgctctcaaatgggtcagacgggcgcagatgcggcgcttcgggatcagcgaacaggatgtgcagcgggaagcggagctgatgcgcgggatcgatcatcccgcgctgccgcgcatccgggagcagttcgtcagtgaggagggttgcatcatcgtgatggaccgggtgaagggacggacgctggcggacatcctgcatagggacggcacgctgtctgtgcggcagacgtgcgacctgggcatccgcctgtgccaggtgctctcctgtctgcacgccgcgcatccgccggtgatctatcgggacatgaagccggaaaacgtcatgatcgatgaacagggcggtgtgcatctgatcgatttcggcatcgcctgccgctatggcgaacaggagcgcgatgtccgcttcctgggcacgccgggctatgcgcctgcagagcagctcgccggggagcgatgcgatccgcgcaccgatatctatgcgctgggcaagacgctctggcaagcggcatatggcgcggcaatggatgagcaggcgcaaaagacgaggctgcagcgcatcctggcgcgctgcatggacgaacgcatgcaggggcgttatcctaactgccgtttgctggccaaggatctgcgccggtgcaggcatcgaaaggccatcctgctgagcagggcgctgaccgcctctgtgctgaccgccatgagcgtgctgctcatctggcagggcacaggccccagcgaggacgccgtgctgcgcaagtgccgccgcctgatccaagcggtgcaggcagacgggatatttacgccggaggaagaggaggagctgctggcgtgggtggatgcctgcggatcacagcgcgtacgcgcgcagacatcctatatgctgggagaactgtactggcagatgtatccgggcgcgcaggaagccagcgcatggcagcgaatgaagctggctgttccctggttcgtcaacgcgctggcggatgaagcactgcaggacgatgcccgcgcatatgttgccatagggacgttttatcagcgcgtggcatcggatgatctgcaggcggaggagctttcggccctgtggagacagatgcgggcatcgctgcaggagagaaccggcgatgaggatctgcagcttcagctatgcacggcagtctgcatcatgtgcggggaacacgatgtactgttagcggaggcgggcatcaacagggaagcgcagaaaggcatgcttgtgcgtgtgcaggccaggctggatgagcttcctgcagaaaagacagcggcgctgcgggaacacgcccgcgcgctggaagaagccgcagatgcggcagaaaggaaggatgaatgagacatcagctttggaaagggatcgcagccggcgtgctgctgctgagccacagcggcatcatggcagaagccaaggaagccgagccgctgcagatcctcgaggtggacatgcagcatatgggagagccatggcagaatgaggaatgggtaaatgatccggtcgtgatccgggtgaagaccaaccggggagaggatgtgcagctgggctgttccaggagcactgatccgccgcagctatggcatggatcgctctgcctgcaggaaggcggagactggttcttgttcgcgcgggatgaggagggggaggtctcagcaccgctgctgcttcaggacctgcgcatcgatggtgaagcgccggaatacggatgggagaatctgatcgtggagcgcgactggaagacgcagaccggcagcttccgccgcgaccttgcgcgcgatgccgcccagggcatcacatcgctgcgcatgcgcaggagcgatgaagcgtggcaggaggtaggagaagagacggtatatttccagggaaatgaaatcattacctttcaggcggaggatgcggccggcaatgtgagcgagacgacgctgacgttttgcagcgtcgatgatcaggcgcctgagctggacatctcgtttgcccagccgcagatcagcgccgtgccgcagcaggctgatatcgttttgcgcgatgcgcatcccgatgagaaagcgggatatgcgctgctggagaaagacggcgtctcgcagcggatcgatctgtgctggcaggaatgcgcggacggcctgatggcccggctgcatgtggaaggggaaggcagctatcgcttgacggtcatcgcggcggaccgttcgggaaatcaaagcgaagagacggtgtcgttcatcatcgatgagcatgcgcccatcatcgatcatcagcttgctcagcagcgcccatcctgcgatggaccgctccgtctgaagatccgcgtaaaggaggagaacttttgcgaaacaggggtctctttgctgggcagctatgcggacgtgccgctgacctggacagaagaagacggctggcatgccgccgaactgacgctgacgcaggatggccgctatgaaggaaaggtcatcgtccgcgatatggccgggaatgtcaaagagcatgcgcttccttcgcttgtcgtggatacgcagaagcccgtggtccgcatcgaaggcattgatgaacggccgtacgctgaaggagtgatgaacgcgcaggtgacggtcatcgaggacgatcctgatctgcagagcatcgacctttgcatcatcggcagcgacggtcatgtgcagacggtgcgtccgcagatcataagccaggcagacggattatgcctgaaggtctctgacctggacagccggctgcttcaggatgatcgctatacgctgcgtgtctctgtgatggatcaggcgggaaaccaaagcgagcaggaagcctttttccggatcaaccgcttcggttcgctgttttcgatgtccaaaggcggcgaagaagagccgctggtcatccaggagcgcaatgtcgatcagatcgaacaggtgcagatcgtcctgcgcatgaacgatgagctgaaggtgctggaagagggcagagactatgcgctccatcatgcgctgaacgcgtggaatgaatatgcgtatgtgctcgatcccgcgctgtttcagcaggatggaagctacagcgtcagcgtgctgtctacggatgcggccggcagctgccgatgcggttcaccgtggacagacagccgccgcagatccgctcgctgggcgcagaggacagcggcggggagaagaagctgaagctgatgatcaccgacgccttcgatgtgcgggacatccgggtcacggtcgatggagatcaggcgtcctggcataagcagggcggcgtttactatgtcacgctgccgaagatgacgcagggcgcgcagatccatgtggaggcggaagatgtcaacgggaacgctggacggctggtgatcgatggagcggacatcatggaagaggaagcaggaagcggatgggcgctgcctgtgctggtgaccatgaccgcattgacagcgcttgcatatgggatgaaaaaagccaggaagctgcttttgtttccgcatcgattctgataaaatggtgctgttagagaggatgatgatggatgtgggcatacgaaagtgtgttttatcagatttaccccctcggattctgcggcgcgccatttgagaatgacggctgtctctgtcacaggatccggaaagtggaggattggatcccgcagctgaacaggctgggcgtgaatgctgtctatttctcaccggtatttgaaagtgatacgcacggctataatacacgcgactatcagaagatcgactgccggctgggcaccaacgcggactttgccgggctgtgccagcgccttcacgcgcagggcatccgggtcgtgttggacggggtgttcaaccatgccggccgcggcttctgggcttttcaggatgtgctggcacatcgcgaggcttcgccttaccgcgactggttctatctcaattttcaaggcgattctccgtatcatgacgggctttggtacgaaggctgggaaggcaactatgatctggtgaagctgaacctggataatccgcaggtgaaggactatctgttttcctgcatcagtggctgggtcagtgagtttgatatcgacgggctgcggctggatgtggcatattgtctgaaaccggagtttatccgggagctgcgcgccttctgcgacgggctgaagccggacttcttcttggtcggagaactgctgcatggggattacaaccgctgggtcggcgaagggctgctgcacagcgccaccaactatgaatgttacaagggactgcattccagcttcaacagcatgaatctctttgagatcatgcattcgctgaagcgccagttcggtcctgaaccatggacgctgtatcggggaaagcatctgctcagctttgtggataaccacgacgtctcccgcatcgcgagcgtgctgcaggaaccaaggcatctgccgctgatctatgcgctgatgttcgccatgccggggatcccctgtatctattatggaagcgaatggggcgcaaagggagaaaagcgcgacggtgatccggcattgcgggtcagcttcgacgcgccgcagttcaacgcgctcagcgagtggatcagcgtgctggccaggatcaagcggcagtcagcggcactgtgctatggcgatttccacgatgtgctgatcacgaaccgccagtgtgtgttcgcacgcagaagcgaagaggaatgcgtgtggacgctgatcaacgcggacagcgaaccgtatctgttccgcaccggagcagcgggaaagcaggcatgcagcctgatcgatgatgcgcgcttcacgatggaggaggaaatggtccttgcgccttacagcgcaaagctgctcaggatcgaggagtgaatgaggcaggagagggactgccaagcgttttccaaagaaaaaggcgggagagatcccgtcttttgtccatttaggcggccgctgaagaacgatcgcagcctgtcttatcgcatggcctcctgagcgatggcatggccgatctcggtatatcggtccaggtcgtcttcgctcggcgtgtagcactgggagagcacggcgtcgctggccagggcgaatccggcatcctgcagccgttcgttgatggtctttacggtgttgccgacccatccgtaggcgccgaagcccagcgctttctttcccttgatcttgcatgacgcaagcttgtcgatgaatccggcgatctccggggacatcgcgttgttgtagcagccgctgccgaccaggacgacgctggcgtccaggatctccttcatgatgatgctgctgtcggtcactgaatgctggtagaccttgacctccatcccggcctctcccattccttcggccagcgcttcggccatctggcgggtgtggctccatacgctctcatagacgatgacggccttgtctgtgctgcggaaagaggcaaagccttcgtatgcttccaggagctgagggatgtagcttttccagatgatgccgtgtgccggcgcgatcatctcgatttccaggttcatctcctggatctgccgcagctttgcactgacctgtgcgccatagggcatgacgatgttggcataatattcttttgctttgtccaggcagaagctgaggtcatgggcttcatcgaacagcttgaagctgacgatgtgctgaccgaaagcgtcattggaaaagacgatctttgcttccgcgtcataagtgagcatgttgtccggccagtggatcagcggcatctcgacgaatgtgaactgatgcttgccggtgctcagcgtatctttggtcttgacccgattatattccacttctttgaaatactgcttcatcatgttgttcgcgccggcgttggatgcgtagaccttggcctgcggataggcgcgcatgacgtggaggaaaccgccggagtgatccggttccgcatgctgcacgatgatgttgtcgacggggcgatcgccgatcacgctgcggatccgctccagcatctcttcggcgaattcttcttcgaccgtatcaaacagcgtcacttcatcgtctaccaccagataggcgttgtatgtggcgccttcctgtatcggataaaggcttccgtgaaagtgacggttgttgaaatcacggacgccgacccagtaaatatcttctttgatctgaatgccttttttcatctgtttcacctcgccaaacattttattctatctgtgcccaaatgtccattgattttatatttgcgcagcggcttgccggcatgatgaaaaaatgtctgaatatgaaatcgttttctttggattacgcaggaaataggagtataataaaaacagagttcttggacttgaacaggaggtagatctgaaatgattattcaaagcaagagagtctgggtcttggggcagtggcttgaggcgcaggtggaagtggaagaaggcaagatcaaggagatcctgccgtatggttcccgaccggcagacaaggactacggcgacaagcgtgtcgttcctggattcatcgacatccatacccatggcgcttatggatttgataccaatgacgcagaggaagaaggactgcgcaactggatgaagaacattccggaagaaggagtgaccggcatccttccgacgaccatcacacagagcgaagaggtgctgaccaaagcggtcgccaatgttgctaaggtcgtagaagagggatatgagggtgcagagatcctcggtatccattttgaaggaccttatctggatcaggtatataagggcgcacagccggagcagtattgcgtcgcaccggatgtggagcagttcaagcgttatcagaaggcggccaacggcctcatcaaggtcgtgacgatggcgccggagcatgatgaaggcttccagctgctgcattatctgaacgacaccggcgtcatcgccagcatcggacattccggcgcaaccttcgaggaggcgcgcatggccatcgccaacggcgcccgcagcatgacgcacatcttcaacggcatgacgccgttccatcaccgcaacccgggcctgatcggcgcagcgatgcgtttccgtgacacgtacggcgaagtgatctgcgatggcaatcactccaatgtgaattcattgaacaatctcttcatggccaagggacgcgactatacgatcatgatcaccgacgcgctgatggtcaagggacttccggtcggcacgaaggtattgttcggcggcaatgagatcgagctgtatgaggacggcagcgcgcatctgacgagcacgaagggattagctggctccacgctgaaggtgaacatgggactgaaggtcctggtggaaaaagccatggtgccgtgggattatgccatcaactcctgcacgctgaacccggcgagactgctgggcatcgacagccgcaagggtgcgatccgcgccggcaatgacgcagatatcgtcgtgctgaatgatgattattccgtagagacgacatatgcgagaggcaaggtcgtttacgaaaagcaataatcaggatcagacgtatgaaaaggttccgcgaggaaccttttatcatgggggagaggatagagatgatgatcagaaaggccgtgccgcaggatctggatgcgctgatcgcgctgatcgtccggcgcatggcatggatggatgagcagggcatcgagcaatggaacaccggggattatctcggcatttacccgcccgcatattttcttttgcgcatcacttccggcgagttcttcgtggcctgggacgggcagctgtgcgggatggccgctttgcttgagcaggatgagcgatggcaggatgggcttccggcatattatgtgcatcatctggccgcggatccgcgctgtcccggcacaggggccgccctgcttcgcttcgctgaagagaaggcgctgcagaaggggcatggggtggtgcgcctggatgcgcagcgcggcaatgaagcgctcaacgcgtggtatgcgcggcaggggtaccgttatgtcgggctgatgcgtgagggaagctatgaaggcatcctgcgcgagaagaggctgatcagaaatacgtcttgctgaagactgccttggcgatgatgcgcaccggcagagcgcgcacttcatcccgggtgaaatagcggttctccacttccgggttggcggcttccagcaccatcaggtcatctttcaggatgaccttttttaccgtggcttcttcatcgctgatcaatacgacggcgatctctccgctttgcacctgggaacaggcgcggacgaagagcaggtcgccgtcccggatgccggcattgatcatgctgttgccgcgcactttcaaaaagaagtctccggaagcggcttcttgttcgctgacgggttcatagcccagcagctgctgatcggcgaacatgtcatagccggccttgatcgtgcccagcactggcttttccagaaaacgcgcttcttgttcgaggagcgcatcgacatcgtggcggatcagcgcggaaaggcgctgtttggtctctgattggaccgtgcggatctcgccgctggcccaccggcatacggtcgatctgctcacgtcaagctgccgggcgatggcctcataggaaagcccgctgttctgccggtagcgctggatgatctgctgcagtgtcatggtccatcctcctgtctttcattcattatacgacagactcgcgatatgagcaacatcattggtggatttgatcaaatgttgcgtatttgttgcgtaaatggttgaaatcgtcagagaaaagccgtatcatgatgaggaatggaggagagagcgtgagaggatacagacatgatgtgggcatgatcgcggtatgggacaggcgcgggcatctgacgccgctttcgctgatctgggatgatgggacccggtatcggatcgatgcgatcctcgagcgaagggaagtcgtcctcgagcatgaaggcagcgcggtgtgttatcgctgccgcatcgccgggacgatgcgccgcatcttctatgtgcgcgagcgttggttcgtggaaagccgccggcgctgaaaagagcgcattgacggatgatttgatggataatataatgaatgagaccggaaaaggggtgaggatcggatggtgagcgaagagatgaaggcgttctgtcatcagatgatggactaccggctgccgcgctggagcgaactgccgggatttgacatctacatggatcagctgatcacgctggtccgtcagtatctggcgccgttgtttgatgaagaggatgcgatcatcaccagttcgatgatcaataattatgtcaaggccgggttgatcccaaagccggaaaaaaagcgttatcatgcgcagcatatcgcgtcgctgatcgcgatcacgctgctgaagcaggtgctctccatctctcagatcgacgatggcatccgctttcagctggaggatcacagcccgcaggaagcgtatgatcgtttctgcgatgaacaggagaaggcgctgaagatgatcgcctctcaggtgcttgagcggggcagatggagcaggtgcagcaatatctgagcgattttcatgcggatcatctggcggtgcgcctggtcacgctgtcatttgcctctgcgctgtcagccaaaaagatgatggcgctgcgaaagggtctgccggaaacagaagaacagtgacctggatggctgccgcgcgcagatgccgcagcagccttttattttgagcgagggagagtgagaacgtgaaagaagcctttctgaacaggatgcgcgcgtatcttcaggatgaatatgaagactggctggcgtgtctgcaacagccgcggttccgcgggctgagggtgaatacggcgcgctgtgatacagagacctttctgcggctgggggattggccatgtgagcccagccccatctgcccgcagtcattttatgtgacccgcgagcatctcggcctgcatcccctgcatgccgcaggggcattttatctgcaggagccaagcgcgtccagcgcggtggaggtgctggatgtgcagccgcatgactgggtgctcgatctgtgcgcggcgcccgggggaaagagcacgcagatcgccgccaagctcgatcacaccggctttctcctcagcaatgagatcgaaacgaagcgcgcgcagacgctgttatccaatatggagcggctgggcttttcagaatatgccgtaagctgcgccgcgccggcgcaagtatgcggcgagatggccggctgcttcgaccgcgtgctggtcgatgccccatgcagcggagaaggcatgttccgcaagcatgagcaggcggtggaaggctggagcgaggaacacgtgcgcttctgcgccgcccgtcagcgcgagatcctcgcctgcgcgcatgaggcgctcagggaaggcggcatcctcgtctattccacatgcacatacgcgatggaagagaacgaagagacggtgaaggcgtttttggagcggtttgacgacatggagctgatcgactgcggcatcagcttcggccgcccgggactgccgctggatgactttgactcttccaaggtgcgccggatcttccccatggacagaggagaaggccacttcattgccaagctgcggcgaaaaggcgatgcgccgcgccgtgcgcgcaaggaagaaaaggacaagcagccggatccctgcgtgcaggcattcctgcaggatcagctgagcgatccccgcatgcatctgctcgttcagggagatacggtgctgggcagaagacagccctttgtccgcttgggcaagatccgcgtgctgcgtcagggcatccgtttgggcgatgtggtgaagaagcgctttgagccgcatcatcatttttacatggccgcggtgcatcagccgctattgcggcatgtccgcgagctggacctcgcgcagagcgaacagtttttgaagggtcatcctctgcctgatcctgcacgcggattcatctgcctgcgttatcagggattcccgctcgggttcggcaaaggggatggcaattggatcaagaaccgctaccccaaagggctgcggcagatgggcaggtgagatcatgttggtcagtgttgagcatctgagcaagatgcagaatgtcagagcgatcgtcgacgacgtcagcttcgccatcgaggaaaaggaccgcatcgcgctggtgggcgtcaacggcaccggaaagagcacgctgctgagggtcattgccggcaaggagaaagcggacagcggcacgatcacgtatcggcgggagctgcgcatttccatgctggatcaggatccggtattcgacgcaagctccaccgtgctggacgccgtgctcgctggtgcggatgatgtcagcgcatatgaggcccgttccatcctgaaccggctgggcatgcgcgatatggaggcagagatcggcatcctctccggcgggcagaaaaagcgggtggcgctggccagggccttgttacggccctgtgatctgctcatcctggatgagccgaccaaccatctggatgcacagatgatcgaatggctggaaaggtatttgcagaaacggacgtcggcgctgctcatggtgacgcatgaccggtatttcatggagcgcatctgcacgaagatgatggagctgtcccaggcgaggctctacacgtatcaggccaattattcggcctatctggaggcgaaggcagagcgtctgcagctggagcagagccgggaggccaagcggcgcagcttgctgcgcaaggagctggaatgggtgcgcgccggcgtgcaggcccgttccaccaagagccgcgcccgcctggagcgtttcgaacagctgagcgcggtccgctcaccacagcaggaaggcagcgtggagctcaatctgcgttcttccaggctgggaagaaagacgatcgaatgcgtttccctggggaaacgctatggcgatcatgtcctcttcgaacacttcagcctgcagttcaagcgcaatgagcgcatcggcatcatcggtgaaaacggctgcggcaagacgacgctgctgaagatcatggcgggagaatgcgcgccggacagcggcgaggtcatccgcggagagacggtgaagatcggcttcttccatcaggggcatgatcagatggacggcgccatgcgtgtcatcgattatatccgcgaggtgagcgatcagatcgagaccgcgcagggcacacgcacggctgcgcagatgctcgagcagtttctgttcgataaaaacctgcagtataatacgatcggcaggctgtccggcggggaaaagcgtcggctgtacttgctgcgggtgctcatgagtgcgccaaacgtgctgtttctcgatgagcccaccaacgatctggacatcacgacgctgacgatcctggaggattatctcgatcagttcccgggcatcatcgtcaccgtctcccatgaccgttattttctcgaccgcatctgtgattcgctgctcgtcttccgcgatcatgtgatcgaaaagcacatcggcggatacagcgccaacatggaacagctgtacagcacggcctcagcgccggaaaaagagcgtgaaaagccgaggccgtcttctgcgcctaagatgagcacccgggagaagcaggagctcgaccacatggaagcggatatcgccgcgctggaggagcagatcgcgcagatcgatgcgcagatgcaggcgcataccgattttcgcgagatcgaggctctgtccgcgcagcgcatggatctggagcagcagatggaaggaaagatggaacgctggatggagctcagcgaacgcaaggcgcagatcgacgcctattaccgaaaataaaacaagcagagagagcgagcgctttctctgcttgttgcgtttagatctgccagtcgatcgcttcgacctgatgcgcctgcagaaaggcgttggtcttggaaaagtggccgcagccggcaaacccgtaattcacggaatacgggctggggtgggaggtggtcaggatcagatgcgccgggttgctcagcagagcctgcttggccttggcgttccttccccacagcaggaagacgaccggggagggcagggcatcgagcagccggatgatctgatcggtcaggatctcccatcctttgttcgcgtgtgaattgggctgactctcccgcaccgtgagcacggtgttgagcatcagcacgccttgtctggcccacttttccagattgccatgatcagggatctgaaagccgacgtccctatgcagctccgcaaagatgttctgcagggagggaggaggcgtcacgccgcgctgcacggagaagcacagcccgtgtgcctgtcccttgccatggtaaggatcctgtcccaggatgacggccttcacctggtgataaggggtgtatttcaatgcgttgaagatgtcatacatgtctggatagacacgctgatgcgcatattcataggcgaggaatctcctgagcttctgataatagtctttcttgaattcatctgcgagcagctgatcccattcattgccgatgtgtaccatgttgtgttccttctttccttgtccgttgtctttcttttcattatacacgaaaatgcgctggaaaaacgaacagggcggatatatcgtcaacgcagaagatcgcattcctggattttccgctcttcaatcagcgtggtttttatgctacaattcctttcgataaggggttgaaacaatggagaaaacaagggaatggaaacaatacctcatggtgatcctgggcagcgcgctgtttgcggcgtcggtcaatctgctgatcgtgccgctcagcctgtacagtgccggcatcgtgggcatcgcgcagatcctgcgtacgctgctcgtgccgctgatgccgtttgcggccggctttgatgtggcgggcatcatcaatctgctgctcaacatcccgctcttcctgctggcgttccgctcgatctcaagggggttcttcgtgaagaccgtcatcagcatcatcgtacagacggccgtgatgtcgctggttccgatcccatcggagccgatcctgggcgatatgctcgcttcctgcctgatcggcgggatcctcggcggactgggcgtcggactgacgctgcgcagcagcggaagctgcggcgg

SEQ ID NO: 1371 - DNA, 22511 bp, Unknown
  16S sequences of unknown bacteria
tcctgcatattttggaaaatttccggcctgagttcttcactttgtggaaaactttctgtggaatcctgtgtcccgggcataaaaaaaccggccctccccagcgggagaaccggtttttgatctgtatgtgtttttgccctatggcaggacagggacagacaggctgcaagttccgtcagtcaatattcgagaatacccggaaagccagtccgctggactgaagataccggtaaagcggcagaccgatcacaaagcaggcaatgaactcgcccaggcccacgctgccgaagttgagcaggaagatgcgcaggtcaaaggtgggcgacattaccatggtcagctctccgcccaccaccagtgcattgagcagcaccggcatcagagccgagagaatcggcaggccccggaactgaatatcccggaacttataggtgagtaccgcagccacaaaagtagcacctgtacccaggaaaatatcccagataccaataatattggtacccagtgccaatccatagatattggaaagcgcacagccaatggtcacaccccagatgcctgccggtgtgaaaagcggcagcagggtgaatacttcggcaaaccgtacctggatctgtccgaaggagagtgccggaaatgcggcgcaaagtgccagataagcagcgccgatcagtccggctgcggcaagacgccgcgcggatactgttttagtcatgattctgatgtcctttcgtagtgtggtttatagtcaggaacttgcgactgactctgtctttctccccctgtctgagaaaccagggaaaaatacaggcctgatcgggagcttctccggtcaggggcgtctgacattatacaacttttgtcgggaaattgcaaatatttttcgcctcctctcttgccaattttcaccgattccattaaactgttgtatagagattttttccgtccggggaaaaatcgggtaattattacaggagggcgtttttatgtcgtatatacagaatgtatatcctatccagtcacgggacgccattgcccgggatgtattcgactatgtcgttgcctgcccggatattgcttcccagagccatgccggacagttcgtacatatccgggtggcaggccataccctgcgccggcccatttccatctgtgaagtgaaccgcgaaaagggtaccctgcgtctggtatttgaagtacgcggttccggtacagaagccatgtccatgctgtcggtgggcgatctgatggatgtcatgggtccgctgggcaatggattcacactgctgtccccggattcccgggcgattgtagtgggcggcggtatcggtaccccgcccatgctggaaactgccaagcattacgcagaaaactgtaccgcaatcctgggcttccgggatgcggcccatgtgatcctggacgaagattttgacgcctgcggctgtgatgtgcgtctggctactgatgatggctccaagggacatcatggctttgtaaccgacctgctccgtcagcgtctggaagaaggcggcgccgacatcatctatgcctgcggtcccaagggaatgcttcaggctgtggctgccattgccgaggaattcggtgtgcgctgcgaagtttcgctggaagagcggatggcctgcggcatcggtgcctgtctgggctgcgctacccccatccggactgcggatggcggcatgacctataagcatgtctgcaaggatggtcctgtatttgacgcgaaagaggtgatcttctgatggcaaacctgaaggtaaatatcgccggtgtggagttcaagaaccccattatcactgcttccggctgtttcggattcggtcgggaatatgagaagatgtatccgctggaaaagctgggcggtatgtccctgaaggggacaacctatgccgagcgtctgggcaatcctccgccccggatcgcggagaccgcttcgggtatgctcaacagcgttggcctgcagaaccccggcgtcaagcattttatcaaggaagaactgccctatctgctggataagggcactgtaatcattgccaacgctgccggcagcgccctggaggactaccggatgctggctgaggaactggatcagtccgctgtggatatgatcgagctgaatatctcctgccccaatgtcaagagcggcggcatgaccttcggcgccagctgtgaaagcgcttcggagatcgtccgggagatccgcaaggccacttccaagccgctgatggtcaagctctcccccaatgtcaccgacatcgtatccattgcccagtcggtggaggcagaaggcgcagatgctgtctccctcatcaacaccctggtgggcatgcgcatcgatattgagtcccgccgtcccattctccatcagaacaccggcggcctgtccggcccggctgtgttcccggtggccctggccatggtatggaaggttgccaatgccgtgaagatccccgttgtaggtctgggcggcgtggagaagtggcaggatgccattgaaatgatgctcgccggtgccaccggtgtgcaggtgggtactgccatgttctatgatccctatgccccgctgaagatcatcgagggcatgaatgaatggctggaccgcaacggcattgccgatgtgggtgagatcatcggtcaggtgcgtccctggtaaggagcggctatgaagatccttgcagtggactacggcgatgcccgcaccggccttgccatctgtgatgccggtgagctgctggcttccccggtgggagtgatccattcccaccgcatggacgaagtggtgcagaaggcagcagaagccgcctgggaacagcgggccgaacggatcgtggtcggaaatcccatcaatatgaacggcacccggggcccccggagtgagctctgtcaggagtttgccgcaaagctgggggaagcgtccggtctgccggtggtgctctgggacgaacgcagcaccactgtcaccgccatcagctacctcaatgccaccgatacccggggcaaaaagcgcaaggctgtggtggatgctgtggctgcgaccattatcctggaaagctatctggcctggcggaagaacaatcccgaatcctgacccccgataaaactaaaaaggaccggtctccccataaaacgggagccggtcttttttgacgcaaaaaagaggacaccgcttttgcagtgtcctctgattttccagaaaggatatccgattaagcagcagccagtgcgccagccagcaggtcgtggtccacttcggtgtagctgtccagatcgtccgggaaggatacggttacagcgtcgccaacagcgttgtatacgatgctgacatccacgctcatggcaacttcctgaccctcagcggtcatgttcattaccatgtgtaccttatcgctcagaacattgtagtccttgtcgatgacgcaggtaccggtcatctcgccgatggtgtagctgccggtatcgcctaccagctcatccataccttccagagcatcgctcaggtattcgttcatcttgtcctgtgcaatggtgtagttgaagacatagttgccgttttcatcttcggtcatctccagcttgtccatgaagtcacgggaagtggcagtgttcatggtggcctgaccggcaatctccgaatactcaaacggagcctttaccttggtgccggcgccgtcattcatatacagatagccgtccttgaagtactcttcgattacaacttcctgacccaggatgctggtgttcatcaccatagccatctccgattcagtgtccgagatcttcttgatctgcatatccgcagacatcttcatgcccagagtcatgccgcccatatccatgtccatggcgatctccatatcgccatccagtgcatccagcgacatgctcttgaccagagcctcgtcatagatctcttcgggagtctttgcggtttcctggctgcaagcagccagtgacagtaccatcgcagtactcatcagaactgcaaggaatcttttcatttgttatccctccataacattttctgtggaaactccacatggtttacaccataaatttatggtatcagattccagccagcggcgcaagtacttttttatacaaaatcatcgttccgattcttacagagattcccctgtttgggcaaaatgttgaaaaaatgcggtgctgatgccattttcaagtcctctgctcccggaagcagagggctttctttttttacagaatcctgttttctgtactaaaagaggagggccgtcaagcggtcctcctcttttacagggaacttgattcagtcgttggaatccccatccagcagctcatgcagcaccagcacgacttcgtcatacttttccggatggtaggtttcatacttgttgggattgccggcatctgccagtagcgccttgctctcctcactttcggtgaggatctccgctgcggcaatgcccacagcttcccggccttcccgcagacattccagggtggtttcatcggcctgggccatccaggcttctacgctgctgcgcagggtatcctccatggaggagtcatactcctcggcatagttgaggacgccgcaggctgctatatagaccttgaggctgctgcccgcagtacccggctgataagctgccagggcatccatcatctcctggacagcggggtcaatttccccttctgccgcggacgagctctcttcctcctgggaagaactctcctccgcctgggacgaggagctctgctcggtttccggttcggacgaagagctctgctctgccgaacagccggcaaacatcatcaaagacccgcacagaagtacagccagaatctttttcataaccaatacacttgcctttctttccttgtatgcccctatcatagttcggaaaatcgcacaaaaatatcagtcaaattttaacagggtatgaattctcacttttatttccagccatcaggaacgggcaactttctggaaggcgatccgctcctccccgccccggacatagacgattccgcagcgttcaaagccgtttttcgccagagccccctgcatgggcagattgtcccggtgggtatcgatgcgcacattgccgcactgctcaaagcaccactgcaggcagaagctccccacacccctgggagcgccttcgccccgctggctggtgatgcggtgcacaacgccataggggacccggtgatccttccagtccccctgttcgatcaccttgtagctctcgtcctcgcccacgaaaaagacaaaggtgcctacaacccggccctgatcgtcctcacacacatagctgaccccggcccggatgtcctcctggagcatttccggttccggatagccattggcccactgggtgggattgccatgctctgccataaagacacgggcatcggcatagagctggagcatccgctcgagatcctccggacggcttttgcgtattttcattctgatcccctcaattctgtttttctttcatcataaacgcaaagacgctttgatgtcaattccctgattcgacagattttttatggcttgtagcaaatgatacagagaatccgcgatttaactcggtagaataaagataattatttacatatttttcataaaaaactatgaaaaatgctacattgcggaaaaggagagggtattatgcaaaatgctgcaacaagcaaaccaaagaaaaaaggcctgaaaatgccccatctgctggtactgatcctatcgctgctggtcctgatgagcctgatgacctacattattcccgcaggtcagttcggcaccgatccggaaaccggcgctattctgagcgatcagttccatctgctgggctatcagaccccggtcaatccctggcgggctctgaccctgatcctggacggtctgaccagttcgggcatgatcatcggtctgctgctggcagccggcggttataccggcgtggtactgtccaccaaggccattgatgaaacagtggattacgccatctacaagctccaggacaagggtatcaatgtcctggtgccggtggtattcttcatctactgcttcatcggcgcattcgcctccggtgaccagatcattgccatggtccccgtcggcctgatgttcgccaagaagctccgtctggaccccatcatcggtatgtccattgtaatcctggcctactttgtgggcggactcagctcccccaccggcgcgatgctcccccagctcaccatgggcctggaactctattccggcttctttgtacggtttgtcatcttcctggtgctcagcaccgttgccatgctgtttgtactgcggtatgccaagcgggttgccaaagaccccagaaactctgtgatggaccccgctgactggctggatcaggaatccaccggcgccgcggattccctcaaggctgtggaactcagccgcagttcggcaatcgttgttgtgctcttcctgctgcagcccatcgtcagcctgatcctggtatcggtgatcggtgagccccggggcgccatggtggcagtcatgctcatctgggccttcctctgcggcaagatcaagggtctctccaccgatgagatcggcggacgcttcgccaagggcgccggcggtatggcctttgtaggcttcatcatcggctgcgccgccagcatgagcctggtaatgagccagggcaatatcctgcataccatcgtctactacgcctgcctgcccctcaaggaactgagcgtcggtactgctacgatcggtatgtcctttgtcatcaccctgatcaacatcgtaatcccgtcggcttccgccaaggttgcgatcctctgccccattatccagcccatgtgcgaaactctgggtatcccgctgcaggtgggtgtcagcgcattcatgttcggtgataagctcaccaatatcctgtcccccttcctgggcatcaccgttggttcgctggcccttgccaatatcccctacaacaagtacgccaaatgggtactgcccatcctggtgatcctggcagcggtaagctatgtatgcctgttcgtactggcacagatcggctggcagggctgattcccccgttcattcactcctttctcaaaatgccgtatcccgaaactgacgggatacggtattttttgcgcctcgccccggtatgcggcggacagcccacacaaaaggggacagccgaatggctgtcccctggaggcattgcggcgggattggcctgacagcgcagttcgctcgtcgtgcggcgtgttcctggaggcattgcggcgggaattggcctgacccttgccgaagccctgcgaaaaggccatacgcacacagaagccactggactgcgctcctgtgtgccctcctgccatgcagaaaatctctgggggcatgcggcggacagcggcctcccgccaggctctgccaaaagctacacacaaaaaaggggtaagccctttccccggggcattgcggcggaaagcggcctgccccttgccaaagcattgcaaaaaggccatacgcacacggaagctgctggattgcgcccccgtgtgctctcccgcctgctatgaaaaaagggacagccgtacggctgtcccttgggtgtatcagttccgggaaggatcagagcaccttgctcaggaagtccttcagacgggggttctgggggtttgcaaacagctctgccggtgtattttcctccagcatcttgccgtccgccaggaagatcacacgggtggcaacctcccgggcaaagcccatctcatgggtaaccagcaccatggtcatgccggcctttgccagctccttcataacgtccagtacctcgccgaccatctcagggtccagagccgaggtgggctcatcaaagagcataatctccgggtccatgcagaggctgcgggcaatggcaacacgctgcttctgaccgcccgacagcttggagggataggcgtcccgcttatcagccagacccacacgggccagcagttccatggcacgctgttccgcggcagccttgtccatgcccagcacctgaatgggcgccagggtgaggttctccagcacggtcatgtgggggaagagattgaagtgctggaatacaaagcccatcttgatgcgcagtttttccagcttcttctggtccttggagtggagatccaggcgttcgccgtcgatccatacctcgccttcctcggggtcctccagaccggcaatacaccgcagcagggtggatttaccggaaccggacgggccgatcagacagatgatctccccttttttcacttccaggctggcgtcatccaccgccttgaggggtccgaagctcttggaaacatgtttaagactaatcactgagtgccatcctttcctccagcttcgaggagaagcgggaaatcgtaagtgtgagtgccagatagaccaccgaagccatcagcagcggcggtacatagttgtaggtataggtaccgatggttttggcgctctggagcagttccacaacgccgatggtggaaagcagcgaggaatccttaatcagggtgatgaattcactcaccagcggcgggataatgcgcttgaatgcctgaggcaggataataaagcgcatcatctgccggtatccgagtcccagggtgcggctggcttcccactgaccggcatccaccgcctggatcgccgaacggatcagctcggtggtataggcgccggagttgatgctcagcgccaccacgccgatgagatagacgctggggttaaagggattgccggtgatggagcgcacaatggacggcacacccagatagaagaacagaatctgcagcatcataggagtaccgcggatggtttccacatagaaggtggcgatgccatgggcgaccttgtttttggaaatgcgtccggctgcgcccagaatgcccagacagaggccgaaggtcagcgccagggctgcgatcaccaccgacaccaccgctgcctgcagcataaaggtgatattgtcgggagtcagatatttttccagcagtgtttccataaaattcctctctgtttgattttttataagaacaggaaacagctttgcaccccagaactgggatgcaaggctgttttccaaagcgattcaggctgattttttaggcagcttccgaagaactgctctcctcaggagtggattcagtgccttcggtttcagtggtcccggtctccgcggcggtcagaccccacttcacctgcagatccacataggcatccgatgccttgaactgagcaatggcattgttgacctcagccagcagttcctcattgccggtggcaacgatcaccgagttctcctccagcaccagcggctcttccatgatgacaaagccataggtgtcagcatagttctgcgctacgatgccatcgcagaccacagcgtccagagcgccgttcttgagggcctcgaacatcacggtgtaatcaccggggttggtcaccttggcgccggtgagctgctccttggcagctgcctcgccggtggtacccaggccagcgccgacagtcaggccatcgaactcatcaaaggaggtgatggtggaaccagccggtagaacgaccacctgcttggactccagataggggtcactgaacaggcattcccgttcggggtcataggtgaaggccgcaacacccaggtcgatctggcccgactgcagggctgtgatgatagtggcaaattccatctgcttccataccaccttgacctccttgccctcggcgcccatgtaggtagccagggtctcggtcatgtcaatatcaaagccttccagctcgccggtagaggggttcaggctctcatagggcggatagtcagcggatacgcctaccacgatctcaccgggggtgaggatctccgactcgtatgccttgccggtgtagctctcctgcttttcatcaccgccggaacaagcggtcagggacagtgccatcatagcagccagcagtgccgcggtaatcttcttcagcatatcaaaaacactcctcaatctaaatttcagtcagaattctctatcgtgtaattacagcaaaaccatcaaactcatatcgtcgcagaccggcgctgccgatctcatccggctccttgcctgccaggatctccgccagggcatcggcggtttttcccagcatctcgccgccccgtaccggttcattatgggaacagatcagggtgtatccggaaaactccttggcaagcagtgccatggtcccctggtagatcttcagcagctccgggaccggacggtccgatgccagcgccacatagagcgccgccggatagaaggtatctccggtgaagagcagcttccggtcgtcctctgccagcatgatgctgtccggggaatgtccgggggtgtcgatgacccgcagcttccagccgcccaggtcaaagaccgttccttccggcgccggggtaaaggcacagggggcaatggtgtaatgggccgggtcaaagccctcgggccagggtcgggcattggagccctcggtgacctccgctgccagctccgcggcagtggctccagcggaaagccgtcgtcgtgcctcggggtgatcgggggcatagactgtatcaaacagggcgttgccgccgatgtgatcgaagtgggtatgggtattcatcacaatgaccggcaggctggtgagctcctcaaccaccttgcggatattccccatgccgagtccggtatccaccagcagagccttttcgctgccggtgatgagataggagatgacctcctggaaatgcccgggctcataaatggcatacagatccggctgaatccggtagacctcaaaccagtcctctgtcaccgggacccgttccagcgacgcatacgccggacggggcagggcatcgtaccagtgttccggctgcatggcgctgtccggcttctgtacggctgtttcctgcatgagtgccacttccttttcgcgaatttgtgtataattatacaatcctttccggggattgtcaacccctattcccccgctttcccggcaggaaatccacaaaatcccctgggaatatccccctgtttccccgcagtttgcccaaagagtgcataaaaacagccgatatacagtatatctgcatatcggctgcataaatttgcagtgaaaccgggctacttcacaaagcccatgcggaactgcttgcggaactgggacggcgatacaccgaaggtatctttatacgcccgggacagatggaacgccgacgagaagcccatgccggaggagatctcctccatggtcatatcggtaaaggccaccatctcctccacccggcgcatcttcatattcataaagtaccggctgggcgggattcccagtacatcattgaaggtcttgttgaggcggctttcactcacgcccagatgccgtaccaggctctggatgcgcaccggacctgccagtccttccgctgccagacgcactgcccggtcgatgaggtccgcctgggaccgggtataggcatagggttccgccttgggatcaaaggattcatctgccatctggggcagcacggcatacagcactgcccgggccagagccggcgcattgccggagcccgcgttccagctctccaggagcatctgcatgagcgtatggatggcattggggtccgagggcttcacagccagcccggacttgctgtggaacataccgtcaaagacccgttccatatagctgggtgacagcaggaagtggatcgacagacagcgcagcggctgcccctccaccggacagacggtatacggtgtaaacggggagagcagtactacatcaccggtccgcgcgtcggaatgatagtccttctgggtaaaggcagcttcgccctccagcaggaagagcagctcatagttgctgagcactgcagtaaccggctgattggcgccatcccagacggcttcgttgacgctgcgcacagtgaacactgcctggtcgagcaaattgctgtgggtatcggcctggtattggatcggacgatctcctactcgtttcagtgtcatattcatcgcctccgcatcgttatttttattatatcgtatctttcggcaggcttcaaggttttatgacaatttttgagcttaattttctgtttttttatataaattgtgtaaattatgcctcatatcgcactgattttatgaatgaatctccggatatttccagaacaaaaaagcccccggcaactgccggaggctttatttgcatatcttctggatctcagcgggccttgatgatgaaccgtttgcccagcttttcctgcgccagttcccggatggcctgctgctcctcgggagtggcatcgctcttggccagggcaagggcctggctctggctgatatagaacaggaaggcatttttcagctcataggcttccagcacctgtttccaggtgaatttgcccgccgccttgcccacataggacgcgacaccgttttcattgaatacgatgcggtgggactggcctaccactgtcttgttgccggtggacatccggtggatctggtattccagcaggccgatcaggaccggcgggaagaacagatagatcacacaggcatagaaggtaaacattccgaacgcatagctgtccacggtataataaccggtcagcttggcaatgacggtacctgccgccagcagataagccacaattccaaagggcagcgtggttcgctttctccggaacatctggaaatagaccatctcccggtacagggatctggatatggtggcctggatctcgatctcacgcatgggcaggttcctccttggtggatttgggacagcttacttcttgttgattgccttcatacgctgggagttggagaggatgcgcttacggatacgcaggttctcgggagttacttccagcagctcgtcctcgccgatgaactccatgcactcctccaggctcatacgcttgtagggagtcaggcgcagggcgtcatccgaaccggacgcacgcatattggaaacatgcttcttcttgcagacattgactgccatatcctctcccttgggagaataacccacaaccatgccttcgtagaccggaacaccgggcccgatgaagagcataccacgctcctgggcattgtagagaccataggtaaccgactcaccggtttcaaaggcgatgagcgaacccacatgacgggtgggaatatcacccttgtagggctgatagctgtcgaagatggtgttgaggataccctcacccttggtatcggtgaggaactcgctgcgatagccgaacagaccacgggacggaatgatgaactcaatgcgcatccggctgccggacggtgccatgtgcaccagttcacccttgcgggcgcccagcttctccataacagaaccaacgcagtcctcgggcacatcgatgagcacacgctccataggctccagcttttcgccgttttccccggtgtggaacaggacatggggcatggatacctggaactcatagccttcccggcgcatggtttcaatgaggatggacagatgcatctcaccacggcccgctaccaggaagctctcgctgctctcgccgtcggatacacgcagggatacgtccttgagcagttcccgctgcagacggtcacgcaggtgacgggaggtgacaaacttgccttcccgaccggcgaaggggctgttgttgaccgagaaggtcatttccacggtgggctcggagatcttgacgaagggcaggggctctacggcattgggatcgcagagggtatcaccgatggtgatgttctcgataccggacagggtaacaatgtcacccaccttggcctcatcacaggccacacggttgagaccctcgatctggtagaggttgactaccttgccgcggtagggctcatgggaaccatggtactcacagatcaccacgtcctgacccatcttgatggagccgcgctccacacggccgatggcaatacggcccacatactcattgtagtcgatggaggacaccagcagctgggtggggccttccgcatcgccttcgggagcggggatctgatcgaggatcttctcgaacagcacggtgagatcctcacccagctgatcgggcgaaagacctgcctgaccggtacggcccgagcagaaaataatggggctgtccagctgttcttcgctggcatccaggtcgagcagcagttccaggcactcgtccactacttcatagggacgggcatcgggacggtctaccttgttgactaccacaatgaccttgtggcccagttccagtgccttggacagtacaaaacgggtctggggcatgggaccttcagcagcgtccaccagcagaacgacaccgtttaccatcttgagcacacgctctacctcaccgccgaaatcagcatgtccgggggtgtcgatgatattgatcttcacgccattgtaatgagcggaagtgttctttgccagaattgtaatgccgcgttcccgttccagagcgccgctgtccatgacgcggtcctcaacggcctgattggcacggaatacaccgccctgcttgagcatctggtctaccagagtggtcttgccatggtcaacgtgggcgatgatagcgatatttctcaaatcatttctaaccaaactaagcgtctccttctattctaaaacgactcggtttttccataccgaactattatatccctttttcgccgcctgcggtagtgtctgtgccgccttttggaaaaatttcttggatttcgccatgccgggggatttccagggcggggatttttgcgcattttgcatagttgcatcagctccaaacccgctctgtcagccagtttgcggccctttcccacaaaacaaacgccccggcggaaaccagggcgttttaccgaaaaagctattcgtagttgcgcaccaccgagatcaccttgccgaggatcgccgcctcggtgacaatgatgggttccatggtgctgttttccggctgcaggcggaaatgtcccttctccttgtagaaggtcttgaccgtggcctcgtcccctacaatggcaacgacaatctgtccgttttccgccaccggagtgcgccgggcaatgatgatgtccccatccagaatgccggcttcgatcatactctcgcccttgacccgcagcgcgaacagctccgacgggtcataccgtcccgccgcaaagggcacatacccctccagcgattccaccgccagaatgggcataccggcggcgacagtacccagcagcggcacctggaccgccttttcctcctgccgtcccaccaggcggatgcaccggttgcggttgcctcccatggtgatatagcccatctcctccagctcccggaggtacttgtgcccggtggaggtggacttgatgcccagggaatcgcagatctcccggactgtgggcggaacaccatcgtccacacaccggcggatataatccagcacccgctgatgcttctgtgtaaattccttcataccgtttccctccatccggctgttatccatttcagtataccagaacccccggaaaattgcaaacaaaagttcgttttctatcctgatttccgggaatttctgacttcaaacaaatttcaaaaattcagtcaagactattcacaacacccgaaagggatttgggtataatatagctgtacccgaaaaggtgaccgcaacaccatcggctgtcagaaagacggcgggccgcagcagcaaaccggcaagccgatccaggccggcgggtatcgtcaaaccctcctcaattacaatacaccacaaacagcaaaaaacggtttccttccccgggagccgttttttgcgtcctgttcaaaacccgccccggatatgctataatagccttgccaggcgctgcctttccggaaaaaagcccggttccggcggcatactaagactgtaccggctgcctgcccgctatgggaagaaccggcagctctgtttttctaaaaattaccgctccctcaaggaggacaatgactatgatgtacgacaataccgaaaaactcccccgtgccattctggcggcggtggacaccggtgaatatgacgctgaaacctccctgctggagctggaggaactggcccgcaccgccggggtggaggtggctgccacctccattcagaagcgtcccgcccccgattccgccacggtggtgggctcgggacggctccgggaactcaccgaggatctggaacggctggaggcggatatgctcatctttgactgcgaactcaccggcagccagacccggaacatcggcgatgtcaccggcgtggcagtggtggaccgcaccatgctgatcctggacatctttgcggcccgggcccggagcagcgaaggacggctccaggtggagctggcccagctgcgctaccgtctgccacggctggcgggcagcagtgagaacctctcccggctgggcggcggcatcggcacccggggccccggtgaaaccaagctggaaaccgaccgccggcatatccgctcccgcatccagaagctggaggaggaactgcgggatctcacccgccgccgggaacagatgcgctcccgccgcaaaaaggacggcatcatcactgccgccatcgtgggctacaccaatgtgggcaagtccaccctgctcaacgccctcaccgatgccggtgtgctggcggaaaacaagctcttcgccaccctcgaccccacagcccgggccctgctgctcccggacgggcgctcggtgatgctcattgacaccgtcggcctggtgcggcggctcccccataacctggtggaggccttcaaatccaccctggaggaggcagcctctgccgatgtgctgctctgtgtctgcgatgcctccagccctgagatggacgagcagatcgaagtcaccaccagcctgctggcagagctgggcgccgccgacaccccgatgatcaaggtgctcaacaagtgcgacctggtgccggggctgcgtcccctggaccgcaaggacaccgtgctcatctcggcccgggaaaagaccggctttgaggagctgctctcggcgatcatggcggcgctggagccctcccagaagcggctgaaactgctcctgccctacaccgctgccgggctgctggcagagatccggcaggagggcaaggtcttttcggaggagtacacccccgatggcattctggcagatgccctggtgcatatccgggtgctgcacaaggtggctccctatcagatctcctgaccccatggatacagaaaaggcgtatggaattgttccatacgccttttttattgcggtattccgttttattccggcaggatcaccttgttgatgcggcgctggctgcgtccggaagggatcatatcggtgagatagggcagaaagcccagcagcagcgggatataggttgtcacaaaggccagcagtgccagcagagccgggacttttttccgaccggcggggacagtcatgcccaccagcagtcccatgctgaatacacagattttcagcagggcgaaatcctgccaacggctgtttgcggcatagcggtcagcgcattcaaacaattttctcatagtggtgtcccctttcatcatatcctattttaatcctaccatatcccacaaatttcatcaagcatctgggacgaaaattcaaagaaccgtaaaaaacaaagcggtctttccagtatgggcggctccggtccccgctatgcaaaaaatccccggccggacagctgccggaccggagattttcagaatacaagggatcagccccgtgccagcttgacacggatcttggtggaaccgtattccaccaccagcaccagcacgatcagccctgccaggatcgcgccggcttcgttccagcggtaggcgttcatggcaaagatcagcggcgcgccatagccgcctgcacccaccagacccaggacagtggcgtcccggaggttgatgtcaaagcgatagatggcagtggaggcaaagttgggaatgagctggggcagaatgccgtaccggatcttctggaaggtggtacagcctgcggcgtccagcgattcgaggatcttgacatccaggtcctcaatggcctcgatatacatcttggacaccatgccgatggaggagagcgccatggtcatcagaccggcaaaggcgcccataccggtgacccggacaaacatcaggccatagaccagcgacggcacagtacggatggccatgattgccatgcgtcccacaaaggcaatgggcttgggcaccaggttggaggcagtgaggaacgagagcgggatcgccagcacagcgcccaccacagtacccaggaaggcgatacagatggtctccagcatgagatagggtacgccctcggtggtgaagttgaagagcaggctgagatccgggtgcagaatgcccgagatgatgctcgcggcgatctgaccgccgcccgacgcgccggtataatccacggcggcagtggcggaccaggccatcagtgccaccagtacagcgcccagagccagacggctccagagggtccggggacggttctcataggcggaaaggattttattttccatgatgcggcacctccctcagaccagtttccggcggaagtaccggctgatggtttcgatgatgaataccgtgacaaacagcatgatgaggatcataccggcgccgctgtaatcccgccagcccaggcgctcgttgagcaccaggcccagaccgccggcgcccacataacccaggatggaggcgtagcgcacattgccctcaaagcagaagagggtattggagatataggacggcagcacctggggcacaatggcacatacaaaggcacggggcttggaagcgcccatggcttcggcggcttcaaaggcgcccatatccaccgtttcgatctcctcatagaggatcttgcccatataggcgaaggtgaacacggcaatggcagtggtaccagccagggtgcccaggccaaagacataggtggcaatgagtgccacaaccagggtgggcagggtacgcaccaggctgaagagcagccgggacagggaaacgaccacacggctcctgatgatgttggtggaggccagcaccgcaaagggaatggcagccaccgtgccgataaaggagccgagcagcgacatcttgatggtatcaaagagcgggccccagacctgggaggaatacttccagttgggcgggaacatatcgccgagaatgacaaagaactgttcgccgcgtttggcaagggtggcgaagttgaagccggtgaccttgaccgacaccgcgcagcagatcagcaccagcacaataatcagcggcatccgggaaacgggctgctgcactgtcttgccgttttccagggtgatggtcctgggcgggaagatcttatcgtaaagggacatacatcacacccccgcttcgaactgaccgccgtatacctcagccagtaccgcttcattgacttcggaagccggaccgtcatagaccacttcaccggccttgatgccgataacacggtcggcatactgcagcgccagatccacatggtggatattgatgagcaccgagatattcatctcccggttgatgcgccggaagtcgtccattacctgcttggcagtgaccgggtccagcgaggccaccggttcatctgccagaatgatcttggggttctgcgccagggtacgggccagggcaacacgctgctgctgtccgcccgagagctgatccgcccggacaaaggccttatccagaatacccaccttatccagggcttccagggcctccagcttgtccttcttggggtaagctcccagcagagcccgccagaacggcagctccggtacccgggaggtgaggacattcttgatgacggtggtacgggtcaccagattgaaggactggaagatcataccgatattccggcggaactgacgcagccgggctcccttgagttccatgacattgacaccgtctacggtcagggtgccgtcggtgatgtcatgcatccggttgatggtacggatcagggtggatttaccggcgccggacagaccaataatggctacaaactccccctgttcaatggtgagattgatgtccttgagcgcctgatacccattgggataggtcttgctgacatggtcgaatactatcatcgtgaaacctcttaacttccttgatggttctgtctgctgtttttgtaagggggaagttcctgtgcggaccctcgcctcccctttacaaaaacaggggaacggtccattcccgttccccgtttttttacgaaatacttcgatcctggcgggcagatcggtttcttttggatgccattttttactgagccgcagtcatttcctgaatgagctgctgagctgcacgctcgttgtcatagtcctcagacttggcaacctggtagccctgatggctgtaaattgcgataacttccttgccttcttcggtgttgccgatgttgatgaaggcattctgcagagcggtcttgaactcatcggtcatgatctcagaggtcttgctcacgctgacagtatcgttgtaaatggcaggagttacaccaatgacattggtttcatcccagatggaagcagtacggccgtactcgctctgccactggtcggcatagtcacgacggacatcggcataggataccagcacatccacctgacccgaagccagacgggccatagcgctgccgtaggaatccgagggaactgcataggccaggtcagtaatgcccttgccatagttctcctggagccacagagccggatagatgtaaccagccggcgaagagggagacattacgctccacttggcgctgttcagatcgtcccaggtcagttcctcaccggcattgaccttggcacccagctcctgacccttctcagaaggaccagcaataatcagggcacgataggatacagcctgatcggtggtagcttcggtgggtttgttgtcgttccagtccttggcgctgtccgaatcaatgctcagaccgtcacgggtggcagtcaggattacttcggcgccatcgtcatacagtacataggtaccgccggggatcagacctacatcggctgtaccggcagaaaggctctcgcctacggcttcatagctggtaccaactgtgatctccacattgcctacatcgtagccttccttcgccagctcggtcttgagcatctccttgaggggctcggtagcagtgatgatctcatcgggttcccgggagggaacaaatgcaactcgcagggtatcgatctggatattgccgttctcagcaacagaagagctgttgtcgctgcttgagcaggctgccatggaagcacacagagccgctgccatcaacactgaaagaatctttttcataactttcctccaaatttccttttccatttttaccgggcccgcccgactggaaccggcagaagaagtccgtatttatgccggatctgctgccttccacaaagaacattatatacacttgtatcacttttttcaatatggcagccaggaatctaccggtggttttacataaatttaactcccccggatataaaaagacagggacttttcagtccctgtcttttctgcaaagctgtttgtatattaaggatacacaaacctgattcagttggcccggccggtccgggcaggcatctggcctatgattattatagcattctgcacctttctctgcaagaaacctgcatcgcttttggaggaacgccacagacccggcctgtaattttatgcactatgctttggcatccggttcccgggaactgcggttttcgcccgatctctcccattttcagggaatccaggcagattacacattcgctctccgctggttttatgcagcttcgcccattcccgatcccggtttatttttgcatctgcacaaatcctatcctgcaaaaacaaaaaggaccggataaaccggtcctttgttttctgattttccagaaaggaagtgcaggttaagccatttcgtaagatacggtgggcttggccttgccgctgccagttctgtagaaggcccagatgaagccaactgccattactgctacgttgaagatgatcagctgaggagtcatagagctgagcatgaacgaagcctggatcaggatggcgatgcaggtgatgatcatcagggtgttgaagacaggagtgggaaccttgtactggctcttttcccaggcttcggggaacatcttgggaagcttcatagcggtaatggtgaagatcaggttgttgatgtaacccagaatctgcacgatggaggagatctggctgatctggagatccagcaggatcggcactaccagaattacatagtagatgatcaggatcttccacggagtcttgaacttggacagagaagccaggctctgcgggaaccagccgtcctcacaggactgcat

SEQ ID NO: 1372 - DNA, 32759 bp, Unknown
  16S sequences of unknown bacteria
cccccgcggggcccgctgccccggttgggccggtgggacctgcggcgcccgtgggcccggtcgggccctccgctccggtgatgccccgcgcaccctgcgtccccgtggaaccggcggggcctgtggcgccggttggtccggtggggccggcgctgcccgcaggtccggtcggtccggccgcgccggcaggtccggtggggcccgcgggtccggtggggccggggatgcccggggaacccatgggcccggtgggaccgatctgccctgcgctgcccatggggcccgtcggcccggggacgccggccggccccgtcggcccgacgaggggggcggcgggaaagggcgccggcggggcgacaaagttggcggggaaaaagcggcagcagccgcgcaggagagagggacgatggatctgcttcatgaatgcgccaactttctgcttgaatttcacaggcagtgtatgcggcgcgggagcggcgcgttccgggcgcaaaagcgccccggcgcgcgggcggcgcgccagggccgggggaatcacttgccgaggcggttgatggcggaaaccagggcgttgacggaggcggccatgatgtcgtcgtgcgtgcccgcgccccaggagacctggccctcgggcgtccggatgccgacataggcgatggccttggcgttggagccctgctcgatggcgtgctcctggtacttgatgatggagtagcggtagccgaggttttccttcagggcgttggagacggcgtccaggcggccgttgccctgggcggtgaagacctgctcctcgcggccgccgttgaagaccgtgatcgtggcgatgatgccgttttcctggcggaagtgggcctcgaccacgtccagcgggtcgaagttgttgacgtagttctccatgaagatggccaggatgtcgtcggcctgcatctcgcggtgctcctggtcggagaggcgcttgacggtgtagctgaagtcctcgcgcatggccgcgggcaggtcgtagccgaagtggctctccagcacgtggccgatgccgcccttgccggactggctgttgatgcggatgacatcgctctcgtaggtgcggccgatgtcctcggggtcgatggccaggtacggcacggtccagcggccgccgccgtgctcggcgcgccacttcatgcccttggtgatggcgtcctggtggccgccggagaaggccgcaaagacgagctggccggcgtagggctggcgctcgtagacgtgcatgccggtcacccgctcgtagaccgaggtcagcagcggcaggttggagaggtccagccccgggtccacgccctgggcgtacatgttgagcgccagggtgacaaggtccgtgttgccggtgcgctcgccgttgccaaagagcgtgccctccacgcggtccgcgccggcgagcaggcccatctccgtgtcggccacggcgcagccgcggtcgttgtgcgggtgcagggagacgatcacgttctcccggaagaggaggtggtcgcacatgtactcgatctggttggcgtagacgtgcggcatggacagcgagaccgtggccggcaggttgatgatgacggggcgctcggccgtgggcgcaaagatgcggagcacctcgttgcagatctccgcggcaaagtccatctccgtgccggtgaaggactcgggcgaatactcaaagcgcacgtccgcctcgggcaggatctcctcgcgcaggcgcacgcagagctcggcgccggtggtggcgatgcgcacgatctcctcccgcgtcttgtggaagacctgctcgcgctgggccagggacgtcgggttgtagaggtggacgatggcgtgccggacgccgcgcagcgcctcgtacgtgcggcggacgatgtgctcgcgcgactgggtgaggacctggatggtcacgtcctccgggatgaggccgcgctcgatgagcgcgcgcacgaattcgaactccgtgtccgaggcggcggggaaccccacctcgatctccttgaagcccgcgcgcaccagcgtctcaaagaactcgaccttttcctccaggcccatgggcacgatcagcgcctggttgccgtcccgcaggtcgaccgagcaccagatgggcgcgcgctcgatgtggtcgcgccgcgcccaacgcatgggcgggttttccggcgcaaagtattggattccgtacttgctcgcgttttgcatgttgttctcctttccggcgcagtccagggaagcgggggagaaaaaaagccctcgcctcctgcgggtgcaagagacgaaggcttccctccgcggtaccactcttgttggcacgtccattccgtgcccggctccttgtttcgcgcatcggcagcgctgtgcgaatgcgcgcccctgggtaacggcggggccccggcctaacctagtcgctcttggcattgcggttcagcaggctgctcaagggagagttcgcgcgtgcggcccgtgccgccttgcaccacgcggcggctctctgcgacgggggggacatgcgcttttgccctgtcaaagcatttgatttgggtttagtatagccgaaatgcaagccgttgtcaagaaacaaaacgcggcgcggcccgggtccgcatggcgaaatgctggggaggtttttcggcgttttttgtgcgttcgcttgtccccccggcggaaatatgatatgataaaaacagttctatacatagattaccggcaagggggagtttcacatgttcttttacacaaaggaagacgtcatcaagctcacgccccagtggacgggcgagcgcatggaggacggccggcccaaggtgcccgcgtccgttctggagcgcatgcgcaagctgaccctggaggaggtctggggccgcgcctattccctgggctatgagttccagtccgagggccacttcatgaccacccactccacggaggatcaccgcctggtgggccgcgcgctgacctgcgtctgtgtgcccctgcgccaggacctgcacgaggtcgccaccgccgagtcccgcgagttcggcttcaagggcggctacaataagtccgccgtcgaccgcctggtcgaggacgacgtcatggtcgtggacctgttcgacaaggtcgtctacggcaccttcttcggcggcaacctctccacccagctcaagaacaagaccaagcgcggcggcgcggtcgtctggggcggcatccgcgacctggaccaggtcaagaagatcgagggcatccagatctactaccgcggcacccaccccacccccatccgcgactacgtcatgaccggctacaacgcgccctgccgcatcggcgaggccatctgcatgcccggcgacgtggtcttcggcagcaacgagggcgtggtcttcgttcccgcgcacctggcggaaaagaccgtcgacagcgcggagaagtcgcacctgaaggacgacttcggctttgagcgcctgaagcagggcgtctacaccgccaccgagatcgacgccaactggtccgacgagatgtggaaggacttccagggctggttcaagaccagcaagatcgccgcgcccttccagtacctcgactgggaagaggacatcgagcgctcccgccagatgcgcgagcatccggagtccatcgtccgcaagggcccccgcacggacaacccgaccatccgctccaccatctaacctgcataagaaaagcataccctccgcatggattccgcatgcggagggtttttgccgtccaaggcgcgcagcgctccggacgattcagccgggaagcgggcgcttccgattcggctttcgcttgagggcgagtattttcatataggcgtccagatcccccaaatccgtcggcgcaaacaggacccattttccatcgcgataggtcgtcgcctcgtcgtattgccggcagaggggcgcggggagagagccccgcatttcctcaaacgccgcacgctccgcctgaccgaagatcaccagaaagccaaaacagttttcccgcgcatacaggcagcagagcgtcttcccgcctctgcggtatttgtattcataccgccaattctttccgcccggtcccccaatttgttccatttcatacgccgcttcaatggcggaacggaatccctgccaaacctcgaacagggagacgccgagcatctagcgcttacggcagtttgaaaagatccagctcaccgcgccgccgacgatcgcgctccatgagaggtggcgcttctttcctcgcgttttctcggctgcgctgccgccccgagcaaggggagattcggttttcagaattcgcgcttgaggctgcgcagaaacaggttggagagcgcctcgcgggggttcacgccctcgtagagcacgtcgtagaccgcgccgcagatgggcaggcccaccccgcagcgcgtggagagaacgcgcagggccttggcggtcgccatgccctcggcgagctgcgcatagcgctcgccccggacgaacctctccccaaaggcccggttgtggctgtagggggagaagaccgtcgcctcgtagtcgcccaggtgcgcaaggccgtaggccgaccgctcgctcccgcccagcgcgccgatgagccggccgacctcgcgcgtgccgcgcgccatgagcgcgcccttgagcgaggtcaggtcgtagccgtccagcatccccgccgcgatgcccacgacatttttggccgcggcgccgatctcgttgccgatcaggtcgtccccgtagtagaagcggatcaggtccgaggaaaaggcccgcacgagcgcctcgcgcagggcggcgtccgcggagtcgatcaccatgcagttgggcacgccgcgcaggaagtcctgcacgtggccgggcccgacccagatcgcgcaggggatggggcccagctcctgcgcgacgatctccgtgatgcgcagcccggtctccgcctccaatcccttcatgcagagcacgagcgcccggccggagaggtccagcccggcgagctcccggaggaagctccgcagcgactgcacgcccacggagatgaccagcgcctccgcgcgggagaccgccgcggcaaggtccgtcgtgagctgcactccctccgggatctggagcaggtcgttttcccggtacttcagcaggcgctccatccgccaggacgccgcccggccgtagagcgtcacctcatgccctgtccggcacagataccaggcgagaaaggagccccacctgccgcagcccaaaaccgaaatccgcatgtcttgtcccctccttgtgacttttttcccacagcttttccccagtataccgccggaagcgggacctgtaaagcccaggctcgcgcgcaagcaggattttggtcattttgcacgacgaaacgtcgcattttgggattccgcgcgccattttcgcggcagagggggattttggacgagaaaaatttaacaagcgcgttttccgcacacagggcgtgcacacgctatccccaaggttgtccgaatcttttccacaaagttatccacagcctgtgcaaaacttgtgggcacaaagtttctgagccgctatatctagtggggggagtccggcgacgccccgaatgtagtggaacgcctgtgtaaactcggatgcaggcaaatttgcaggacgatggcgtgggaatatgcaggcggggcgtcgcccattctttacgcagtttttttgtaaaagcgggcaaagggggtgtataatggacgacggaaaatgcggcgtttcgcatcaggagggaagagagatggacaatgcacggctgacggccctgcgcgcgcgcatggcggaggcagggatcgacgcctacatcgtgcccacggcggacgaccacgagtccgagtacgtgggcgagcactacaaggcgcgcgcgttctgcacgggctttacgggctcggcgggaatctgcgcggtgacgcaggaggacgcggtcctctggacggacgggcgctacttcatccaggcggcgcgggagatcgagggcagcggattccggctcctgcgcagcggggagcccggcgtcccgaccctgcgggaatacctggccctggccctgcccgagggcggctgcctgggctttgacggcgaggtgatcaacgaggccatggcgcgcgacctgcgcgcggccctggcccacaagcgcgtgcgcctgcgcatggaccgcgacctggtgggcgagatctgggccggccggcccgcgcgctcggcgacggaggccttcctgctgcccgtggagcgcacgggctgctccgcggccgagaagctcgcgctcttccgggaggacatgcgcggccagggcgcggacgcggcgatcctgaccgcgctggacgagatcgcctggctgttcaacctgcgcgggcacgacatcgcctgcacgccctatctgctggcctttgcggcggtggagccggcgcgcgcgatcctctttgcgcaggaggggacgatcccggcggcggtccgcgcgcagctcggcgcgcagggcgtggagatcgcgccctacgcgggcgtgtacggctacgctgcgtccctgcaggcgggcgcgacggtctggatcgacgcggccaaggcgaactgcgcgctcgtctcccgcattcccgagggggtgcgcgtgctggacaagaccttctccctggagctgcgcaaggccgtcaagaacccggtggagatcgagaacctgaaggaagcgcaccgggaggacggcgtggcctttgtccgcttcctcaagtggctgaaggagaacgtgggcaagcgcgagatcgacgagtgcggcgcggcggaggagctcacgcgcctgcgcgcgcagagcggggacttcctggagccctcctttgccacgatctgcgcgtataacgagaacgcggccatgatgcactacagcgccaagcccggcagcgccgcgcgcctgcggccggagggcttcctgctggtggacagcggcggacagtacgagagcggcaccacggacatcacgcgcaccatggccctgggccccgtgccggaggagtggaagcgccactataccgccgtgctgcgcggcatgatccgcctggcgcaggcgcgcttcctgcgcgggtgccgcgggctgaacctggacatcctggcccgcgggcccatctgggacctggacctggactacaagtgcggaacgggccacggcgtggccttcgtcggcggcgtgcacgagccgcccaacggcttccgctggcgcctcgtgccggagcggcgggacagctgcgagctggagccgggcatggtgacgagcgacgagccgggcatctacatcgagggcagccacggcatccgcaccgagaacgagctgctctgctgcgccggggcggagaacgagtacggccagttcctccactttgagacgctgacgctggcgcccatcgaccttgcgccggtcctgccggaggagatgaccgcggcggagcgcgcgtggctcaacgcctaccacgcgcgggtgtacgccgagctcgcgccgcggctcagcgaggaagagcgcgcgttccttgcggaatgcacgcgggcgctgtagaccaaaacacttgggaacttcccacaagaaagggacaacgacgcgcatgaacgtgctgacgcaactggccattctgctgctgatctgctttgtgggggagggggtcgcgctcctgctgcccatcgccttcccctcgagcgtcatcagcatgatcctgctcttcctgctcctgctcacgggcgcgctcaagctccggcagatcgaggatgcagcggatttcctcacgaagaacatggcgttcttcttcatccccgcgggcgtggagattctggaaaactacaagcccgtggcggacaagatcctgcccctgctggcggtgctggtgctgaccacggtcatcaccttcgcggtcacggcggggaccgtgcacctttgccttgcggtgcagcgcaggctgggagggggtgcgcgcgcatgaccgcctggacggactccacgctgttcggcctggtgctgtcgctgctcgcgtatgccctgggcgtattcctcaaccggaagacgaagctgccgctgctcaacccgctgctcatcgcggtgacggcaatcgcgctggtggtgacgctcctgcagatcccgctggacaactaccgcaagggcgggcagtttatctccgcgctgctcgcgcccgcgacggcggcgctggcggtatccatctacaaccagcggcgcgtgctcaagcagtactttgtgccggtgctgctggggtgcctggcggggagcctggcctccatgggcagcgcctatctgctctgcaaggcgttcggcctcgaggatgcgctggtggcgaccatgctgcccaagtccgtgaccacgccgatcgccatggccgtttccgagacgctggacggcatcgtgccggtgacggtcgcggccgtgatcctgaccggaatcctgggcgcgatggccgcgcccctgctcatccgcctcttccacgtcacggaccccatcgcccagggcgtggccatcggcacctgctcgcacgccatcggcacgacaaaggccatggagctgggcgagctgcagggcgcgatgagctcgatcgccatcggcgtcgcagggctgatcacggtgctgatctccctgttcctctaacgaaaggagtcatacatccaatatgccgcagatctgtaagaagctcgccctcggggccgtgaagaacccccgctttgtcgtggtgctctcccaccaggaggggaagatcctcctcagccgccacaggcagcggcagacctgggagacgcagggcgggcacatcgagccgggggagacgcccggccaggccgcccggcgcgagctctttgaggagtccggcgctgcggccttcaccctgcagccgctgttcgactactgggtcggggacgaggcgacgggcgccggcggcgtggtctttgccgcgcaggtggaccgcctcggccccctgccggagagcgagatggcggagatccgcgcctttgacgagctgccggaggacctcacctatcccgacatcaccccgcacctgttccgctgggcgggcctggcctgagcaaaaatgcgccgggctggaagggagtttccccttccagcccggcgcttctgtcttttttagaggcggaccatgcggtagccgacgcccacgtgggtctggatgaactgcgggtcctcggggcggggctggatcttcttgcgcagcgtggtcatgaacacgcgcaggctcgcgatgtcgctgtcaaaggccgtgccccagatttcgcgggtgaggtaggtgtgggtgagcaccttgcccacgttgcggcacagcaggcagagcagcttgtattcgatgggggtcaggtgcagctcctccccgcgcagataggcgaaccccgcggcgtagtccaccgtcaggtccccgttgacaaaggtggagtcctgcgcggaggaggcccggatgtacttgaggcggcgcagcgtcacgcgcaggcgggccagcagctcgtccacggaaaagggcttggtcaagtagtcgtccgcgccggcgtccagcgcgtcgatcttgtcggtgtcctcgctgcgggccgagatgacgatgatgggcagctccgaccaggagcggatcttgcggatgacctccacgccgtccatgtccggcaagcccaggtccagcaggaggacgtccgggcgcttggtggcggcctcgagcaccgcctgcacgccggttgcggcggtgtggtagcggtagctctgcgtctccagcgcggttgcgatcaggttcttgaccgcgctgtcgtcctcaacgatcagaatgagcggcttgttcatgatggcagatcgatcctttcttcctggagggtgaaggagaaaaccgcgccgtgggggacgttgtccgaaacggagatggtcccgccgtgcgcgttgacgatggacttgcacagcgcaaggcccagccccatgccccggcgcgcgtcgcttccggcggaggtatagaacatctcaaagaccttttccttgtccgcgtcggggatgccggggcccgtgtccgccacctcgacgacgaccatgccgtcccggcgcagggtgcggaccgcgatctccgaccccggcggcgtgtacttgacggcgttgtcgatgaggttcgtcaggacctgcaggatgagccgcgcgtcgatgcgcgccatgagcaggtcgtcctcctgctccacgcgcaggtggtgcgtgctgccgtacttttccaggcgctgcatggcgccgcccacgacctcgctcaggagctcgggcttcaggtgcagggccatgcgcccctcctccatgcgggtgacggagagcaggttttccacggtgcttaaaagccagagggaatcgctgtggatgtccgcatagagcttgtgccgctgctccggcgagaggctgtcgccctggtcggccaggagcccggcgctgcccgagatgctcgtcagcggcgtgcgcaggtcgtgggagatggagcgcagaaggtctgcgcgcagcttttcattgcggatctggagcgcagcctcctgccgcttttggttgtagaagccgcgctccagcgccagggtgcattcgctgagcacggactgcatgagctgattctccagggcggtcagcggccgctcgcccgcgaagatcccaagcacgccccagacgtgcgcctccgtgcggatgcagatgtagagaaagtccgcccgggcaaagcgcgccgtgcgcgcgccggagttttcgccgttgcggaaggtccactgcgcggcgatctggtccagggccgtgccctccgcatacgccccgaagcggcggacggggcccagctccgtcccattggccacatagagcgcgacgggccggttcaggagctgttcgagctgctgggcggtgatggagaggatctcctcgcggccgttcgccttgaggaagagctggtccgcgcgcagcaggaggcgcgtgcggtccgtcaggcgccggctgttgtgcgcgatgctgcccatcagcagcgcgacgcccagggggatgaggaaatccatggggtggagcgtgcgcagaaacgccagcgaaaagcgcggctgcgcgcggaggagttcaaagagcaggatgcccgccagcgccgagaccgcgctgcagaaccggctggccgtcagcgccgcggtgagcaggatgcccagcagaaacagcgcataaaggttaacctcctgcaggtccagccagtcgaacagcagcccgagcgccgtggccagaaccaggatgcccgcggtgatgaggccgttcttccagcccaaacgaaagcgcgcggaatgctgcatggttgcctcccctctgccaagggaggaagtccctcccctggcctacaggagcaattatgccacattccgcgcgtttgtgcaaattccggttggattagaagatggagatgttcaggaagagcgtcgccagaagggacgcgaccagggagacgacggtgatctgcgtgttgatggacgggccagcggtgtccttgaagggatcgccgaccgtgtcgccaacgaccgcagccttgtgcgcgttggagcccttgccgccctcggcgcccgcctcgacgtacttcttggagttgtcccacaggccgccggagttggacatgaagagcgccaacagcaggccggagacgatgttgcccagcaggaagccgccgacggcgctgacgccgccgatgaagccgaccaggatcgtggcgatgatcgcgaacaggcccgcggggatcagctcgcgcagcgcgccctgggtggcgatgtcgatgcacttgtcgtagtccgcatccgccttgccttccttcaggccgcggatctcgcggaactggcgatggatctcggcgaccatgcgctgcgcgttgcggtcaacgcccaggatcagcatggcggagaacaccgccgggatcgccgcgccgatcaggatgccgaagaacacggtcgggtcgatgatgttgagcacatcgatgacgacctcgccggccgcctcgttgacctcgctgatgtaggcgccaagcagggagatgacggtaagacccgccgcgccgatggagaagcccttggtgacggccttgacggtgttgcccgcgctgtccagctcgtcgcagatgcggaccgtctcgtcgcccatgtcgcccatctccgccaggccgcgggcgttatccacgatcgggccgtaggcgtcgttggagatgatcatgccgacgatggacagcatgccgaccgccgccatggcgatgccgaacagcgggtaggagccgcccatgggctccaggagcttgtaggcgaccagggcggaaatcgcgatgccgatcatggccggcagcgcagagatgaagccgtaggccacgccggagaggatcgtaaaggccgggccggacttggaagccgcagccacgcgcttgacgatggggcgggtgtcatccgtgaagtagtccgtggtgaggccgatgatgacgcccacgaccaggccgaccgcagaggcgccccagacgcgccaggcaatggcttcgccggagaagaagatcaggttggagaccgccgtgaggaccaggaagatgccggtggtgacgtaggtggaggcgttgagcgcattggtcgggttgccgttcttgccgatgcgggcaaaggcgatgcccagcgccgaggccagcaggcccagcgccgcgtagcagaacaccatctccgcgcacacgccgaagccgccgtccagagagaaggccaggaccagcgccgccgccatggccgccacgttggagtcgaacaggtccgcgcccatgccggccacgtcgccgacgttgtcgccgacgttgtccgcgatgacggcggggttgcgggggtcgtcctcggggatgccgagctcaaccttgcccgtcaggtccgcgctgacgtccgcggtcttggtgaagatgccgccgcccgccttggcaaacagcgcaagggagctggcgccgaacgagaagccgagcagcgccgtggtgtcgcccgccagcatcagcacgagcatgacgcccagcaggcacatgctcacaacgcccaggcccatgaccgcgccgccgcggaagccgaccaggaacgcgggcttgatgccctcagaggccgcgcgcgccgcgcgggtgttggccagggtcgcaacgtacacgcccagcttgccggtgatggccgacatgaccgtgcccgccacgtaggcgatgaccatcttgacgttgtccaggaagttggcgccctcgctccagaagggacggggcaggaagatgaggatgagcaccgccacaacgcccgcaaagcaggccagcagcttgtactcccggcgcatgaaggtgttcgcgccgtcgcggatgagcttgccgatctgctcaatccgcgcgttgcccagattttgccgctttacccacatcgcaaggtaggccgcaaaggccaccgcgatgaccacggcaaaaaacgagatcaggtacatcgtggtcattgtgaaactccccccagtggtgatttttattgagaggggcggcggagcgccgccccaggctcacgaatcgatctcaggcttcttttccggacttgcggttggtgaccttgcccagggcgatggtcaccaggatgatgatgccgatcacgacgaagatgcccagcaggcccaggcccatgtagctcaggttggcgataaaattgctcggggtaaactgcatagctcgttccctccctttagccgaagaaggtcaggatcaggccgcccgcgatgacggaggcgatctgtccggagacgttgacgccgatggagtgcatcagcaggaagttctgcgggtcttccttcaggcccatcttgtgcacgatgcggcccgacatcgggaaggccgagatgcccgccgcgccgatcatggggttgatcttcttgtccttgggcaggaagacgttcaggagcttggcaaacagcacgccgcccgccgtgtcgaagatgaaggccacaaggcccagggccaggatcagcagggtgtccggggcgaggaactccgccgcctgcatgcgcacggcgatggtgaggcccaggaagatcgtgaccaggttcgccagaaccttctgcgcggtctcggacagcgagttcagcacgccgcactcgcggatcaggttgccgaacatcaggaagccgatgaggctcgccgcggacggcgcgaccagcgccgcgatgaccgtgatgcagatcgggaagaggatgcgcgtggtgcgcgtgacgttcttctgctcgtagggcatgcggatgagccgctccttgcgggtggtcagcatgcggatgatcggcggctggatgatcgggaccagcgccatgtaggagtaggccgccaccatgatggcgcccaggtacttcgaacccagcgcctgcgcaacgacgatggaggtcgggccgtccgccgcaccgatgaccgcgatggaggccgcgtcgttgatgtcaaagaacatggacgccgcgcacagcgtgaagaagatgccgaactgtgccgccgcgccgaagatcatcagcttcgggttggaaagcagggggccaaagtcgatcatcgcgccgatgccgatgaacaggatcagggggaacagctcgttggcgatgcccgcgttaaacagcgaaaccagcgcgccgccttcctgaatcaggtcgacgttgggaatattgaccagcagtgtgccaaaaccgatgggaaggagcagcgtcggctccatgtccttggcgatggcaaggtagatcagcaggccgccgatgcaccacatcaccacgtgctgccaggtgaggtccagtaggttgccgaacaagaattccacgttcactctctccatttctttttttatgggccattccaatattcattatatcaccatgtatataaacagtttgttaatatttgcgccataagtataaagataacattaagaacattttttgagtgttaatatgaagaaaagctgcaaagacggatcgctttccggaaaaatatatttatatttttgtataaaatgtttccgggcgccgggggagaaaaaaaggccgccctgcgcgtcgctgcacagggcggtccggaaaaatgggatcagaagtccgcgttgcgggccgtgcgggggaaggggagcacgtcgcggatgttgctcacgcccgtcaggtacatgatgaggcgctcaaacccgatgccgaagcccgcgtgcttgaccccgccgtagcggcgcaggtcgagataccaccagtagtcctccttcttgaggcccagctcctccatgcgggagacgagcacgtcgtaccgctcctcgcgctgggagccgccgatgagctcgccgatgccggggacgagcatgtccatggccgcgacggtctttccgtcgtcgttgaggcgcatgtagaaggccttgatctccttggggtagtcgatgacaaagaccgggcggccgaaggtcttctcggagaggtagcgctcgtgctcggtctgcaggtcgcagccccagtaggccttgtagtcaaaggcgtcgttgttcttctcgaggatctggatcgcctcggtgtaggggacgcgggcaaagtcggaaccggccacgtgctccaggcgcgccttgaggcccttgtccacgaagctgttgaggaagtcgatctcctcgggcgccttctccaggacgtagcggatgatgtgcttgaccatgccctcggccagctccatgttgtcgtcaaggtccgcaaaggcgatctccggctccaccatccagaactcggcggcgtggcgcggggtgttgctgttctccgcgcggaaggtcgggccgaaggtgtagatgttgcggaaggccatggcgaagcactcgccgttgagctggccggagacggtcaggttcgcgggcttgccgaagaagtcctggttgaagtccacgctcccgtccggcaggcgcggcgggttggcggggtccagggtggtgacgcggaacatctcgcccgcgccctcgcagtcgctggcggtgatcaaaggcgtgtgcgtgtagacgaagtcgcggtcctggaagtagcagtggatggcgtgcgcggccagggaccggatgcggaacaccgcggagtagaggttcgtgcgcgggcgcaggtgcgcgatggtgcgcaggaactcctgcgagtggcgcttcttctgcagggggtagtccggcgggcaggcgccctccacggcgagctcgtccgccttgatctcaaagggctgcttgttgccgggcgtcagctccagcacgcccgtgacccgcacggccgagcccacgttgagcttgaccgcgtccttgaagttgggcaggcgcccctccacgagcacgacctgcaggttcttaaagaacgtgccgtcgttgagctcgacaaagccaaaggtcttgctgtcgcgcacggtgcgcacccagccgtataccgtcacgacgctcccatcggcaggggtctgccggtagagcgagcgaatcgtcgtcttttccatgggttctctcctccacaaaaagttcgtgctgtccctagtataccacggctttttccaaaatactactgcgattcggcccgcggggaggcggaaagcgcgcgcagccagggcagttcgcgctttagatccgcccgcacgctccactgccagaggcactccccggcaaagagcaggcggtacatcccgcgccggcgccggagcgcgtgcaggagccgggggagggagtagatgcgcgcgctggcgcgcaggacctcgcgctggagctgctccgggctcatgcggcgcgggtagtgcacggcgcggcccgtgcagcggccccagtccccttcgcgcaggagccggccgcggttggcctcgtagacgggcgtccccgggacgaagtacatggcctggatgagcacgccgcacagatcgttttcgatggcgaagtccgccagccggtcgccgacgcccggctcgtggttgtccgcgccgaggatgaacaggccgcgcacctgcaggccgtggcgctggatgttgcggatggaggcgacgatctggtcgcgcgtgctctgcttgtggtagagggcaaacgattcgtcgtccaggaactccacgcccatcgccagctccgtaaagcccgcctgggcgagcagatccaacatttcgtcgtcaaagccgacctcgaagcgcgcctgcacggtgaaggcgcagcggatgccgctccgcaggatggcgcgcagcacggacatcgcccagtcccggtccgcgaagaagttgtcgtccgtcagccacaggacgcgcagcagccggcccgggcggtcgtgaaaggcgatcgcctggcggatctcctcgacgacgttctccggcggccgcgtgcggaccctgtgcccgaagtgccgcacgaccgcgcagtaatcgcagttgtgcgggcagccgcgcgaggcgtgcacctgcggccagagggtgttgtgcccggccatctcccggtagcggtagacgagggagcggtccgggatcgtcgagatgtcgcagggcgggcggcgcggaccggtcgtgcggaaggcgccggattcgtcccgccaggcaaggcccggaaaccccggccgctccccggcagagagcgcggcgagcaggtcccggatcgactcgtcgccctcgcccaggagcacgaagtccgcgtggcctaccgcctcctgcgcgctgagcgaggcgtgcaggccgcccaggaccaccagcgcccgggaatgcttgcgcacatagtccgcaagcgcgtacccgcgcggcgcgttgaacgtgaagaccccgatgcagacgaggtccgcgtccagcacgtcctcccagacgatgcgggagatggactcgctgtacacgcgcgcatccgcgcccgcgtcccgggcgatcgtggccagggtgatcagtcccgtccccggcgtgcggatgtagcggtcgtagacgaagaggttccagggcgaggggcggtaggggcggttgccgggctcgagaaagcgcactttgagcggtttgttcatggaaggggccctcctctttccggatcgttgcgcggcggggcgctggagcgacgtttgcgccgtcaaatgcgcgggtttgggacaaactgtctttacggcggagccggggtttactataatggtaggtgaatcgaacagggaggtgcagacattgccgttcttctactatggttcctgggattacctttggctgatcctgattgcggcggtgctgggcatggtcgcgcagggcgcggtgcagagcacgtaccgcaagtacgccggcgtcgcggcgcgctcgggcgtgaccgcggacgaggccgcgcgccacatcctgcagaacgcgggcgtatacgacgtctccatcggctacagcaaccgcggcgggctctcggaccactacgacccgcgggccaagacgctccgcctctcctccggggtgtacggatcgacctccatcgcggcgctgggcatcgccgcgcacgaggccggccacgccatccagcacgcgcagggctatgcgccgctggccatccgcaactccatcgtgccgctggtcaacttcggctcggccgcgtccatgccgctgctgctgatcggcctgttcctgaactcctatgtgctggccatgatcggcgtgatcttctacgcgtttgcggtggcgtttcagctggtgacgctgccggtggagctcaacgcctcccgccgggccatgcaggcgctgcagagcacgggcctgctcgccccggacgaggccggcaaggcccgcaaggtcctcaccgccgccgcgtccacttacgtcgccgcggcctttgccgccgtggcgcagctcttgcgcctgctctccatcgccaaccggcagaagcgcgactaaggacggagggcagatccatggacgcaaaggaacggcgcagcgcgattttgcagctcctgcgcaaccggaccgcgccggtcaccggcgcggagctggccgcgcgcatgggcgtgagccgccaggtcatcgtgcaggacatcgcgctgctgcgcacgggcggccagaccatcttcgccacgcccgagggctacctcctgccggcgctggagccggcggccgccgcgcggcgggtcgtcgcggcgcggcaccgggacaacgccggcatgcgccgggagctggagaccgtcgtgcgcctgggcggaacggtcgtggacgtctccatcgagcacccggtctacggcgaaatctccgcgccgctgcacctgcgcacgcaggccggcgtggaccggttcatggccaactttgaaacgggcggcacctcgcccatctcgctcctgaccgacggcgtgcacctgcacaccgtggaggccccgagccagggcgcgatggagcgcatcctttcggccctgcgcgaggcgggcatcctcgtggagtgagcgccccttacgcgccgaagaaggcggcgcacagggcgcggatctccccggcgctgcgaacgcggcgcagcgcccactccggcggcaggaggccgcggtagtccgcggcgccgtagcggtcgtcgagcaggagcagcgcgccgcggtccgtctccgtgcggatgacgcggccggcggcctgcagcacccggccgatgcccgggtagacgtaggcaaaggcgtagccgtcgccgtagaccgcgtcgtagcgggcgcgcagggtctcccgctccagccccacctgcggcaggcccaccccgaccaccgccgcgccgcagagccgctccgcgggcaggtccacgccctcggcgaagatcccgcccatggcgcacagcgccagcagccgcccctgcggctccggcgaaaaccgcgcgaggaattcccgccgcgcggcctcgtccatgtcctcggcctggggcaggagcgtcgcctccgccccgaggcgctcggccagcagcggcagcgcgctgcgcaggtacgcgtgggaggggaagaaggcgatgaagttccccttctcgcgcgagagcacgagcgcggcgatggccgcggccacctgcggcagcgtccgctcccgcgcgcggtagcgggtgttgaccggcaggtgcagcaccagcaggttctccggcggaaagggcgagcacagccgcacgcacgggctcccctccgccgcgccgcagagcgcgcggtaaaagggcagcggcgtcagcgtcgccgagaacaggatcgccgcgcgcgaccggcgcagcaccttgcccatctcgcccgacgcgtccgcgcagaagagcgtcagcacccgcgaggtctttcccccctcaaagagcaggaaatagtccgggccaaagtgcgccgcctggtagaggaaggcggccaggtccagcgccaggcgccgcggcgcgttgcccggcgcggcggggtcctgccgcagcgcgcagagcgccgcctcgcacgcggagaggagctcctcgcgcaggtccggctccgcgcgcggaacgtcgcccgcgccaaaggcttcctccagcgcgcgcagcagcgcccggagcgccggatacagcgccccccgccgctgcgcgcgcgggatggaggcgcgcaccgcgtcgatctcccgggcggaaaggcgcgcggagtacatggcccggccgcggtccggcaggttgtgcgcctcgtccaggagcagcacctggccgcgccggccgccggcggcgaaccgctgcagccggacccgcgggtcgaagagatagttgtagtcgcagacgaccacgtcgcattccaaggcgatgtccagcgagagctcaaaggggcagaggcagaattcctccgccaggcgcagcaggccctcccggtccagcggcccggcgatgccgcgcgcggcccgcagcgccgcgggcagccggtcgaaatagccgcgggcgcgcgggcaaacttccggcgcgcagtccggcgcccggggggcggactccgcttggccggcggaccccgcccggggggcggactccgcccggttggcggaccccgcctggggggcggactccgcctggggggcggaccccgccgcctgcgggcagaggacctcccgcgcgtagaggacgatggtccgcaggctcccctgcggcagccggcgcagggcgtccaccgcggccgcgcgcgccgtcgtgcgcgccgtgaggtagaagatgcgctccacgagcccctcgccgatgcccttgagcgccggaaagagcgcggccatggtcttgcccgtgcccgtgggcgcctgcgccaggaccatgcgcttgtcccggatggccagatagatctcctgcgccagctcccgctggcccgcgcggtaggccggaaaggggaaggtcagcgcgcgcatctccgcggccagccccgcccggcggcgcgtgagcccgtccagccaggcgaggtacggccgcacatagccctcgaacttctccgcgagcgcctgacgcgtgtgcgtgcgcacaaagcgcgtgatctcgccgtccgccaggctgaggtacgtcacgcagacctcgagcgagggcaggtcctccgcctggcagagcatgtgcgcgtagcactccgcctgcgcccagtgcaggggcgcggcctccgccggcgcgccctcgagcgtggtcttgatctcctccacgcggcgcaggccgtgcacgcggtccgcgcggccgaacaccgtcaggcgcacggccgcgccctccgcgcagaagcgcagcggcacctcgttgcgcacgccctcctcctcgacgctctgcaggctcttgtgcccgcgcacgccctcgagcaggcgctcggccgaggcgccgggcgcaaggtcgcccgcccgcagcgcatactccaccaccgcgtgcaccgaagcgcgcgccgccgccttctccaacgctccaacccccttttttccggatgtagaatgggtgtgatgtgatgattcaacgcgagtcgctccggctcctgctgcaggggcccgtccgattttcccggcccgtgctcgcctttggcgcggacccggaaaccgcgccgccggaagagccccgcggcgcggcgcgggcgcgccccctggacgggaggctgcccgtcctgggcgcggtccgcatgccaaagggcctggcccgcggggtggaggcggaggggcgcgtggtctcctgggccgtggcgcgcgaggcggacgaggcgggcgttcgctccgtgacggtggagacggcccccgcctaccgcggccggggctatgcccgcgcctgcctgctggcgctgcggcgcgactgccgcgcgcccctgctctacctctgcgagagccggaacctgcactccgcgctcaccgcgctctccgccgggttcttccgcgtggggaccatcgaaaaacaaaccgtcagggaggaaaaaaccatgtccgcactgcccttttccaccgtggaccacgtcgccatcatcgtctcggactacgcgcgctcgcgggcgttctacgtcgatgccctcggcttttccgtcgtgcgcgagaactaccggcccgaccgcggggactggaagctggacctgcgctgcggggacatcgagctggagctcttcggccggccggggagccccgcgcgcgtgacgcagccggaggcctgcggcctgcggcacctggccttccgcgtgccggacctggacgaggcggtgcgggcgctcgccgcgcgcggcatcgcgtgcgagccggtccgcacggacgagttcacgggcaagcgcatgacctttttcgccgacccggacggcctgccgctggagatccgcgagtgaaaaaacagggcgcgcaaggggggaaagacccctgcgcgccctgcgcctaagatcaggcgtttggcttttccatgacgaagttgcggaggcgaacgccccggcgctccacctcctgcgcccggaccacgcggtagccccgcttttcaaagaaggggcgcgcggtcagggaggcgtgggtcgtaaagagcggcgcggaggaggcgccttccaaggcgtcgcagagcgccgtcgcgattccctggccctggcggtccgccgcgacgtagagccggtcgagatagccggtctcgtccatgtccgcaaagccgacgatctgctccccctccaccgccacgagcgtgcggtgcgcgaggaaggagcggtcccacgcggcaaggtctacctggcccgtggaccaggcgttcagctgctccggggcgtagtcccgggcgtttaccgtgtggatggtcttgtgaaagagcgcggcgagcgccgcgcagtcctgcgagcgatagggtcgaagctgcatgggaaatgccctcccttcggctcagtccaccgtcaggcgctcgatcttggcacccagggagcggagcttgtcctccaggtgctcatagccccggtcgatatattgtacgttgtagatgtcggtcacgccctcggccatgaggcccgcgatgaccagcgccgcgcccgcgcgaaggtccgaagccgtcaccgcgcacccggtcaggcgcggaacgccctcgatgatggcgatgcggtcgttgatctgggagatgccgcccatgtggcggatctcctccaggtgcttaaagcgcatctcgtagatggtttcgttgatgatggaggtgccgcgggccgtggagagcagcacgctcatgggctgctgcaggtccgtggggaagccgggatagggcagggtcttgatgttgacgtggcggtggttgccgtcggagcgcacgcggatgctgtcctcgcccacgccctcgtccacgcgggcgcccatctccaggagcttggcggtcagggcctccatgtgcgtgggcagcgcgccgcggatgagcacgtccccgtgggttgcggccgcggcgatcatcagggtgcccgcctcgatctggtcgggaatgatggcataggtgcagccgtgcatgggccggccgccgcggatgcggatgacgtccgtgcccgcgcccttgaccgagccgcccatggcgttgatgaagttggccaagtccacgatgtgcggctccttgccggcgttgacgatgacggtgttgccctgcgccttggtcgcggcgagcatgatgttgatcgtcgcgccgacagagggcatgtccaggtagatctccgcgccgcgcaggccgttttcggcccgggcggagatcacgccgtggtccgtggacacggacgcgcccagcgcctcaaagcccttgatgtgctggtcgatggggcggttgccgatggcgcagcccccgggataggagacgtccgcttggccaaagcaccccagcatcgcgccgacaaagtaatagctggcgcgcagccgccgcgcgtattcctccggcacgacggcgctcttaacgccgcgcgggtcgatggtcatggtcgagcccgcgagcgtcaccttcgcgcccagcgcaaggaggatgtccgccagcgcctcggtatcgcgcacaaagggcaagttttcgatggtgcagggctcgttgcagagcagcactgccggaatgatcgcgagcgcggcgtttttgccgccgttgacggtgaccgtgccctccagccgctgcccgccggtgatcctgagtatttcttctgccatgtcgcaaatgccggcctgccgccggcgcacctccctatcccctgttcaaacctctccccattatacacaatttttccgctgctgacaagttttgccccctgctttccgggctttgcgccgccaaaacggcgaggatttgcagcgcttgctccgccgcgtccgcgcgcacctgggcggtgtagagcccgtccatggtaaaacgtacctcgaagagcccgccttccgtccgcagcgagtagagcaggctggcccccgccgcgccgccgaacccgtcgggcgcgccgcaggcctccagggcgcggacctctccaaagggcgaggacagcgcctcctctgtgtcgtttccatggcggccctgaaacgctgcgaccccgccctttgcgtcgggcgcatagaccgacacgcgcgccgcggcgcacgcgctcccctcctgcgaggcggcgaactccagcgcgtagcccacggtttttcccgcgcggggagcgtccatccgcagctggcggcgctccagcgacaacccctccggcagcagcggcgtcagcgtggattcttcgatatagggcaggccgagcgcctccgccgccgcgcggcattcctccgccgtggccggtgcgctcgtccgcgccgtcggccggaagcagagggaaaccacggccagcccggccagcaggcacagcgagcccagcgccaatgcaatgccccatccatcccgttttttcatgtgcagcctcctgcgcaaatcactgggagaccgcgcatcccccccgccccggagccgaacttctttcgccatgcgggaaggagcagggaaattgcgcagtccaatggaaacatacatagacccctttccgcagaagcagggagaggggaagagagcaaccaatcaatttctgtaatttcagtataccatgcgctcgctccggtgtccagatttcgcgtcggagcggcgcggaaagcgagggaaaaatggcggaaaaacccgtcgtgaccaacgccatgcggctgctcaaggccgcgggcatcgactttgaaacgcgcgaatacgaggtggacgagagcgacctgagcggcgtgcacgcggccgaggtcctcggcctgccgccggagcaggtattcaagaccctcgtgctccggggcgaaaagcagggcatcctcgtctgcgtcctgcccgtggagctggaggtggacctcaaaaagctggccagggcggccggcgacaagaaggtggagatgatccacatgaaggagctgctcccgctgaccggctacatccgcggcggctgctcgcccgtgggcatgaagaagaaataccccacgttcctggacgagacgtgcgagctctgcgaccgcatcgcggtgagcgcgggccagcgcggcgtgcagatgctgctgcgccccgcggaccttgcgcgctatgtcgaggcgaaaatctgcgacatcgcgcaatagcgcgctttgccttgaaaatggcggaaggctccgctacaatgaagagagcaaccgaagaaatgggggagagatatgggtctgatcaaagcggcgggcggcgcgatcggcggcgtgctcgcggaccagtggaaggaatacatctactgcgagtccatggcgccggacgtgctcgtgtgcaagggacgcaagcgcgtcagccagcgctccagcaacaccaagggcgagccggacatcctctcgcgcggaaccgtcatcgcggtcaacgagggccagtgcatggcggtcgtggaccagggcaaggtcgtggagttctgcgccgagcccggcgaattcacctacgacggctcgcccgagccctcgatcttctgcggaagcctgggcgaatccatcaaggagaccttccgccagatcggccggcgcttctcctttggcggcggcgcggcccgggaccagcgagtctactacttcaacctcaaggagatcgtcggcaacaagtacggcacggccaacccggtgcccttccgcgtggtggacaagaacatcggcctggacatcgacatcgccatccgctgctacggcgaatactcctataagatcgtcgacccgctcctgttctacgccaacgtctgcggaaacgtggggagcgactaccgccgcgcgcagatcgacggacagctcaagtccgagctgatgaccgcgctgcagccggcctttgcgcgcatctcggcccaaggcgtgcgctacagcgccctgcccggccacaccatggagatcgcccaggccctcaacgaggtcctctccgagaagtggtcccagctgcgcggcatcgaggtcgcctcctttggcatcaactccgtcaccgccccgcgcgcggacgaggagatgatcaaggacctccagcgccgggccgtcatgcgcgaccccaacatggccggcgcgacgatcctcgaggcgcaggccgaggccatgaagtccgccgcggaaaacccctccaccggcccgatgttcggcctggcgggcgtcaacatggccgccagcgcgggcggcgcgcgcgcggacgcgctctttgccatgggaagacagcaggcggctcaggccgcacaggctgcgcaggccgcgccggccccgcaggccgcgccggccccgcaggccgcgccggcagagggcgcgtggacctgcccgggctgcggggcgcagaacacgggcaacttctgctccacctgcggcgaaaagaagccggagcccaagaaggccgagggcgcgtggacctgcccgagctgcggggcggcgtgcacggggaagttctgccccgagtgcggcgaaaagcgcccggagcccgcgcgggcctggacgtgcgagaagtgcggcgcgcagaacaagggccgcttctgcacggagtgcggcgcgaagaagccggaaaaggcgcgcctctaccgctgcgacaagtgcgggtgggagccggaggacccggagcatccgcccaagttctgccccgagtgcggggacaaattcgacgactcggacgagcgctgacgcgctgcggggcgcttgggggcacgacagaaaaaacgggggctgcccggcattgtggaatgcggcaagccctcgcagaaagaggaggaagagcacatgagcagctttttgcaggacaagatcgcggagctggagcgctacctgccgccgctgacgcgccgggaggactttgacgacttctgggcgcgcacgcgcgcgcaggccgaggccgtgccgctggcgccggtcgtggagaaggtcgactatcccatggacgccgtggaggtctacgacgtctcctactgcgggtttgaccagacgcgcatccacggctggctgatcctgcccgcgttccgcaggcaggagcggtatgcctgcatggtgcagtaccacggcttcggcggcagccgcggcgtgccctcggaccacatggcctttgcgatgctcggctgcgcggtgctggccatcgactgccgcgagcagggcgggatcaccggcaactgcgcccactactcggacagcggcctgttcacaaacgtgaacagcaagggcgtgctgaacaaggacgaatactactaccgcgcggtgtacatggactgcgtcaaggccctggacttcctggagacgatcccgaaaatcgacccggagcgcctctttgtgcgcggaacgagccagggcggcgcgctgggcatggccgtgtccggcctggacgcgcgcccgaagctcgcgctcgtcaacgtcccgagcaacagcaacatcgagtaccgcatcgagcaccggcacgggtccttcacctcggtcaacgactacctgcgcgcctatcccgacaacctggagcgcgtctatgagacgctgagctattttgacaccatgaacctggccgaccgcatccaggccaaggtctttgcctcggtgggcctggccgaccccgtctgcccggcgctgtgctactatgcgacctacaaccgcatccgctccgaaaaacagatctgcgtctatcctttcaacgagcacgacggcgcccgcgccacgcacgtcgagcgggagatccgcttcatccgggagagcggcatcctggacaaaaccggcagctttgcataacattcttcaaaattggataaaaatgcagagagatctgcaacgaaaggccacattctggcggctattcctgcaaaaaacgccagaatgtggcctttttttcgcaaacttgcatgagttagaactttaccttgcaaaacagacagacttgctatattataagaaagattgtagatgcattgctgcggggcagaatgcaagaggaatgtattacgggggtatcctgcaatgaaaattacggacgtcaaaattgaaaagttttccgcaccgctgtccgagccgttccgcgtcgccttcggcgtgatcgaggactccgacagctggacggtcaagatcacgacggacgagggcatctacggcctgggttccgccgcgcccatcggctttgtcacgggcgagacgatggagacctgctacctggtcatgaagatgtttgccgaggcgttcatcggctttgaccccatggacatcgccggcgcgcacaagctgatggacagcatcatctacagcaacggctcggccaagtgcgccttcgacatcgcgctctacgacatcatgggcaagaagaagaacctgccggtctacaagctcctgggcggcacggacccggtcgtgcacaacgacatcaccatcggcatcgacacgccggagaagatgcaggccgcggccaagcgctttgtctttgagaagggcttccgcatcctcaagatcaagatcggcatcaacccggaggacgacctgcgcgccctgaccctcatccgcgaggccgtgggcgaggacatccgcctgcgcgtggacgccaaccagggctacaacgtggagaccgcgctggaggtcctgcccacgtttgagaagctgcacatcgacgcggtggagcagtgcctgccctggtgggactttgacggcgcggcggagctgatgcagaagaacaccacgtccgtcaagctcatgctggacgaatccatccacacgccctacgacgcgcagcgcgcctccaagctccactgcgcggactactacaacatcaagctcatgaagtgcggcggcctctacaccggcgcgcagatcgcggacatcgcgcaggagacgggcgtcaagtgcatggtcggctgcatgcaggagaacaagatcagcatcaccgcgggcgtgagcctggtcgcggcaaagcaggccatcgtcgaggcggactgcgacagcttcatgttcttcaagggcgacgacgacggaatcgccggcggctttgaccgcaagggcgggatcttcaccctcctggacaagccgggcctgggcatcgacatggacatctaaaaaaacgagagatagaaaagaaaacgtctattggaaagaaggggtatgaaaatgtgcgcattggatcgtgtgaaggcgagcgtggaggcggagctcaaggtgtgggaccagccctccatcgccgtgggcgtgattaaggacggcaaggtggagctgtgcgagggctttggatatgcggacgtggagtccggccgcaaggcggacgcggacaccctctaccagatcggcagctgctccaaggcctttaccgcggcggccgccgcggtgctggtggaccagggcaagctcgactgggacaagcccgtgatcgaatacctgccctggattcggttcatggaccccttcaccacctaccacgccacgacgcgcgacctgctctgccaccgcacgggcctgccgcggcacgacgcctactggatcaacggcccctgcacccgccgcgacatggtcgagaacctgcgcaacatgcagcccgcctggtccttccgctcgaactggtgctatcagaacacctgctttgtggcggtgggcatgctcatcgaggcgctttccggacagacctgggaggagttcgtgcgcgagaacctgctcgagcccatcggtatgacgcgcaccaccttctttgtggacgacatcgccggcgatcccaaccacgccgagccctatgaccgcgtggtccccacggacctgaccggcatgacgaagatccccttcctcaagagcgaccgcgaggaccgcgccaagggcatcggcgcgccctatggcccggccggctccatcatgtccacggtccgcgacatgctcaagtgggtggagttcaacctgaacgacggcaaggtcggcgacaagcagatcatctccgaggcgaacatgaaggagctgcacaagccccagatgctcatgagcaccccgctgctgatggactacccggagatggacttctactcctacggcctgggctggttcctggagacctaccgcggccacaagatggtcgagcacggcggcaacatcaacggcttctcggcgctgacgaccatgatcccggatcagaagctcggcgtggtgtgcctggtcaacttcaatgactccttcaacacctacgccacgacctatgacatcctcgacagctacctgggcgccgagggcggcgactggcacaaccggatgcgcgccttcatcgcggacaccttccgcgccatgctggagcagaacaagggcgcagacagcgagcagatcccgaacaccacgcccacgcaccccgccgaggcgtatgccggcacctaccgcaacgcctgctatggcgacatcgtcatcgcgcagaaggacggcaagctcaccttcacctacaacaagcaggagagcccgcttacgcacttccactacgacaccttccgcatcgacgacgtgcacgccctgttcaacggcatgaccttctcctttgagacgggcaagaacggcaaggtcgaggccatccgcttcggcatcgtcatgaaccccgcggccaaggacgagatcttcaccaaggtggaggggtaaaacgccgcaaggcaaggagaaaggtgggagaaccatgaacaacttcgccgagagcctgcgcgcgcaggccgcggagcaggcccgggcgtgggacgtgccgtccctgtccatctgcgtggtccaggacggcaagacccttttgtgcgacggaatcggcatgcgggacaacgcctcccgccccgccgacgcgcagaccctctaccagatcgccagctgcaccaaggcctttacggccacggccgccgcggttctggccacggagggcaagctcgactttgacacgcccgtcatcgagtacctgcccgcgttccggctcaacgaccgctacgcgaccgagaacctgacgctgcgcgacttcctcagccaccgcagcggcctgccccggcacgagtacgcctggtacggcacgggcttttcgcgcgagcagctcctgaagaacctcaaggacctgccgctgagcgcgccgatccgctaccgcttccagtacagcaacttcaattacctgatcgccggcgcggtcatcgaggcggtcagcggcgagaagttcgaggacttcctgaaggagaagctgctcaggcccctgggcatggagcgcagcgagacgtacctggaggccatgcgcacggcggacaacgccgccctgccctttgaccacgacagggagtacaccatgaccggcatccggcagatcccctactaccgctccccggcggaggacgccgaggcgatggtcggcgaccccaccgcggcggccggctgcatctgctcctgcgcctcggacatggagaagtggctgcgctttaccctcaaccgcggccgggtcggggacgtgcagctcgtgcgcgaggacctgatggacctgatcgcctcgagccacatcgacaccggcgacggtggcgcctacggcccgcagcgcgccatgacctcctacggcctgggctggagcctatacagctaccgcgggcacaagatgctcgagcacggcggcaacatcaacggcttcacctcctcgacggccctcgtgccggacctgaacctgggcgtgttcgtcagcgcgaacatgaacgtcaccctgcttgcggacgccctcgtgcagcagaccgtggacatggccctgggcgagacggacggcgactggttcgcgcggctgaaggcgtacaaccaggcgatgttcgacaacgtcgtctccttctttgccgcctttggcggccaggccgtcgcggggacgaagccctcgcacgagatggcggcctatgcgggcacgtacgaggcgcccgggtaccgccgcttccgcatcgaggaggcggacggcaagctcatcgcggacttcaacaccttccgcgtgggcctccggcaccaccactacgacacgttt

SEQ ID NO: 1373 - DNA, 17599 bp, Unknown
  16S sequences of unknown bacteria
agagtgcagtccgaaaatctttgattttcgagcgagcggtattcccgtccaagagcgtgtcgactttttcgacacgctcaaccggggtaaaacccggtattttttattgcaaaacattaagaccgatgatataataatataagtaaaaacgcacttttattttgaaatcggtcagacaatacaatcaggttacaatgcttcccatagcggaaaatttgtccgtttatattgtctcgtcatttgaaatacgacagtattcctgcactcctcgacttcataagcgaaaaattttctagctatgggtcaaagattttgtaagaaaacggcgctgcttagcggcgcggcgcgacgcgcgaagaatactgacgtattgtgagcggagggcaacaatgccgataacagcgtcgtttcttcaaaaaagcattgtaccctgattgtattgtctaaggagttaaaaatgctgcaaaaatttgaatttcataaaaccgagcgcaaaattcttgttaaatcaattataaccgcgattgacgcggtacgcccgcgggatttttattttcccggagaaatgcataacttttgggagatagtatgcgttgccgagggcgcggctatggctaccgccgacgaacgggtttataatctaaaaaagggcgatttgctttttcacaagcccatggaatttcacagagtatggtcggcagagggcaccgcgccgcggctttttataatatcctttgaagccgacagcgacggaacggaatatttttgcgacaggctttttacgcttaacgaccttatgctggaggaatttgcggaaattaacgccgcctgccgcagggctattgagctttatgacaataataaaatgaaggaatacgcttggcaaagcaacttagcggcggtaatgcttgaagcttttttgctgagactccgcggtgaaaaggaaacggcatattatgatgattctcgctatgccgcaatttacaggcaaattgtaaattatcttgaaaacgcctgctgccgcagcattacggttgaggaaacggcgcgcgcctgtaatttaagcgttagcagccttaaacgtatttttaaaatgttttgcgataaaggggtaatagaataccacaattcaatacgtatgcgtatggcggtaaagctgttgggcgacggcaaaagcattgcagaggtaagcgaagacctcggcttttcaagcacttcatattttcacgtcgcctttaagcgagctgccggggtatcgccggggaagctttttaagtcttaatattgaaaaacgaacaaaagtttggtataatgtagatacagcgttcagggggtggcggaatgtcaaaggcggacgagcttataaaggcggtgcttgaaagcaaaaagctatcgggcgaaaaggtttacagcgaccagccccttatattcacagccgcgcaaatgaaaagctacacgccgcccgaatatatcgaaatgcgtaaaatcgcgctgcaaagaaattccattttcgcacccgcgtccgaaatattttatcgccaggctgagtttatggaaaaattcaccgatgattttgaatatcacggtcagttcctgcgctcgttcccgacctaccgcgaaatgagcaatttgcagctgcggggctacttttcgtggcgtgccgccgtgcgaaaaggcaaaattgaaaaaacctgcatttcctttgtgtatgtgtatctttatgagcttttaaacctgataggcgcagaaagccccgaggacgcgtttttaaggcttaaaaatttcgccgttgcttattcggaatacgataagcgggtgcaaagcacggtttcaaagtggcttattgattttgcggcgtattataaccttgacccgcggcttttaaaggattctgaatttttaaaaaatgacggcgcgctgctgcgccttatggattatgaaaaaaacacgcccgaagaagcgcttagcgccgttgagtgcttttcttcctataaaataagcggcgcggcgttttataaaaggttccccgaaagaacgtcggcggcagtttacaatgttttcaaaatgttgctcgaatactataacacttctgaaaacggcaatatttacgaaaagcttttcggcaaaaggcttcacgagccgcactttatattcgaccaggccgttttttatgaaaaagcgccgcaccccgattgcgtttacgaaataaacggaatttaccgctatatatgccgtgataataaatggagcattgaacgcttttacccgcaaaaggataaagcgggtaaggtcggttcgattttaaagggaatcgacagcgccctgcggctgaaattcgggtttaagccgttgataaagtcacccgagctttcacgcgatacagaacgaattataaatgaaacggtagatttggttttcaccgaagaacgcaaagcggctgcgccgaaaattgaaattgatgtttcaaagctgcaaagcatacgcgataccgccgatattacccgcgataagctgattgtggacgaagaagaaccgacagagcaaattatacccgaagcagagccgccgttagcggaaaaaaccgcagacgaaccgtatttaaaggttttaaaggcattgcttaatggtgcagaccccgaaaaggcggcgcgcggcagcggaataatgctgacggtggcaatagacgaaataaacgagcggctgtttgacgatttcggcgatacggttataaattttgacggcgatacccccgaaataattgaggactacaaggaagagttgaaaggaatgttcaatatatgaaaatacccaagcgcatagcctcggtaataataaattcgcttaaaggcggcgttgtgccgagaatagggttgccatacattaccgtgggcagagaaagcgagattgacgcctttttaaacgatattgaaattataggcgagggcggcgcggctttccgctttattgtgggtaaatacggcagcggcaagagctttcttttgcagaccgtgcgcaactacgctatggataaaaatatggtggtggctgacgcggatctatcccccgagcgcaggctccaaggaacgcgcggtcaggggcttgcgacctataaggagcttatacgcaatatgtccaccaagacccgccccgagggcggcgcactcacccttattttagaccgctggataagcgggctgcaaaccgatgttatgcgggaaaactccctcacgattgaggacagccgaatacccgcgcttaccgaaaggaagataagcgaagtaatatcttccctaagtgagatggtgcacggcttcgattttgcgcggcttttaaccgtttattacaaggcgtatttaaacggcgacgacgaaagcaaggcgcgcgttgttaaatggttcaggggcgagtacaccaccaaaaccgaggctaaggcggagcttggcgtaaacataattataaccgacgacgactggtacgagtacataaagctttttgcgcttttccttaaaaaggcgggctattctgggcttttaatacttatagacgagcttgttaatatttacaagatacccaacagcataacgcggcagtacaactacgaaaaaatactcacaatgtataacgacacaatgcagggcaaggcgcagtatatgggcattataatgagcggcacgccgcagtgcattgaagatacgcggcgcggcgtttacagttacgaggcgctgaaatcccgcctgacagaggggcgcttcggcaagggcgagcttcgcgatatgtccgcccccgttataaagctggcaccgctgacatatgaagaattattggtgcttatagaaaagctgaccgaaatacacgctgtgctttatgaatacacgcccgatgttaccgaaaacgatatgatagagtttataaagctggaattttcccgtataggagccgacagcgccataaccccgcgcgaggtaatacgcgattatattgagcttttaaatattatccaccaaaacccgggaacggatataaaaacgcttttgtcttcagacgggttcagctttgcaaagcctgagccgcagggagaggtagccgccgaatttgccgaattcgagctttgaggaacagcgaatgaatgtttttgaaagatacgcgccctttattcaggactttatttacctcaacggctgggaaacgctgcgcggtgtgcaggtggctgcgggcgaggcgattttcggaacggactgtaacgttctgctttccgcctcaaccgcgtcgggcaaaacagaggcggcatttttccccatactcaccctgttttccgaagacccgccgacctctgtgggggctatatacataggacccctaaaggcgcttataaacgaccagttttcgcgccttaacgagctttgcgccgatgcggaaattcccgtttggcactggcacggcgacgttgcgcaatcgcacaaggaaaagcttttaaagcacccctcgggaattttgcagataacccccgaatcgctggaggcgctgcttttgcacaagcacgcctatattccgaaattgttcggcgatttgcggtttattgtaattgacgaggtccattcgcttttgcggggcgaccgcggcgggcagacactgtgccttattgagcggctttcgcgtatggcgggggtaaacccgcgcagaatagggctttccgccacaataggcgaccccgagggcacaggcaaatatttagcggcaggcacgggcagagaaaccgtgataccgaaagtagagcagggtaaggtaaggtggaggctctctttagaacattttttcacaacaccgggcgtggaggaatccaccgcagatgaaaaagcggcattgcccgcccttgatatgaaaaccgacaccgcacccgaaaattcagaccccggctttgcttatgtttttgagcacacaaggggcaaaaagtgccttattttcgttaattcccgcgaagagtgcgaggcggtaaccaccacgctgcgcggctattgcgaggcaaggggcgagcctgacagatttttaattcaccacggcaacctttcggcatccttccgcgagaccgccgaatcggtaatgaaagacgacgagcaatgtatgaccaccgtaaccacggctacgctggagctgggaatagatataggcaggctggagcgtgcctttcaaatagacgcaccctttaccgtatcgtcatttttgcagcgcatggggcgcacaggcaggcgggagctgccgcccgaaatgtggtttgtaatgcgtgaggagcagcccgaggcgcgggcaatgctgcccgaaaccgtgccgtggtcgctgctgcagggcatagcgcttattcagctttacaccgaggaacggtgggtagagccgccaaaaaccgacagactgcctttcagccttttatatcaccagactatgagcacgttggcgtcgtcaggcgagctatctcctgcggcgttagcatctcgtgtgctgacccttaaaagctttgaaagaatagacaaggaagactacaaaacacttttgcgccatttaattgagaccgaccatattgagcgcaccgaaacgggcgggcttatagtggggcttgcaggcgagcggcaggtgaattcctttaaattttacgcggtgtttaaagagaacgaggaatacaccgtgcgcagcaattccgaagagcttggcaccatagtaatgccgccgcccgtgggcgagaaaatagccattgctgggcatgtgtggatagtggaggaggtagaccacaagcggcacttggtatattgcgagcaggtgcggggcaaggtgcccgcctatttcgggcagtgcccgggggatattaatacaaaagtgcttgaacgtatgcgaaaagtgcttgccgaagataaaatctacccataccttatgaaaaacgcgcttggcaggctttacgaggcgcgcagcattgccagactcggcggagtaacaaccgagccgcttataaacctgggcggggatatgtggtgcctgtttccttggctcggcacttatgcctttcttgccatggagcgatttttaaagcttaaatgcgcaaaggatttagggcttacagcccttgaccccgcaagaccgtattttattcagtttaaaatgaaagccacgcgcgaggagttttttgaggttttaaaggaaaaagaaaagcagacgcttgaccctatggagcttgtataccccggtgaagtgccgctttttgaaaagtatgatgaatttgtgccgcccgagcttgtgcgcaagggctttgcctacggtatacttgcaaccgacgaaatgaaagcgcgaatacgcggctgggagctttaattgaatagctttaagccaaaccggacagccgctgactgcggctgtttttttattttatctgccaaaagcacatattttttgaccgccgatttttgagttaaaaaagtataagcaaattcaaggtggataataattccaaaatatgctaaaatatttccataatgaagaggagggcgcatatgtttgaaattgaaaaagataatgctaaaatcggcaaacaccttaaaaagctgattttatcaaaacacaagagtattcggcagttttgcgaaaaatacctcaaatgtgtaaatgagaatgataattatcaagttgaagtaaaagaattggataatatggcaaccagaatgtcggcgattataaagggtaaaaaatcaatccaattttacgatctgcctatattctgcaagcttttggaggtctcctgcgaagaaataataaccgcaggtcagcactatgagcctataagcggccatgtcaccaattatgaaattgccttttcaaaggacagggacaagtgggaaaaatacataaaccgccccgataagctgatactgaactccgatgaatactgtaaaaccgttatagattacgcgcttgaatttaagaattacgattttttaaagtatcttatggataagaattacatatggtttgttgataacagtaaggatgacggcaaaaagtatatcttaaaccgtgcgtaccgtttcggtgccggaacaagcattgaaaagcgcaaattcagcgacacgcttgatgccgagctgatgaaccctatcaaagaaaacaaactgcggcaaaacctgattgctcttgcaattgaaaatagggatattcctatgctggatacgctcagggcacgcgaaatcccggcattatatgaaactactatcggcttcagtacgcaaacaagctgtgaagattattacgatgatacggtaattgaagaaatagtgacgcataacgaggttttggattactttaccgacagtattgagattaagaatcaatttggtaatccgcaaatgtttatttatccgtatatcggcaaagtggttgagcgtttaatagaaattaaaagcaaaaatgcggaatatgttatccgacgaattactgagcacaaccaagcggtttacgaaaaattacaatcattgataaatattgccgttgaaataacaaatttagatccgatgtttcattttgattttaacgatgatgagggttttctatcatatatggttccgggttctaatgaacattttgcaaagttttgcgcaaatgtgatccgcacggatataaaatccaacgattcgacaattgaaatcctgttaaataaattaaacgaaagctatgattcggtaagagatatcaaaccgaatttataatatcattgggaggagaaatatgtattgtcaaaactgcgggaaaatgcaagaaaacggttctgctgtctgcactgattgcggagcggagctgattgggaaaaatgattacgggcgcaataacaaaaaaagcttttggtttgctttattaagctttgtatttcctattgcggggtttatactctatcttatatatgaggacagaaagcctgcacgcgcccattcgcttatagtcggatttgttacgggcattataataaaactgctattgattgttattctgtcggtttttgcgggagttgccataaatcagacgcttaacagcagcgaccttttgtttgacagccttttgtaaaaatgtcattttaataaacagataatatttaattgttgtaaatcagccgacggtattgtataatattctacggtgattataatgacattgcaacagcttcattatgtaatagtaatagcggaaaccggctcaatgaataaggcggcggaaaagctttatattacccagccgtcgcttacggctatggtgaaagagcttgaaagcgagcttggaataattatttttcaccgcagcggcaggggagtatcgctcacaggcgacgggcaggaatttataacctatgcgcgacagctttaccaccagtatgaggagctggctgaaaaatacggtcccgccggcacgcttaaaaagaagttcggcgtatcaacccagcattattcctttgcggtaaaggcttttgttgaaacggtgaaaaattttgatacagcaaaatatgagtttgcaatccgtgaaacaaaaaccaaagaggtaattgaagatgtgcggtcgctgcgaagtgaaataggcataatttatttaagcgattttaaccgaaacttcattaacaaaatactcaaagccggtgaattggaatttcaccgccttatagactgtcgggtttttgtgtacctttggaaaaatcacccgctggcaaataaaaccggcataaccgcggcggagcttaacgattacccctgcctttcgtttgaacagggggcggacagctcgctgtatctcgcagaggaaatttttgtgggaaatgaatttccgcagacgataaaggctaatgaccgcgccacaatgcttaaccttatggtggggcttaacggctttacgctttgctcgggaataatttgcgaggagctaaacggcgatgaataccgcgccgtgccgtttttaaacacagaggaaaacaatcaatcaatggagatagggtacattacaagaaaaaatcagcttatcagtaaaatcggcaatatgtatattgataatataaagcggtaccttacggtgagctataaagattaagcgcgtcgaatttcttcgacgcgcttaatctttatagtacttattttatctcataaccgcctaccggacggatattgagaacacagcagctgccgcacccgaaaacagactcaatcattttcttgtaatcggctaaaatttcagtgggaatgtagcactgtattgttcccgcaaagccgccgccgtgaacgcggcaggcgcccctgccgtttaaaaatcttttggtaaacgcaatagcaagcggcaagccctgctcggcaacgtccgaattggagtacaggttttgcagataatcgtaggaggaattgcccgattcgtttacaagccttaaaaagctttcaaaatcgccggctttcagcgctgctttctgctcttctacgcggttttgctcgttaaagaaatggaaagcgcgcagcacggcacggtcgccgcaggagcgccgcagctcgggaatactcttataaaaacggtcggaatcggcgtcgcgcaggaaatcaacccccagcgcgttgctgatttttttacattctattgttatatcggcgtagtcctgagttaaatttgcgtggttgccgccggtatcaacaacgcaaagggtatagccgaaggagtgaatatcaaggtttatcttttcggttatcggctctgaggggtcgaagaaatcggcataggtaaagccgcccagcgagcttgccatttggtcaagcagaccgcagggcttgccgaaatattcgcgctcggcatactgcccgatttttgcaatggttatttcatcagccttgttttcaaaaaacataccgtttacgatattacctaccaaaacctcaaaagcggcggaagaggaaagccccgagccttttaaaacatttgaagtggtgtatgcgttaaagcccgaaagcgcgcagccaagctccttaaagcgggaaagcacgccgcgtataagcgcagacgcgcggccgtgctcggcttcgttcttttcaagctccgcaatatctataacgtccatatcgtagccctcggacttaatgcgaaccttgccgtcgttgttcggggcgactacggctataacgtcaagattcacaccgcccgcaagcacgcagccgtgctggtggtcggtgtggtttccgcctacctcagttctgccgggggcagagaaaaggcgtatgccgtctctttcggggaaaataccgcaaaagctgtcgcacgcggcgctgtaacgcgcgcgggcggcgcttacatcgccgtaaagcattgtaaaatctttatcaaaagcgccgttttctattttctgtttaatttcggtgatattcataaagccctccgattatgattattttgaaattatggcaagggtgtctcttgcaatggcaagctcctcgttcgtaggaataacgtaaacgtttacgcggctgttatcggtggaaattttaacttccttaccgcggagcttattttgcgcgtcgtcaatttcaacgcctacaaagcttaaattatcgcaaaccgatttgcgcagctcggggtcgttctcgcctatgccgcctgtgaaagctatggcgtcaacgccgttcatagcggcaatgtatgagcctacgaatttgagaatttcatatctctgcatttctattgcaagctgcgcgcgtttattgcccgcctctgccgcggcgcaaatatcgcggttatcgtttgaaatacccgaaattccgagcatacccgattttttattgcagatagtatttacatcctcgggggataaatgctctttctcggctatgtaggtcagcgcagaggggtcgatggttcccgagcgggtgcccatcataaagccgtcaagcggggtaaagcccattgaggtatctacgcacacgccgtccttaatggcggtaatagagcagccgttgccgaggtggcaggttattattttaaggtcttttttcggcttgccctcaattgcggctactctgtcgcttacaaagcggtgagatgtgccgtgcgcgccgtatttgcgaacgccgtacttctcataatactcatagggcagggggtacatataggctttgggcggcattgtctggtggaatgaggtatcaaacacaaccacctgcggaattttatcaccgaaggtctttatgcaggcgcggattgccagcacatgcgcgggattgtgcagaggtgccaatgcgccgagtttttctattttatcaataacatcgggcgttacaaggcagctgttcgggaaaatgctgccgccctgcactatacggtgaccgatagccgaaatttcatcgaacgaatcaataaccttagcgtcgctctttgtaagggcgtaaaccaccgccgcaaaagcctcgctgtgggtgggcatgggggtctctgcagagtattctctgccgtcggcggttttatgggaaatagcgcccgtaacgcctattctttcgcaaagaccctttgcgagtacctgctcattatccatatcaataagctgatatttcaaagaggagctgcccgcgtttacaacaaaaattttcatacttaaaacttcctttggtaaaaaaatttaatttatccttgaaaagtattacctaactaatatataatactgtatatagggcattttttcaagttttttttgcaaagaagtgatattttgtcagcaatcggcgttatagcggagttcaaccccctgcacacggggcataaatatcttttaaccgaggcgcgccgccacggcacggttattgccgctataagcgggaattttgtgcagcgcggcgatattgcgatttttgataaaagaaagcgagccgcagccgcgcttgcctgcggtgcggatattgtgcttgaaattcccgtaagctatgctatgtcaaccgcgcagaactttgcgcttggcggggtttcggtattatcggctttcgggtgcgaaagccttatcttcggcagcgagtgcggagacacggcaaagcttgaaaacgcggcagacgtgctttcggcggtcgaatataaagaacggctgaaaaactacctcgattcggggcttacctttgcggcggcgcgtgaaaaggcggcggggcttggcgaaaacctgcttgccggcgctaacaataaccttgcaatagaatatattgcggcggcaagggcgataaacgccgatatgaaatttttaaccgttccgcggctgggcgcggcgcacgattccggaacagcagaaaacggctatgccgcggcttcgcttctgcgcgaaaaaatgcgggcgggggatttggatttttgcaaaaaatatataccgcccgaggcttataagtttttcacgcccgaagatgcggcggatattaaaaagctcgaccgcgcaatacttgcggttttaaggcaaaaaacgccagaggacctgaaaaagctgcccgatataagcgagggaatagaaaataagcttttttccgcaataaggcttgcaaacagcacggaagaactgtataatacagttaaggtcaagcggtatacccacgcgagaataaggcggcttgcgctgtcggcttttttagggcttgataacgagttctttatgaagccgccgccgtatgtaagggtgctcggctttaacaaaaggggagaagagcacttaaaacaggcggcagaaaggtctcccataccggttataacccgcgtatcggatattgaaaggctgtcctgcggcgcgaaacggctttttgccgcggagtgccgcgcaacggatatgttctcacttgccttacccgtgccgcagccttgcggggcggagtataccgcaaaaattataaaaacggagtgatttttatggtaagcataaaagaaattgaaagctttaaggattacgggcgctgtatctgcgttacaaacggcgtaattgaggcgtatgtaacggtggatataggaccgagaataatacgtttcggctatgttgacgggcagaacataatgtgctcaaaccgcaaggcgttcggaccgaaggacgataaggaatttaccgattatttcggcgagggcaagcgctgggaaaacctcggcgggcacagaatttggctgtcacccgaaagctaccccgaaacatattaccccgatctagagcctgtaagctacgaaattaccgaaaacggcgcggtatttacaccgaatcccgaggttgaaaacggcgcggctaaaagccttgaaattaaaatggacgcagacgacgcgaatatgcaggttataatgcgcgttaaaaatatttcggaaaaggataaggatttcgcaatttggggactttcggtttccgaaaagggcggaacgcttattatacctatgaacactaacgatacggggctgctttcaaacaggattatttcggtttggccctataccgatatgagcaacgaccgcatttactggggcaacaagtatgtaaccctaaggcaggattcaaaatacgataagcccataaagcttggctttgaccttaactgcggcacggtttattactgccttaacgatgatattttctgcaagagctacgatacaaaccacccgaacggaaattaccccgacggtggctgctcatttgaaacatacacaaacgacagtatgattgaagtggagtcactcagcgagcttaaaaccgtaaagccgggcgagaccgttacccacaccgaaagctgggcgctctgcaaaaaaccgtgtgatattgattttaagaacgataaatcaattgaaaatatgcttgaaaagctttaaaaaccgtaatttttgatttaaaccgtaagtgaggtggagctatgggtggattatgcgtgctattgctttcggcagtagtagcggcgatttattattttttcatcgcagttttggcggcaattattttttatacgctggtaagttatgtccttgaaagcttcgcggcaatgcgtatgggtgaaaatttgaattataaagtaaaattcgcagcctggattccggtttataataaatacatacttggcagaattgcagaaaataaagcgttgggcggcatttccggtgtattaacgctcgcagaggtttgcctgtgcatatatttttatttcaatcgggaaataaatacggcgttgtttattttactgattgtatgcgttattatcactttcattattgatacggtaatttcgcataaattgttttcgcagcgcataaataaaaacgccgatatattaactgctgtaaatgttataaccttaggtattttgcgacctgtatttttgtttgcgctacgaaacagattagataaagctcaaacaactcctgcaagcgaataaccgcttgcaggagttgttgctataaaagcatttttagtttttctatatccgacgatgcggtttcgggcgtttctttaaggggaaagtcaagccccagcttttcatactttgaaacgcagagctttctgaacggcaaaagctcaatttcactaacgcatttaaaaggggagaccagttcttttagtcttttaatgctttcgggggtatcgtttaagccttttattataacctgccttattcttgtgggaatattgcggtcattaagctgttttaaaaaatatgtcggttgtgcaaggctgcagccgacatattttttatattgctcatcggtcgtgtattttatatcgagcaggcagtagtcagtgtaatccaaaacaaaatcggctgagggttcacacccgcttgtatcaaggcaggtgtttattccgttttcgcggcaaagcttaaatatttcagccgtaaattcaggctgcaaaagcggctcgccgcccgaaagggttattccgcccgttttgccgaaatactccttatatttcagcgcgcggtttacgacctgctccgctgtgtagaccgtgccgccatttaagccccatgtttcggggttatggcagcaggcgcacctgagcggacacccctgcgtaaacgctacaaagcgaacgccggggccgtcaagcgtgcccatactctgaaaggagcttatatttcccttgatttcagccatttattacattgcctcatggaaggtgcggcttataacctcgcgctgctgctcgcgggagagcttgtggaagttcaccgcatagcccgaaacgcgtattgtaaggttggggtaagcagtggggtcgttatacgcctcaataagggtctgcctgtttaaaacatttacgttaatatggtgcgcctttttggcgaagtagccgtccagtaccgaaacaaggtttttaacgcgctcatcacccgttctgcctaaggtatcgggggttattgaaaatgtgttggaaatgccgtcgcggcaatcgtcatacgaaagtttggcaaccgagttaagcgaggctaaagcgccgttttcttcgcggttgtgcatggggttagcgcccggggcgaacggtgcgcccgcttttctgccgtcgggcgtggcgcccgtgtgcttgccgtacataacgtttgaggtaatggtaagcaccgaaagggtatgctctgcgttgcggtaggtgggggttttgcgcagctcggttataacaaggtgggtaaggtcctttgctatcatatccacacggtcatcgtcattgccgaatttcgggaaatcgccatcggtcttaaaatcggttatatagccgttttcatcccttacgggggttacgcgggcgtattttattgccgaaagggagtcggttataaccgaaagccccgcaatgccgaacgccataaaacggtgcacgtcggtatcgtgcaaagccatttgcgccttttcataggcgtatttatcatgcatatagtgaataacgttcattgtattaacatagagccttaaaagccacgccgcgtattcggtgaaacgctcgtaaaccttatcgtaggagagcacgtcgtcttcaaacggcttcatttgcggacctgcgtttataccgcttgaggtatcgtaaccgccgttgagcgataaaagcagcagctttgcaaggttgcagcgcgcgccgaaaaactgcatttgcttacctattttcatagccgaaacgcagcaggctatggcgtagtcgtcgccgtatatcgggcgcattacgtcgtcgttttcgtactgtatagaatcggtatcgcacgaaactttagcacaaaagcgcttaaagctttcgggcagcttatttgaccaaagcacggtgaggttcggctcgggggaggagccgagagtatacagcgtgtttagcatgcggtagctgtttttggtgacgagcgttctgccgtcctcgcccatgccgcctacgctttcggttatccacatagggtcgccgccgaaaagctcattatactcgggcgtgcgcaaatggcgcgcaatgcgcagcttcattacaaaatcgtccataagctcctgcgcctggcgctcggtaagcgtgccgttttcaaggtcgcgttcaatataaacatcaaggaacgtgcttactctgcccagcgacattgccgcgccgttttgctctttaattgcggcaaggtaggcaaaataagtccactgcaccgcctcgcgcgcgttggcagcgggcgcgcttatatcgtagccgtaagattccgccattttcttaatatcggtaagcgcggctatctggtttgaaagctcctctgataaacggatatgctcctcatcaaaattaacgcccgaaagagccgctttgtcctttttcttttcttctatcagcctgtcaattccgtaaagcgccgcgcggcggtaatcgcctataattctgcccctgccgtaagcgtcgggcaagcctgttataaggtggctgtggcgcgccttgcgcatttcatcggtataggctttaaaaacaccgtcgttatgggtagttctgtatttaaactgcttttcaatgctgtcggataacttatagccgtaagcctcgcacgcctgccgtgccatacgaataccgccgaagggattaacgccccttttaagcggacggttggtctgcatacctacgattatttccttatccttttcaatatacccgggagcatacgcggtaacggtggatattgtttcggtatctatatccagcacgccgccgaactgcttttcaacctcaaaaagtgtattaacccttttcataagctcctttgtgcgctttgtggcaccgcttaaaaagctgtcgtcgcctgtgtattcgcggtagtttttttgaataaaatcgcgcacatttatttcttcctgccatttgccgcctgtaaatccgtcccagtttttgtgaatcatttatattgaaccgcctttgcattatactggtataataatacaatatattgtgccgtatgtcaatacgaagttctatattttgttattatgagtaaaagcccacagattatattcattcttgggttttataattggctatacaatataattcacaatatttaaaggcgcaaaaaatcctccctttaatggggcggtgacttaggaaaacattgaagcaaggaacggtgtagcttaacggctatgc

SEQ ID NO: 1374 - DNA, 32759 bp, Unknown
  16S sequences of unknown bacteria
agctacgaagagccgggcaatgaagaaacggaagctccaagctacgaagagccgggcaatgaagaaacggaagctccaagctacgaagagccgggcaatgaagaaaccgaggcaccgggcaatgaggagacggaagctccttcaacttcaggtaccggtcagcagatcgcagactatgcagtacagtttgtcggcaatccatacgtatggggcggtaccagcctgacgaacggtgcagactgctccggatttaccctttccgtatttgctaattttggaatcgggctttccagaacggcagaatcacagtcctacggcggaacatccgttgattttggcagcctgcagccgggcgatctgctcttctacaattcgacaggaagcatcgatcacgtggcaatctacatcggcggcggccagatcgtgcatgcagcaaactcgagaaaaggaatcattatttcggacgcgtactatcagacgccggtgtgtgcaagaagatactggtaagaatcaccggacttttctggtattcacttcgaaacgaaccctgatatttataggaaagaatactgcggtaaaggtgagaagccagaaaatcctgacggagcatttgcccggcgtttgctgaggactgactttcatcgccccagtattcctctaaaagagaagcagccttcgctggttttacgatcagcggaatccggctgctttttttgatttcatgaagcagcggggaagcctcagagcgaaaaccgagcacctttgcgtaatagatcatgtcatctgcacggaatgcacgcaggtcttcggtacgaaggccgagaatcaggtgcagaagcgcgcgctgaatccgaacctgtgtcagctgtctcgtcttgagcagttctatgatctcaccgtaggaatgcccgatgcaggaaaaacgaagctttgcaatacggtcagacaggtcggaggagatgtcgaggatgtcagagaaatcatcgcgttctaaaagcttcggaatcagaaacgggagcagatcgtccggagagacgggagccgcagcagctttctcaaagagagaatggcaattggtcggaacgtaagtgagtatctcggcgggtaagttctgatccgttccttttttctgtgaaaaccggtcagaatcagagatatgaaaaagtttcgattccctgatgccggtgatgtcactgcgaggggaaaagagactcttatctgggacggaatctgaagatttcgggcaggaagccgtaagcagtgcctgccgtagcgccgtcgccgagcagaaattcccctcaagcgccgtgctgtcatatccgtttccctctcttcggattggaagaggacggatcgcagaagaaaatttctgcagcgccttgcagtattcgacgccgagcacgttgttcggggtaccaagcagggaagcgagggcaggatcttccgcctgcagtgcctgggcacgcgcctgcgggaatgtttttccggcgcgaagcaggccttggagacgcgtacggtaggactccggttcattcaggagaaagtccgccgcgcacgcaaagagagacgtgtcaatattattctcagattcagaaaaaacatggctgtcagaaggctcataaaaggatgagacaggcgttctcgaggcctcactcccgaaacacagcgcatccacgacgccgagccggtcaagcagtgctaccgcgccttccgcaaaaaattccgcgcttccgcaggcatagcagacgggcagctcgagcacgaggtctgcgccggcgcgaagtgccatttccgtgcgcatatatttgtcaaaaacagccggggtgccgcgctggacaaagtcagggctcatgacgatgatggcgtagtcggcgcccgatttctttttcgcctcttttaaatgatattcatgtccggagtgaaacggattgtattctgcaatgatgccgacagtacgcatgagcaatgtctccttttggggtgaggttatccgcactgcatcggtaaaatgcaggctcttttgttttcttttcaaaacaatacagataaaacccattttatcagacaaaaaagcgctgtgcaacgcaaatttcatcttgtccgctgtaagaatttgggttataatcgaactagctgaaacatgataactgtatacctgtgcgcaaaaatggttactgttcagagccaacctccaaaatgctgcgcatttcgtcggtgtggcctatccgccaaagaaaatttcaaaaacagctttaaaaatgcaagcattttacagctgttttatgaaattttgcttggctctgaacaataaccaaaatgagtcagcagacggctttgccgggcacggggaaagcgacagttacaatacgaaaggagtccatgagtcatggcaattattgatgttctgaaagagaaagcaaaagcagacaaaaaaacgattgtattaccggagtctgaagacagaagaacctatgaggcagctgcaaagatcctcaaagagggtatcgcagacattatcctggtaggcagcgaagaggatgtaaagaaaaacggcgaaggtcttgacctgacaggaatcaaggtcgtagatccggctacttctgacagaacggctgcatatattgacaaactggttgagttaagatctaaaaagggtatgacaccggagcaggcaaaagagatccttctgaatcagtacctgtactacggcgttatgatggtaaagatgggcgatgcagacggtatggtatccggcgcatgccattctaccgctgatacattaagaccgtgccttcagatcctgaagacaaaaccgggtacaaagcttgtctccgcattcttcctgatggaagttccgaactgtgagtttggcgagaacggcacatttgtatttgcagactgcggtctgaatcaggatccgacaccggaagagctggcagcaatcgcagcatcatccgcagagtctttccgttccctcgtaggcgcagagccgaaggtagcattcctttcccactctacaaagggaagtgcaaagcacgcactggtagacaaagtggtagaggcaacaaagatcgcaaaagagcagaacccggatctcaaactcgacggcgagatgcagcttgacgcagcaattgttccgagcgtaggcgctgcaaaggctccggacagcgacgttgcaggcaaggcaaacgtcctgatcttcccgaaccttgatgcaggaaacatcggatacaagctcgtacagagactggcaaaggcagaagcatacggcccggttacccagggtatcgcagctccggtcaacgatctgtcccgtggatgctctgcagacgatatcgtaggcgtagtagcaatcacagcagtacagtgtcagaataagtaataactaggataaataataaaaggtaatcttaagagccagataaaatttcgggatacagaagaggaacagctgtattttgaaagctggctctaagtagttacataaaagaaaaagatatacacaaaccccaggaggatattagaaatgaacgtattagtagtcaactgcggaagttcttccctgaaattccagctgatcaattccgatacagaggctgttgcggcaaagggtctctgtgagcgtatcggtatcgacggaagactggtatatcagccagcaggcggagagaaagaaatcacagaagctccgatgccgacccataccgaggcgatccagatggtactggatgcacttgtaaatccgaagaccggtgtattaaaaagcttggacgaggtagaggcgatcggacaccgtgtactgcacggaggttccaagatcacacagtccgttatcattaacgacgaggtaatctctgttatcgacgaatgctgcgaccttggaccgctgcacaatccggcaaacctgatgggaatccgtgcctgcatggaactgatgccgggcaagccgaatgtagcagtatttgataccgcattccatcagaccatgccgccaaaggcatatcgctatgcgattccgaccaagtattatgagaagtacgcagtacggaaatacggtttccacggaacgtctcatagcttcgtatccaaagagaccatcaaataccttggccttgacaaggacaacagcaaagtcatcgtatgccacctgggcaacggcgcttccatcagtgcggtagagaacggtaagtgtgtagatacttccatgggcctgactcctctggaaggtctgatcatgggaacacgttccggcgatttggatccggcagttcttgagtttgtatgcaagaaagagaacatcgatgtgaaagagatggttcgcatcctgaacaaagagtctggtgttatggcactgtcaaacggcctgtccagtgacttccgtgatctggaagaggcaatggataacggcaacgaggcagcaaagcttgcaattgatgcattctgctaccgtgtagcaaaatacgttggttcttatgtggcagcaatgaacggtgttgatgcaattgcatttaccggcggtatcggcgagaatgcagatgttgtacgtgcaaaggttctgtcctatcttggatatcttggaatcaagatggatccggagatgaacaaaaagcgcggagagaacttcgtactttccaccgaagattccaaggtaaaggttgcagttattccaaccaacgaggaactggcaatctgccgtgagaccgtagagcttgtaacagctgcaaagtaaaaattttctgaaaaatttgttgacaaacagctgtcatacgggtataatctaaaaagtgcgttaaaggaggaatatgtcttggtggaccttacggaagtgcttttaaccgacggcaaggtgataaaacgcgaggccgacatcacactgcacaagctgtcttaccgtttcggtgattttaagatcaggtgtgcgtctccgctttctcttacaatagagaataaaggagaaaaaaagctgatgataagtggccaggcgtcccttgaagtattgattccctgtgcgcggtgtctggagccggtggcttccagaatagacattcagtttgaaaatgagctggatgtagaggataaagattatattgatggatacagcctgaatactgatcagcttgttcatgatgaggcgctgctggtatggccggagcgggtgctctgcaaggaggactgcaaaggtctctgcccggtatgcgggaagaaccagaatcttggttcctgtgattgtgatacgacagtgcgtgatcccagaatggcaaaaatccttgatattttcaacaatgcaggaaaatagcgaaagcagtttcctgataaacagaagccgcagtttctgtggttctgattttgagtaaattagagctttaaggaggtgttaccgtgtctatctgtccgaagaataaaacttccaaggcaagaagagataagagaagagcaaactggaaaatgactgctccgaatcttgtaaagtgcagcaaatgtggagcgctgatgcttccgcacagagtctgcaaggcttgtggaacttacaacaagaaagaaatcatcccggtagaggactaatcctcgtgggaaggtgacaggggatctgccgtacggagttatccggcggcagattttttgttaccgcttagagccaagtaaaattttataaagcgaccgtaaaacgcttgcgtttgtgcgggcgtttttaaaattttatttggcggatacgccgcactgacgaaatgcggagcattttgaacgcagatcgcgaagtgggctgtgttcatgagcaagtagcgaaagcggattgcgaatgtccgctgtaatatgttggctctgaatggtaacaaaaagcgcgataatttattgttgatttttagaatgatgtttagtatattatgtaatagaaatgcaggaggaaaaattatgagtgaaatagtccgtgtggtcgtcgatgcaatgggcggcgacaatgcaccagaagagattgtgaaaggcgcgattgcggcggtcaacaatcacgaggatattcatctgatcctcaccggcttacaggacgctgtggaacgtgagctgaaaaaatacacgtatccggccgaccgggttgaggtggtgcctgtttcacaggtaattgagaccgcagagccgccggtggcagcgatccggacgaagaaggattcttcgatcgtggttggtctgacgatggtacgccggggacaggcggatgcatttgtatctgcaggcagcacaggcgcggtactcgtaggaggacaggcgatcgtcggaagaatcaaaggaattgaacgtccggcacttgcgccgctgattccgacgaaagatggagtggcacttctgatcgactgcggagccaatgtggatgccagatcttctcatcttgttcagtttgcaaagatgggttctatttatatggaacatgttgtcggtgtaaagaatccgaaggtaggcatcgttaatatcggagcagaggaagaaaagggaaatgcgctggtcaaggagacgtttccgcttctgaagcagtgtgacgatatcaattttaccggaagcattgaagcaagagaaattccggccggagcatgtgacgtggttgtctgcgaagcttttgtgggcaacgtgatcctcaaactgtatgagggtgtcggaagcgtaatgatcaaaaagatcaaagagagcctgaaaagcgatgtgaaaaccgcagttggcggtatgctgatcaaaccggcattgaaaaagacgctgaaatcttttgatgcgtcacagtacggaggagcaccgcttctcggactgaaggggctggttgtcaagacgcacggaagtgcaaaggcagaagaggtggagcactccgtataccagtgcgttcagttcaaacagcagaggatcagtgagaagattgagatggcaatacataaaaacgaagaatcaaagtaaggagagatttttgttatggaatttgaaaaattgcagagtattattgctgaagtattgaatgtcgatgcggatgaaatcacaccggagactacatttgtagatgatcttggtgcggattcactggatgtatttcagatcataatgggaattgaggaagaatttgatatcgagattccgcaggaaaaggcggaaaagatcgtatccgtcggtgatgcggcagaagcgatcaaagctgcagttggctgagaaaagacgaaggggggctgaaacagagccccctttttatggtatgtacgctcggagcctttcctgcacttgcttttgcggatgacaaaaaatcctctcgcaaaatcaagcacaaaaagactccgagcgtacataaattgcagcagaaggaaaaataagaagaaagaaaaagcgaagagggaagaattatggcagatatgaaaattaaagaactggagcagatgatcggttatacatttcgggatccgcagatgcttctgactgcgatgtgccacagctcttatgcgaatgaacatcgtcagaaacagatgcatgataatgaacggctagagtttctgggcgacgcggtgcttgagattgcgagcagtgatttcctgtttcatcagtatccacagatgccggagggcaaactgacgaagctgcgtgcgagtattgtgtgtgagcctacacttgcgctgtgtgcaagggagattcatctggaacatcatctgctgcttggaaaaggcgaggagcacacaggcgggcgttatcgcgattcgattgtatccgatgccatggaagcactgatcggtgccatttatcttgatggtggttttgctaatgcaaaagagtttgtcgagaaatttattctgacggacattgagcacaagaagctcttttatgatagcaagactatcctgcaggagatcgtacagcgtgatttcaaggaagaagaaattcagtatgtgatcatcggggaagagggaccggatcatgcgaagcgctttatcgtggaagtgcggatcggagagaagacggcaggcacaggcaaaggaagcacaaaaaaggcggcagagcaggaggcggcttaccgtgcgatcattgctcttcgcggaaagcagtaaagtatcgaaaggaatccactaaggtatgtatctgaaaagcattgaagtccacggctttaaatcctttgcgaacaagatcgtgtttcagtttcacaatggaatcacggcgatcgtgggaccgaacggaagcggaaagagcaacgtcggagacgcagtgcgctgggttctcggtgaacaaagtgccaagcagctgcgtggtgcgagtatgcaggatgttattttttccggaacggagctgagaaagccactggggtatgcatcggtatcgatcacactggacaattctgaccatcagcttgcgattgcctatgatgaggtgacggtgacacggcgggtgtaccgttccggggagagcgaatacctgattaatgggacacaggtgcggctgaaagatatcaatgagctgttctacgacacgggtgtcggaaaagagggatactcgatcatcggacaggggcaggtcgaaaaaatcatcagcggcaagccggaagaacggcgcgagctttttgatgaggcggccggcattgtaaagtttaagagaagaaaatatacggcacagaaaaagctggaagatgaaaaacagaatcttgtgcgtgtcaatgatattttaaaagaactgacgcgtcagctggagccaatggaaaagcaggccgcgaccgcacgtatttatctccagaaaaaagaagaactgaagtcatatgatattaatctgtttctgaccgaatacgaacagatcgcaaaagagctggaagcaacccgggaaaagcaggaggtcgcacagacgcagctggaggagacgaaggctgagtatgaaaagacaaagaccgagtatgagacactggcgcaggagatcgaggcacttgcgggacagctgcaggaaaagagggatggtatcacggaaaatcagctgaaaaaacagcagatggaaagccagatcgagctgttgaaggagcagatcaacacggcacatgcgagtgatgcgcatttgaaatcccggatcacgctgatcaatgaggaacaaaaagaaaagaccgcgcagcaggacgaggcggcgcggcagttatccgaactgcgggcacaggtaaaagaggctgccggaaaagaaaagcaggcggtggaagcggcgcagcagctgcagaagacgatcacttcgctggaacaggcggtggcagacggaaaaagcaggatcattgaaatcttaaacggccgtgccggagtcaaaggccgaatgcagcgccatgcgacgatgcttgagcagacacagatccgcaaggcacagatttcgcaggaagcgctgcggctgcgttccgaggagtcggagcaggcagagcgtctggcagaggtgaaaaaagagtacgatgctgtgacggaccggatccacattttgacagaaaagagtgaggtgacaaatcaacagcttggcgaggtacagcagaagctgacggattacaatcatacgattgaacaggagcagatcgagtatcacagagaagcatcgcgtctggaatcgctgcgcaacatcacagagcggtacgatggctatggcaacagtatccgccgtgtaatggagcagaaggagcgcgtgccggggattcttggcgttgtggcggatatcgtcaaggtggacaaggcgtacgaaactgcgatcgagacggcgcttggcggaagtattcagaacatcgtgacagacacagaggagacggccaaaaagctgatcgaatttttgaagcgcaataaatatggaagagcgacatttcttcccctttccggtatttccggaaagggtgggatttcgagtccgcaggcgttaaaagaaccgggcgtgatcggactggcatcctcactggtgtatgcagatgatcggtatgcaggacttttgcagtatctgcttggaaagacagtcgtggcaacgaacatcgatgcggcgattgcacttgtgcggaaataccgccattcgctgcggatcgtgacgacggacggtgaacttttaagtccgggaggttcgatgagcggaggtgcgttccgcaattccggcaacctgctgggacgccgcagagagatcgaggagctggagcgccaggtaaagcatcgaggcgatgttttaaaagagatgcaggagcagatcgatgcctgccgcacgagaagaaacgcgctgcgtgatgagatcgtaaggcagaaggaggatctgcagaaggaatatattcgccagaatacggcgaaaatgaagtggaatgaaataaaagaaaagactggaaatgtcacggaaggatatgagaagatccgccgcgaggccggagagattgaagagcagatccgcgagatcaaagaccgccaggatcaggagcaggaggcactggaagcatccgaggcgcaggagaaagagacggagcaggcggtgcttgcgaatcagagcgaactggacgcaaagcgggaagaagaacgaagttcaatggcggatacagagcagctgcatctggcacttgccagtctgcgtcaggaagagcagttcattcatcaaaatatggcacgaatcaggcaggagcaggagcgcctgagcgaggagcgatcacagcatacggaaggaattgcacaggcggcgagggatgtggccgaaaaggaagcgcagattcgtgaaatccgcggaacaatcgaagcatttgccggggaagaacaggcggcgcgggaggagattgagacgctcggaaagaaaaaagacgagaaaaacgaggcgcataaaaggaagctgcaggcgcgggaggatctctcagaacggatcagccttctggaccgtgagaatttccgcctgaatgagcagatcgaaaagatgacagagcgccaggacagccaggtatcttatatgtgggaggaatacacgctgacctttggcagtgcacaggagtaccgtgatccatcaaagacgaatataccggatctgaaaaaagcgatcgctgtattaaaaagcgagatcagaggccttggcagtgtcaatgtcaatgcaatcgaggactataaggaactgctggaacgccataccttcctgacaacacagcatgaggacctgttaaaagcagaggaggcgctgatccggatcatcgctgaactggacgagggaatgcggattcagttcagggaacagtttgcaaagatccagacagaatttgacaaggcgttcagggagctgttcggcggtggtcatggtacgctggaactggtcgaaggagaggatatcctggaagcaggcgtgcggattaccgcacagccgccgggaaagaagctgcagaatatgatgcagctctcaggaggggaaaaatccctgacagcgatcgcgcttctctttgccatccagaacctgaaaccatctccgttctgtctgcttgatgagatcgaggcggcacttgacgagagcaatgtcgaccgttatgcacggtatcttcacaaactgacgaagaatacacagtttatcatcatcacgcacagaagaggaacgatgacggcagctgaccggctgtacgggatcacgatgcaggaaaagggtgtatcggcactcgtttccgtaaatctgatcgaggatgacctggatgcgtaagatatagttgtatttgtgaaacatcggtgataagataaagcagtatcagaaagagaaaaatgaggaggaaacaggaatggaagaaaaaaagggctttttcaaacgtctggtagccggtcttgcgaagaccagagagaacattgtttccgggattgatgcaatttttaatggattttcaagtattgacgatgacttttatgatgaaatagaagaaattctcgtgatgggggacatcgggatcaatgcgacgacctctattattgaggatctcaggcagaaagtaaaagaccgtggcatcaaggatccggcggcctgcaagcagcttctgatcgacagcatcaagcaggagatggatgtcggagagacagcttatgaatttgaaaacagaaagtcggtcgttctggtgatcggcgtaaacggagtcggaaagacgacgagtgtcggaaagctggccggaaaactgaaagacaagggcaagaaggtggtgctcgcagcggcagatacgttccgtgcggcggccggggaacagctgatcgagtgggcaaaacgagcggatgtagatatcatcagcgggcaggacggttccgatccggcatccgttgtatacgatgcgatctccgcggcgaaagcgcgaaatgcagatgtgctgctgattgatacggccggaagactccataataagaagaatctaatgaatgaactgggaaagatcaatcgaattctggaccgcgaatacccggaggctttccgggagactctggtcgttctggacggcacgaccggacagaatgcgctcgcgcaggcacgggagttcaaggaagtggcagatatcaccggcattatcctgacgaagctggatggcacggcaaagggcggcatcgctgtagcgatccattctgagcttggcattccggtgaagtacattggtgtcggagagacgattgatgacctgcagaagtttaatgcagatgagtttgtgaatgcactctttgatgtgaagcaggagaattagccatggcaggatgaaaaaaagggatgggccgcgggacaactggcggccggaaatgaagaagcggattttgaagatccgttttgactgataagaaaaggacaggtacaataagatggaaatgttgacattagaggcatttgaagaggcttccgagtgcgtgaagcgtgtgacgcaggagacaaagctggtatacagcgaatatttcagcaatcagacaggtaataaagtttatctgaaggcggaaaatatgcaggtaacaggcgcttataagattcgcggcgcttattataagatcagcacaatgagtgaagaagagcgtgcgaaggggctgattaccgcatcggcgggaaaccatgcacagggcgttgcatatgcggcaaaggcttacggctgtaaggcggttattgtaatgccggagacgacaccattgatcaaggtaaaccgtaccagaggctatggtgcagaggttgtactgcacggtgatgtatatgatgaagcgtgtgagtatgcattccagctggcggaagaaaatggttatacgtttattcatccgtttgatgatccggctgttgctaccggtcagggaacgatcgcgatggagattgtgaaagaacttccgcttgtagattacattcttgtaccaattggagggggcggactggcaaccggtgtttccacacttgcaaagtatctgaatccgaagattaaagtaatcggtgttgagccggaaggcgcagcctgtatgaaggcttctctggaacgtggtgaggtgatgacacttccgaaggtcagcacgattgcggacggtacggcagtcaagacaccggggcacaacattttcccgtatatccagaaaaatgtggatgaaatcctgacggtaagtgacgatgaactgatcgtggcgttccttgatatggtggagaaccacaagatggtcgtagagaattccggccttctgaccgtggcagcactgaaacatctgaatgtgcgcggaaagaaaatcgtttctgtactttccggcggaaatatggacgtcatcacgatggcttctgtcgtacagcgcggactgatccagagagaccgtatcttcacggtatctgtccttcttccagatcgtccaggtgaactggtacgtgtggcaagcgtcatcgccgagcagcagggcaatgtcatcaagctggagcataaccagtttgtttccaccaaccgcaatgcggcagtggagctgcgtattacacttgaggcatttggcacagaacataagatgagtattattcaggcgttgaaggatcatggatatgatccggtgcaaaagacggcgagcctgtaaaaagaaatataaaaaggaatggcatccgagaaattctcgaatgtcattttttgaacgcagataggcattcccccgcttcaagtgtgcggagcactagagcgagtctgttttacagatcaggaggaattcatggacagcgattatctggtagaaccaattgcagatgcgattcccattctctcaggttatatctgcacatgtgctgtttttatgttacattcagtgtaattagaatgtgttatacgaattgtacataggatggagtgagcaaaatgacagataagaagatatactatcatcttcctggattatttgaattttatgagctgtatcgagtctttctgccagtatttcgagaacaccgggaatacttttatgactggtgtgagatcggttcgatatatggagcgccatctgactgtatctggggtggaggacgtacctcttttggagatgcagatccgcaggaagtgctgacactgacgcaggaatataagatatctgccagactgacattcagcaattcacttttgcgggagaaacatctgcaggatcggaaatgtaatgcattatgtgaactgtttgaaaaacagaccgaagtaaaaaatggagtgattcttcactctgaattgctgcttgattatttacagaatacgtgtccggatctttactttgtctcttcgacaacaaaagtcctgacagattttcagcagtttctggaggaagtggatcgggaagaatttcgctatgtcgtaccggattttcggctgaacaaggtgtttgacaaattaaagcagatgggcgacagtcagaaagaaaaagtagaattcctgtgcaatgaatgctgctggtttggctgcaaagacagaaaagcctgttacgaatccgtcagtcggaaaaacctgggggaaagctgcccggaacatcattgccatgcatctggggcagaagacggatatctgttttcaaaagcaatgacgaatccaggatttatcagtgtaacagacatccagagggtgtatcggccgatgggattttctaattttaaaatcgaaggccggggacttggaagcgcactgattctggaattcctgttatattatatggccagaccagaataccagatccacgtcagggaaaagatttacctggataccatgctggatcttttttaacccaatggggacgggaaaaagtggttttcatctcacctggatagagtgtataataatgaaagagaggacagggcatggcattatatgcgcttggagatatgcatctggctttttcggtagacaagccgatgggcaggttcggaaaagtctggaaaaaacatgaggaaaaaatagcaaaaaactgcggcgaagtgattcaaagggaagacacgcttgtgatcacgggcgatcattcctggggaagaaaactgtcagaggcagagaaagatcttgattttattgcgaagctcccgggaagaaaaatcctgctgcggggaaatcacgatatgttctgggatgccaggaaaacgtcgtctctgaatcaggtgtatgcgtcccggctctgctttctgcagaataattattacagttaccaggattatgcgcttgtcgggacgaaaggatatacgtttgagggaccatttttcatcaattcgagaggtgagatcatcggctggaacgaagatgatgagaaaaaagcgcagaagcttgtaaagcgggaggccgagaggctgcgaatttcctttgaagccgcgaaaaaggatggttttaaaaaatatatcatgtttcttcattatccgccgacgaatgttctggaaagggagagcatcttcacacagatggcggaggagtatggtgcagaacacgttgtctattctcactgccatggggaagcacgctttggtgacagcattcgcgggatgcatcacggaatacagtatcatctggtgtccggggattatctgaatttcagaccggagaagatacttccataggcgggaatctcataaggagagccccatttgtggagaatgagagctccggcagagtgaaaagtctgccggagcttttgcgctggtaaatgataaaattcagttttggaactccgtctggatttcagcaatccgggcgagcaggacatcttcctccatttcaaaacagggagccagttccgctgcgattgcatgaggggaaataccggagtttaaagatcctccttattatatcatatagtgatgataagcggcaagttgaatgcaaaagcactattttgattataaaatacaacaaaataaatataatgtcaacaaaaacaatataagacaaacagagaataaaaagatacaatagatggaaattattttacaggtaaagaaaaattgtattatagattcttttagatgttttgcttttacccagcgtataaaaaacaaatataggtattattctgaaaaaggctgcgctccatgaaaatcacacaaaaaagtgttaccataaaaagaagtttttcacgtgcgcgggagaaaagggaaacgttttgattaaaaatgtaaagatatggagcagggaggatgcatacatgaatcgaattcttgtgatagaggatgaaccggatattcaggaggtgctgcggaattatctgcaggcatccggatatgcggtactggtggccggagacggcgaggaggggcttacagtttttcaaaaggaagcggtggatcttgtgctgctggatgtgatgctgccgaaagtggacggttttacggcgttggagcggatacggaagatttccgggacaccggtgattctggtgacggcgcgggacagcgtggaggatcaggtgaagggtttcggattgctggcagatgactatattccaaaaccgtttgatatgccggtgctgctgtgcaaggtggcggcggtactgcgcagaacggggaaatgtaagacggaaacggataaaatgatctgctgcggagatctgcggctggatgcggagcgttaccgggcatactgcggggatacggagctggagctgacaacgaaagagtttgagctgttgcgtgttttcatggaaaatccaggcagggtattcacgagacagcggctgcttgatctcgtgtggggaatggattatttcggggatgagcgcattgtcgatacgcatatcaaaaatcttcgaaagaagctggaccgtgatgtgatccgcacagtgcgcggtgtgggataccgcctggaaaagaaaggagaggagaaggcgtgaagcgggtgaaagacagaattgccggaagtctctcgattaaaatctttctgctcacggcggtacttcttattttaatcagtctttttacgtatttttgcattgtaaaatttcttccagtgacgtatcagaatgaactggaggagaatcttcagaaggtatcggaagaactgcgggcggagctggagcggtaccagacggtcgaagaggcacagaatctgctggaactttttgccgcgaacaatcaggcaagcgtgacgctgctggatgcggctgggacgatcgtgtttccggcagaagaagccggaactgcgtatgagacgtatgtggatgaggacggtgtgatcgtgcagagcgtgtggcatgggacggtgactgatgaggaagatagctgcgaagaaaatatgagagaagaaagcggaagtgaggtggcaacagagagctggaacacggaaaataaagcaaatagtcttgaaagccagaggaatacagaagcagatgagatggtgtccggtgagaatgcttccatggcagatgaaacttcaacagcggataaagtttcaataacgaatgaggaaagtgaagatatggaagcagtcatgggagatactctctgggtggagggcagcgacgcggaattttatgccggaaaaaagtggtaccacgtaaccatcggcggaaaagaatacacgatgctggtcacgggtacgatgcaggcggttcgccagacggtacagatattaaaggaaatgcttcctgccattttgctgctgatttttgcgcttgcattttgctgcgccgtgatcgcctccttttatctggcgcatccggtgctggaactggcacgtgcatccagaaagatggccgatctggaatttgatgtgcggtgtaaggagaagcgaaaagatgagattggcgttcttgcgggaagtttgaatgagctgtctggaaatctgtctgcagcgcttgaaaagctgcaggaggcgaaccggcagcttcgcacagacatggaacgggaacgggaggaggagcggaagcggacggccttttttgtggcggcgtcgcatgaactgaagacgcccgtcacaatcctgaaggggcatatcggaggcatgcttggaaaagtcggggcatatcgtgaccgcgacttctatctgaaacggtcttttgaggtgacggagacgatggagaaaatggtaaaggaaatcctgacggtatcaaaaatggaatccggcacctgggaggtcaggaaagagtctgtggatctgccggaactggtgcgctgtgaggtggcggaactggtagagttgctggaagaaaaaaagatgcggctgcaaattgatctgccggaacatttatttcgaatggcagatcgctcaatgatggaaaaggtattccggaatctgctggtgaatgccctgcggtattcgccggcgggagaagaaatacggatttttatgaccgggcagggggaacatgtactcttttatatagaaaatacaggtataaaaatcccggaggaatcgcttccgcacctgtttgaaccgttctaccgcgtggaacactccagaaaccgggcgagcggaggaagcggcctggggctgtatattgtgaaaatgattctggagcagcacggcggaagctgtgcggcggagaatggaagggatggggtgagagtgatggggaggatgtgagagagggttcgctcatcccaaaatggtaatcccccttagcaaataaatttgctttgggtcgctttattattttgttgctgttcagaactggttacacacaaatcacatagttcctccctgtggactccatattcaaattttatgatagggtcagttccgatggaacagagaaacggtcggaacaatattgaataaggagtgagatttttatgaagttcagaaaagcaatgacggcactggcgatgagcagtgcgatggtgatggcagttcctggagtcctggaggccaagacgacatcatttgaggatgaaggtgttgtctattataaggtagagcaggatggaacggtgaagtcgatcgcggaggaggattatgaagcggcccggaaggaggctggcagtcaggaacaggagacggaagtggatgtatcagatgagagcagctacagcgggatcatttttaacggagaggcggatggctcatggtatatttcagaggacgatgatagagtagtcatgagcgggggcaaagcttcagtaggtgagacgacagaagaggatacgacggtcatgacgcagggtggcgagaatgaaagcggagcggtttattttcagagcgttgaaaacagcgcggatgcatacggtacgtacagcacaaaagaggaagcgaaacggatcaaagaatacggggaagccgggattacgcaggacgacgatggaagctggatgtgggaaggtcaaaaagtgcgcatcctgcttgatgacgacggcagtatttacatgtcgaatgcagatcagaaaaaggaaaacggggtgtatctctacgtggagcgcaatgaaagcggagagatcaaaaaggtaaacgccgtagatgcaaaagagatcctggaagaactggcgctttgcgacgcacagaaggatgagtgagaatgaaaaaaggtgatcagggctgccggtgtcggcagcctcttttactaaaataaagtttgtcaataaaaagtacttgacagatcctctcttttcggttaagataccagaggtgatgcgaaatggaagagtttttacagcagacgctgctctatgatttttacggagagctgctcacggagcatcagcggaaggtatatgaagaggttgtgctgaacgatctttcttattcggaagctgctgagatgtttggagtcagccgtcagggcgtgcatgagctggtgaagcggtgcaacaaaatcctgagcgaatatgagtcgaagctgcatctggtagagcggttcgtccagatccgcgagacagtaaagcagatccagaagatggcatcacagattgatttcatcgataaggaaacacttgcatcgggcgtaaaagaactttcaggaaagattttagaggagttatagaatggcatttgaaagcttgtcagaaaaacttcaaaatgtatttaaaaatcttcgcggtaaggggagactgacagaggcggacgtaaagacggcgctgaaggaagtcaagatggcgcttctcgaggcagatgtcagcttcaaggtggtcaagcagtttgtcaaatccgtgcaggagaaggcgatcggtcaggacgtgatgaacggactgaatccgggtcagatggtgatcaagatcgtaaatgacgagctgatcgctctgatggggtcggagacaacggagcttgcacttcgtccggcgagtgaggtgacggtcgtgatgatggccggacttcagggagccggtaagacgacaacgacagcgaagctcgcagcaaagttcaagtcgaaaggacgcagaccactgctggcagcctgtgacgtatatcgtcctgctgcgatcaaacagctgcaggtcaacggagaaaaagttggcgttgaggtgtttgctctcggcgacaaggaaagcccggtgacgattgcgaagcgtgcagtcgagtatgcaaaagcaaacggtttcaatctcgtctttctcgatacggcaggacggcttcatgtggatgaatccatgatgcaggagctgcaggacatcaaggaagcagttgcagtcgatcagacagtgctggtagtcgatgcaatgaccggacaggatgcggtaaatgtagcatccatgtttcaggaaaagatcggtattgacggtgtcatcctgacgaagctggacggtgatacgagaggcggcgcggcgctttctatcaaggcgacctgcgggaaaccgattctttacgctggtatgggcgaaaagctctcggatctggaacagttttatccggatcgtatggcttcaagaatcctcggcatgggtgatgtgctttccttgatcgagcgtgcacaggatacgatcgatgagacaaaagcgaaagagatggagcagaagctgcgcaaggcacagttcggatttgatgattaccttgagagtatgaatcagatgaagaatatgggcggtatctcaaagattctcagcatgatgcctggcgtcggcggagcacagcttaaacagctggaggatgcggttgacgaaaagcagatggcgcggatcgaagcaatcattctttccatgacaccaaaggaaagagcaaatccggatcttttgaatccatcgcgcaaacgcagaattgcagatggagccggtgtggatatcggagaggtcaataagctggtgaaacagtttgagcagagcaggaagatgatgaaacagtattccggaatgctcggtggaaaatcaggtaaaagaggcaagtttaaacttcccttttaacaaataaatgtaaggcagatcggccgggacgacttcggagcatcaggcttcctgaagagatcggctgtgaaatgaaataaggaggtgaaatgaaatggcagtaaagatcagattaagaagaatgggacagaaaaaggctcctttctatagaatcgttgtagctgattccagatccccgagagatggaagatgtatcgaggagatcggtacctacaatccgaacaccgatccgagcgagttcaagatcaatgaggagcttgcaaagaagtggcttgcaaacggtgctcagccgacagaggtagtaggaaagctcttcaaggcagctggcatcgaaaaataattgattagaggtgagcagaatgaaagaactggtagaagtaattgcaaaatctctggtcgataatccggatgaagtggaagtcacggaaaaagaaagtggcaaagcacttgttctggagctgaaggtagccccgtccgatatgggcaaggttatcggtaagcagggaaggattgcaaaagcgattcgttccgttgtaaaagccgcagcttcgaaagaagacagaaaagtaattgtggatattttacagtaaattcgagtctgtcccgaaagcaggatctgcttttgaggcagattcttttgcgtcagggcaaaacaagtccgaaatgattcagatagaagagcaaagaaggagacaagatgaacgatattctgcaggtgggggcagttacctccacgcacggtctggccggagaggtaaaggtttttccgaccacagatgatgtgaagcgttttaaaaaactgaagcatgtgctgcttgataccgggaaggaactccttccgcttgagatcatacaggtaaagttcttcaagcagatggtcatcctgaaatttaaagggtacgacaaaatcgaggatgtcatgggcttcaaagggaaaaacctgtttgtgacaagagaaaatgcagtaaaactgaaaaagaatgagtactttatcgcagacctgatcggtatgaaggtatacacggaggatgaatcatatcttggagttttgaaggatgtgcttgcgaccggagcaaatgacgtctatgaggtgaagatggaaaatggaaaggatgtcctgatccctgcgattcgtcagtgcattctggacgtggacgtggaaaacggtattatgaaagtacatctgctggagggactgctggaatgaactattacgtgatgacactttttccggaaatgatcgagcagggcatgaacacgagtattatcgggcgggcgatggcgaaaggattgctgacgctgacaacgcttaatatccgggaacattcggtgcgtggcgacggacggatcgatgattatccgtacggaggcggagccggaatggtgatgcaggcagagccggtctgccggacatatgaagtgctttcgcagcagcttggctaccgcccgcggctcatttatctgaccccgcagggaaaggtattcaatcagcagatggcgaaggaatttgcacaggaaaaggatctcgtctttctgtgcggccattatgagggcattgatgagcgtgtgctggaagaaatcgcgacggatttcgtctcgatcggcgattacgtgctaaccggcggagaactgccgtcgatggtgatgatggattccatctcgcgtatggtgcctggcgtgctttccaaccaggaatctggtgagacagagagctttgccggaaatctgctggagtatccgcagtacagccgcccggaagtctggagaggaaaggcagtgccgccggtgctcctttccggccaccatggaaatgtagaacggtggcggcgcgatcagtcgctctaccggacgctgaaaagccggccggatctgatggaggatgtcatactggataagaaagaccggaaatttctgcagatgctgacggatcagcctgaaatggaaggggagtatccgattacggaagaagaagcacgttttttaagaaaacttcttgcaatccagaaaaaaacatgataaaatgaaacgcgttgtgaaaaagagatggtcctctgttacaaataatgtattaagaacatccgaatatgaaggaggaacacaatgaacgatattattaagagcatcgaagctgagcagctcaaagcagaagtaccgcagttttccgtaggagataccgttaaggtttacggtaagatcaaagagggaaaccgtgagagaatccaggtattcgagggcgttgtagtaaagaagcagggcggaagcgtaagagctactttcactgttcgcaagaactccaacggcatcggcgttgagaagacatggccgcttcattctccgtctgttgagaaagtagaagttatcagatacggtaaagtaagacgtgcaaaactgaactacttaaagggacgtgtaggaaagagcgcaagagtaaaagaactggtgaaataagaaatccgatcagggacaaatacatcttatgtatcttgtccctgtttgcgtatgaggaccttttcggtcggaaaggagccggatgaaaaagaaaagcgtgatcaaaacgattttgctgtggacctttgaaattctggtcgtgatcctgtttgcgtacgtactggtctattttttcggacagtcgcgcacaaatatcggtcagtcgatggatgtgacactctccggcggagataccgtattactgaacgttctctcatatcgggtcagcgcaccgaagcgaggggatgtgattgcctttaagccaaacggaagcatgacgagccattcgagtatcaaacgggtgatcgccctgccgggcgagacggtccagattaaagatggaatgatctatataaatggggaactgtatctggagcagaaggactatccggtcattacaaatccggggcttgcttctgaagaactgaagcttgaagacaaggaatattttgtacttggtgacaatcgcaacaacagcgtggacagccgttttgcagatgtgggcatggtgaaaagctctgatatcgagggaaaagtctggtttgtactttctccgtcggaacacaggggatttttgaacggctgacgtagtattcacaaacgccgaattgcggaacaaatgtacctgaaatgtccgcatcatcaaaaaacgagatacgtggaaaataatggaggaaaaacatgaattatcagtggtatccgggccatatgacgaaggcaaaacggatgatgcaggaagatatcaagctgatcgacctggtcatcgagatcattgatgcgcgcgtgccgctttccagccgcaatcctgatattgatgagcttgggaaaaacaaggcccgcctgattattttaaacaaatccgatcttgcggatgaaaagaagaacgacgcctgggccgcctggtttcagggaaaaggctgttttaccgcaaaagtgaacgcaagaagcggtgccggaatgaaaaaaatccaggatacgattcaggaggcctgcaaagagaagattgagcgtgaccgtaaacgggggattatgaaccgtccggtgcgtgcgatggtggtcggcattccgaacgcaggaaaatctacctttattaatacactggccggaaaggcctgtgcaaagaccggaaataagccgggtgttacaaagggcaagcagtggatccggctgaataaaaatattgagttgctcgacacacctggaattttgtggccgaaattcgaagaccagctggtcggactgaaacttgcagtagtcggatcgatcaaggatgagctgctgcagtcggaggaacttgcgatgtggctgatcgcatatctgcgaaaggagtatgcgggtcttctgacggagcgctaccagatcgaggaagatggaacggatcttgagatactggagcggatcgcacagtcaagaggctgcaggctgaaaggaaatctgccggattatccgaagacggcagcactgattgtcgaagatttccgcagcggaagacttgggcggatcacgctggaaagaccggagggtgtttagatttatttgacatctgcgactggcagggttacaatacatggcaggtgacaaaacaaaagacagaaagtggtgaaagaatgaatcaggaaaaacaaaatgattctgcaaaaaacagccaggacggcgagaagaatatgaaaaaggaaatcttaagctgggtattttatattctttttgttgtggcactgacgtacgtgatcattacatttgtcggacagcgtacgcgcgtggacggaagatccatgatgaacactttaagcgatggcgacaatctgatcgttgagaagctttcttatcggttcggagatccggagcggtttgatattattgtattccgaccgtatgaaaatgaaaaggaatactacatcaaacgaatcatcggactgccgggcgagacggttcagatcgatgaaaacggaaaaatttacatcaacggagaagtgctggaggagaattacggtgcggagacaatccgcagtgccggaagagcttcgaagccgatcacgcttggtgaggatgagtattttgtaatgggcgacaaccggaacaacagtaaggacagccgctcagaggatgtcgggaacgtcagccgttcgcagatcattggccgtgcgtgggtacggatctggccgctgtcgaagatcggtgtgctgaagcatcaataaagggaaatgaagcagcaaagcggattgtgagtgtcagctttacatctattttgctgtttttggtaaaaaaagacaggtttcaccggaggcggtgagcagaaaaaccgaaggcggtgaaatttgtgaaacaggaaaaaagaaagaaaagtgcggtaagagaaatgatgggatggctgctgtatatggcgatccttgtggcagcggcatttttgctggtacattttgtcggagaacgcacagtcgtgagcggagattcgatgtctccgaccttaagcgacggtgacaatctgattgtggacaaactctcttaccgcgttcgtgcgcctaaacggtttgagattgtggtttttccgttccagtatcagaagggaacctactacatcaaacggattatcggcctgccgggcgaacaggtacagatttataacggcaaagtctatatcaatggaaaagtgctggaagaatccggcggttttgaaccgattcgcagcgcagggcttgcgtccgaggcgatcacactgggcgaggatgagtattttgtgctcggcgataaccgcaataacagtgcggacagccgcgaaccaagtgtagggacgattttgagacagaatatgatcggccgggccgtcttccgaatctggccgcttgatggcgtgggttttttgaattaaaccgaaaaggaaattgagtatgaaaagtattgcggaaatcaaagcggagtttgcggcggtgtctgcggatcaggcagaggcgctttttatgcagtatgcagatgataaacgagcaggcgttgcaaagctgatcgagtcagaaaaaaggaagcttctgaagctggagcaggagcgcagccgtctggagacaatgcggatctatgagcataaatatgaggatcttggccttgtatgcggaatcgatgaggcaggcagaggaccgctggccggaccggtggtggctggtgcggtgatccttccgcaggactgcgagatcctttatctcaatgactcgaagaagctttctgaaaagaaaagagaggagctcttcgacgaaatcaaagaaaaagcgattgcatgggggattggcatggcctccccggcgcggatcgatgagatcaatatcctgcaggcaacgtatgaggcgatgcgggaggcggtcgcggcgcttgacccgcagccgcaggtactgctcaatgacgcggtacggattccggatctggcatttcgtcaggtaccgatcatcaaaggcgatgcgaagagtctctcaattgcggcggcaagcgtgcttgccaaggtgacgagggaccggctgatgcgggaatatgacaaagtcatgccggaatatgggtttgcggcacataaggggtacggcagtgcagcccacattgcggcactgcagaaatatggcccttcgccgatccaccgcaaaagctttatcggacattttgtagaggaatgaatgaaacagaaaagatctgtcgggggagagaacggcagaaaaggtgaataaacgaaagacaggagcagtttatgaggaaaaggccgctgcgtatctgaaagagaaggggtatcgcattctggaaaagaattatcgctgccctctgggcgagatcgatctgatcgcagaagagagcggatatctcgttttcattgaggtgaaatatcggagaacatcacggcttggcaccggggaagaagcagtgaatacaaaaaagcagcggcgcattctgggcgcagccagatggtatctgatggagcatgggatgcatctctgccgttttgatgtaacagcaatcaacggaacagaaattactttgatccgaaatgcctttgaatgcaggtaaccatttctctgtctccaatgtgcgggacaggaagcgggaggcttatgtcagtgaaagcttgcagtcagtgaaacggattgcaaatgttcgctttatgagagagaaagtcaggagagtaacgattgaaagaagaaagaatgctgattaggaaaaaacgggagcgaagcgttatgcaggagcacgagaagaatggtgttctttattttacgttttcaaatctggatcaagtttcggatatatttgttcacgcattcagcagccgccttggcggcgtgagcacaggagatctggccacaatgaatttcagcgtgaatcgtggcgatacgaaagaaaatgtgaaggaaaattatcgccgctttgctgcggctgctggcttccgggcagaaaatcttgtctgttcggatcagacacatacgaattatgtgcgtgttgtgacggagtcggaccgaggaaagggctttgaccgggagaaggattatcacgatgtggacgggctggttacgaatgttcctgggctggttcttgtgacgtactatgcggactgtgtgccgctgttttttgcagatccggtgcaccgggccgttggactgtctcattccggctggcgtgggactgtgtcggatattgcgggagagacggtaaaaatcatgcgggagacgtacgggacaaatcctgcggatctgcttggggcgatcggcccgtcgatttgccaggattgttacgaagtgagtgaggacgtgatccttgaatttcaaaagaggtatgaaccatcgctgtatcctcttctttacacggaaaaaccgaatggaaagtatcagttgaatctgtgggaagcctgccggcagaacatgctgtgcgcaggtcttttgcccgggcatattcaggttacggatctttgcaccggctgtaacccggagattttgttttctcaccgcgcttccaaaggacaccgcggaaatctggccggatttcttggcgtgcggggataaacggaatcgattgctttttttcgggaaattctgacattttctgtgattattcttgacgcacattttacaaaatgttataaatgaatggaaactgctgatgtttcgatgaaaattgagcattggtgtgaaaaacaaaaaattatttgtggaggatggctcatctatgtatgaatacgacaatctggaaaatctcatgccggtaggtccgctgaagatcgcggcgctggaaggctgtcgggaatttggagaaacggtcaaccgttatctgatacagacccgcaaggagacggcgcaggcgaatgcagcgctggcaaggatgcccggttatatcgaagattcgtacctgcttgactgcaagtgcccgagatttggttccggtgaaggcaagggacagatcaatgcttcggtgcgcggtgcagatctgtacattctggtggatgtctgcaattacagtcttacgtactctgtttgcggttatgagaatcatatgtcaccggacaaccattttcaggatctgaagcgtatcatttcagctgcgaccggaaaggcaaaacgaatcagtgtggttatgccgtttttgtacgagggacgccagcataagcgtaccaagagagagtcgctggactgctcgctcgctttgcaggagcttgtgagcatgggcgtttccaatattattacatttgacgcgcacgacccgcgtgtgcagaatgcgattccgctgagcggattcgattcctttatggcaacgtatcagtttttaaaggcacttgtcgataccgtagaggatttccagatcgataatgaccatttgatggtcatcagcccggatgagggcgcgatgagccgcgctgtttatttttccagcatcctcggcgtagatatgggtatgttctacaagagaagagattattcaacagtagtaaatggccgcaacccgatcgtagcgcatgaattcctcggcgattctgtgaagggcaaggatgtcatcattgtcgatgatatgatctcttccggtgacagtatgctcgatgtggcaaagcagatcaagcagcggggtgcaaagcgtgtatttgtctgcacgacattcggattgttcacggatggcctggagcgctttgatgaattttatgagaagggttacattacaaaagtagtgacaacaaacctgaattaccgcatgccggagcttttcgcgaagccgtattatgcagaggcggatatgacccgtttcctggcaatgatcatcgatcatctgaatcatgacgtgaccttaagcaagattgaatcaccgacggaaaagattaacgagcttctgaattccatgcggatcctgaagcagaaataaagcaactgcgaaagaggggctatgcgggtggcacagctcctttttgtcggcatacggctcaatactggcagcagcgtttgaaaccgcttgcggaatctcataggagggacggattccttatgattctgcaagcagcgaagcggattgcgaatatctgctttgacaagcgcctcaggcgtaaaagatttacttaaataataaggaaacaacaagaatgaagaaaaagaattttgagcataagatccgcgcggttcttccgggaagcattgcggaggagctggagctggagccgggagacgttctgctggctgtcaatgaccatgagatcgaggatgtttttgattatcattattatacgaacgaggaatatctgacggttcttgtgcgcaaaccggacggagaggaatgggagctggagatcgaaaaggaatttgaagaggatctcgggatcgaatttgaaagttcactgatggacgattaccgttcctgcagaaaccactgtattttttgctttattgatcagatgccgccgggaatgcgggaaacgctgtattttaaggatgacgattcgagactgtcgtttttgcagggcaactatgtgacactcacaaatatgagcgatcacgacattgatcggatcattcattaccatctcggaccgatcaacatttcctttcagacgacaaatccggatcttcgctgcaaaatgctgcacaaccgttttgcaggtgatgttttcccgaaaatccgacgtctggcagatgccggaattgagctgaacggccagatcgtgctgtgccgcgatattaatgacggggcggagctggagcgctccatttcggatatgacatcctaccttccggcgcttcgcagtgtttcggttgtgccggtcgggctgtcaaagtaccgggaaggcttgtatccgctgaagccatttgatgcacagtcggcgggagaagtgattgatctgatcgaatcctggcagaaaaagatttatccgcagtacggtgtgcattttgttcatgcatcagatgaatggtatctgcttgccgggcggccgcttccggaggaagaacggtatgatggatatcttcagctggaaaatggtgtcggcatgctgcggcttttaaaagaagaagttgaggaaacgcttgcagaggtgaaaccggacggggaaacaccgaagcgccgcgtttcgattgcaaccggacggcttgcagggccttttttgaaggaacttggtaaacggatcgagacagtgcatcaaaacgttacactgcagatttttgaaatccgaaatgacttcttcggggagtcgatcacagtttccgggctgatcacaggacaggatctgatcgcacagctgaaagatcaggatcttggagatgaactgctgcttccgaccaatatgattcggtcaggggaacgcgtatttctcgatgatctgacgatagaagatgcagaagaggcacttggcataccgatccgcattgtggaatcaggcgggcgtgatctggtgtgtgcagtgaccggagaagaatagacgaaaacaggcaaaaggaggaaaacctatgagcaaaccaatcgtagcaattgtaggaaggccaaatgtgggcaagtcgacactgtttaacgcgcttgcaggagaaaatatttcgattgtaaaagatacgccgggcgtaacgcgtgaccggatctatgcggatgtagagtggctgaatgtgaatttcacactgatcgataccggtggaatcgaaccggacagcagcgatgtaatcttggcgcagatgcgggatcaggcgcagatcgcgatcgacacggcggatgtcattttgtttctgacggactgcaagcagggcctcgtcgatgcggatgcaaaggtggcagatatgctgcgccgttcccgcaagccggttgtgcttgtcgtaaataaggttgataatttcgataaaaacatggcagatgtctatgagttttacaatctcggtatcggtgatccgtacccgatctctgcgagcaacaagcttggtgtcggagatatgcttgatcacgtgattgagtgctttggagaggatcacggcgaggaggagcaggacgaacggccgcgcatcgcgatcgtcggaaagccgaatgtcggaaaatcatctctgattaaccgcatccttggcgaaaaccgcctgattgtttccgatattgccggcacaacgcgtgatgcggtagataca

SEQ ID NO: 1375 - DNA, 3378 bp, Unknown
  16S sequences of unknown bacteria
ccgcctctgccgtgctcagcggcgcggtcttgagcagattgagcttgaccagctcatgcgcgcgcagcgaatcatcaagcgttgcgatcaggttgtcgctgatgccgtccttcccgatctgaaacagtgagcggtactgctgcgcctgcgctctcaatatctttttgtctcgtgcattcaacatatcatatcatcgcctttctgaatgtgacgttcacatctttgttcacccgtacgctgacctcgctgatcccagggctgatgcagaaccagccaaggccgtggatgaccacgtcgatcttcgttttgcgcaccggacagctgtaggtgaccatctgctgcgggtcgttgtccagcgtaggggaaagcaatccgcccagatgcttctgccacagcgcatccgccttctccagcttgcccctgtgcagcttcagccgatcgctgaaataggcgaccaccgtccccttttctgcacatcgcacatcgaggcggaccatgccgcccagggcatagctttgatcctcatgcagctgatacacctgcgggcgaagcggccgaaacgggatcacctcgcgcagcacagcatccggcgcatgcgtgagcagggaatcatgcctggtgatccccggcgtatcataaagcgtgtattccggcatgggcagcgccacgacatcgagcgtcgtccccggatgcgccgaggtcgtcagatcagcgtcatcgcacagcgcgttgagcagcgtgctcttgccggcattggccatgcccatgacgatcacatcgcgtccatggcggtatttcgcgatggcgttcttcacttcctccacggagtgattgtccggatgatgcggattgcgggccagatcgccgcacatgacgatgccttccacccggatctcctcttccttcagcctttgcagcacgaacatcgccagcttctcatctgaaagcgtctgcgggagcagatcgcgcttggtggcgatcatcacgatatcgcgtccgggcagatgccgcgaaaggcccggcagcatgttggcctcgaaatcgaagatgtcgacgacccacaggatgagggcgtcgtatcgggcgatgcgctgcagcgcctgcgcgccgtcgatccccttctgcatggagatcatcacatcgtcataatgccggatgcggaagcagcgctggcaatagtccttttccagattcggcgtatacccgatcgcttcgcggtcctcatcctgcagcctgacgccgcatcccttacaatattttgtcatcatattccccccttttgatctttccctggcgttcaagcacgcggaacaccatctgttcgaacacgcggttgaccttcgtgcagttcagatcgcggctcaccagcggcttggtcaggatcgtatagaaatgcatccggttggcgcccagcatgtccgtcagcagctgatcgccgagcacggccacctgatgcggcgcgtaatgcagatcccgcagcatcttgcggtatgtctgcttcagcggcttgcgggcaaacggatagcacttcgcgtccaccgcgccggcaaaccgctccacgcgttcccgtttattgttggagatgaagacgacctggatgccggcatccctgacccggcggacaaaggcgatcgcctgtgcgtctggaaggggatcatcatgcgcggccagagtattgtcgatatcgcacacgagcacgcgaatcccatgccgcttgagccgctccagatccagcgcgcggtagctttccacataataatcaggggtaaacagcttcatgtcgcatcctcctcacatagacgacattataacacagaatgcgcgcggatggaaaagcttttcaccgcataaaaaaaccggcctgttcaagaccggtgcaaagctcatccgatatggtcgaccgtgtcaaagcgatagcccagccgcttcatctcgcggataaagtcgtccagcgcttcccagttgcccttgttgctgggatgaagcagatagatggctccgttgtgataatgatccatcatcgtcttcagcgcttcttcctcggagacatcgctgccataatcataatatgcatggctccagaaataggtgcggtagcccaggtcgcagaccatcttcatcgcccgttcgctgcatcctccccgcggaaagcggaagatcttcggcatcggctccccgacgacctccagataagtcttttcctcctgggtgagctcctctacgaatgcatcgacctgctgggcattggccagggtcgtcatgtcatagtgatgccagctgtgattgccgatgacatggccgtgcttcaccagatcgcgcacgaagtccgcttcatcacggatatagttgcgcgtgaggaaaaatgtcgccttgacctcatattcattgagcacatccgcgatctgcttgatatacgtgatgtcgtttccgccttcatcgaaggtgagatagatcactttctcatccggtccgatataatacgcgccatatgtcttcagccagtctgcgctctttgcggccgtgttgcgggcatgcgcctgtgatttgtcgaaccaccattcaaacgatgtgttatcgaacagatcatgattgtattcgagcttcacgttgagcggattttccaggatctgcacgctgcggctgagggatgtctcattaccgtggctgtcgctgaccgtatagatgatctcatacgtccctgcctgattgaagtcgacgcgcgaatccgtatgcacccgatcgctgatgtcgccatcgcagttgtcgtatgcgctgtagccgggctcttcatactgatcgccgatgaacagcttcagctgcgcatcgcccttcagccgcagatccggcgctttgccatcgatcacctcgaccgtccgcacggcccgcttgtcggcattgtccagcgtatagatgacctgatatgtccccagccgggacgtgtccaccgtgctctccatatgcagatgatcgctgttgtccataaagcggtatacgctcttggcgcctggatcctgataggtctcgttcatgttgacctgcagatgatcgccgcccaccagctcgagggtcgggatgaagatgccgctgaagaacagaaagtgcaccagcagcgccgcgatgccggctatgatgagcgatacgatcgaatagaccacgatacggcagcgtgtgctcatgattccacctcagtgacagggtatgaccctgcctgaacaattatgcctcagccggagcaaaacgctgcatgagcgacatggcgccgcgcacgccgtccaccgcgctggtgacgatgccgccggcatagcctgcgccctcgcccagcggcatgatgccttcgatgctggaggtgagcgtctcgtctctgcccatgcgcagcgg

SEQ ID NO: 1376 - DNA, 27313 bp, Unknown
  16S sequences of unknown bacteria
cactgacacccggattcttcttctccgcaagaaacagctcatggtgaatatagatcttaaagttcttgaagatatgggactatataacaacagtattattatttttgacagaggttattattcagaagatatgttccgctactgtgtagagcatgggcatctctgtgttatgagactgaaagagggaatcaatttatctaaaaaatgcaatggtgatatgatttccgttcttcagggaacttcaaaagaaggtacttccgatgtgcccatatcttgtccgaatccccatgactgacgcaagaagcacccatgacttctcccccaaaggaaagaaatccggacattccatacttgggatctcaggatcatcttcctggatcagtggtctgacaaattcccattgaagcatattttctgaggaaaacaaaagaatactgccctttccaaaatagttggttgccaaaaccatataccatttcccatcagcccgaaaaactttgggatcccggaagttcatatcaattccttccacggcataagccggcagaatctcctgttcttccgaaaaaacaagcccgtctttgctgaatgccgttgcctgtgactgacggatcgtttccggttttccacgtttttccaaatctctggtaaagaaaattctaaggccatccggcaaaacgactgcggatccggaaaaagctccgccgaccaggtcatgtgattccagaatctccgactgaggttccaatgcatatggaagataattccagtgaaccagatctttactcactgcatgtccccagtatatattatcccatttttgctcatgtggatttgcctggtaatataaatgatattttccatgaaaccagcataggccattcgggtcattgctccaatttacataaggggtaaaatggaactgttctctccaggaagtgtcaaaaacttctgttttttccggctgttcattatttacaatcagatatttaatccctgtctcttctacgtcttcatttccgcacagatacatctgactgatcagcgaatttgtccatatcagctgatattctgtattctcacaaagttcaactgtcattttatgaaaaatatcattaaccacctctgtcacaaacacctgctgtccttttcccattaatgaaaacgttccattttcttctcctgccttccggataaacagctccgcttttctgtaatttccactgtaaaaatccatctttttcctccttctttgaagtggaacccgttccatacacgtattatatatcgcagctgtttttttgtcaatacagaaaaaaaatacaaataaaagccaagaaaactgtatattttaacttctatatactgtcttctcagcttcaatttatcgcttctatctgtattatataaatggaacaaactacattgttccaccttttattagttccacatcacaaacctgtttcatttctatctctgtatcaccatccagcagatgcatgatagtatctacgcagcattttgccatctgcggaatattctgcttgactgtcgtcagcgggggatttacaaattttccgatatccagcccgtcatagccgataattttaagttcttccgggatctggattccacgtttttctgcgaccgccatacaggccactgccagaagatctcctacatagaccgcatccacatcatcgaacagatccagatatttttctaccatctgcgcatagtactcatagcttaatacgttccattctacttccgccgaaataacagaaatcccatgctctctgagtatctgttttacgcccttgctgcgctcctcaaacggctgccgtatatacgtccgcccttcaatcatcaggatattcctacaaccggactctatgattcgttctgcaatcaaccgtccgccttttttgctgtctgatgtaataaccggaactttttctccccagtttcgatccatacttacaactggttttttcaatcgcttcagaattttttcatccggcggatccacaccgacgatcagaccgtccagcacatttttttccatcaggtgaatcatttcttccacacgattgctgatttctactgtattgcatacaactgcacgatatccgtatcgatacagctccatctctgtatatttcataaattttgcaaaaaaaggattttccagatctggaacaattacccctattataccgcttcggttccgatacagatttctggccagctcatttggctggtaattcagtgcctttactgcctcatcaatctttttccttgtttcttctgatacatatcctgtcttgtttaatgctcttgatactgttccaactcctacgcctgcatatgccgctacatctctgattcctgccatttctgccccactttacttcacttacttttattgtcttttatcgattttttgtaactgttcagagccaagcaaaatttcataaaaaaggcggaaaatgcttgcatttttaagcctgtttttgaaattttatttggcggatacgccacaccgacgaaatgcgtagcattttggaggttggctctgaacagttacgatttttttataatagcatccaagagctcattttcgcaatcttttttcgcaattcttacatttttgtatgattctcagccatgcttattactcacgcaaaacaggactggagcctgttcccttttcaggcaacagactcctttaccacatgtatcgttccgttttccaccagctctccaaagacccttgccagcttcggatcaaactgacggccttcttcttcccgaagaatcttcagcacacgttcgaccggaatgccgtctttgtagcagcgctttgaagtcattgcatcaaaggaatccgccacacacagaatacgtgcagtcagaggaatattctctcccgcaatccgtcttggatacccttttccgtcataacgttcatgatgaccgatcaccgccgggatcacataatccagcgaaggcaaatgacggataattccgatggatgcctccacatgccccttgatcacatcgtattcgtcatccgtcagccgcccgggcttgttcaaaatgctctccggaattccgatctttccgatgtcgtgaagcagagccgcctgacgcacgatctcaatcacatcagaattcagattcagcgcttttgcaagctccgtcgcataatatgccacattcttcgaatgctggaatgtataatgatcctttgtattgattgccgcagtgagtgcgtagatcgtcgactcatattcctgataaatatgctcgtgatctgtctgcccttccttcgtgctcagcttctcctggatcagtgtatcaaataccttgatgccattctttccattccgctttacatggtaaacagccatatccacgttctcgagaagctccccgaccgtccgcgccgcatacggcgccgcgctgatgccggcactgacggtcagtaccttcagcgtacagtcctctgagtgctggttcatcgcaaagatctgcttctgaatggattctgtcaggttctttgccgcataaacatcgtacttcggaagcagcacggcgaattccttcccggtataccgcgccacatacccattatcgccgacacttgcctgaatgatcctgccgacctgtttcagcgtttcatccccctgcttcgtaccatacagctgattgtaaagcttgaaatcatccagattaaggatcaccagtgcaagcgaaccttctttgtttttctcgaactcctcattgagtacctctgtaaaatatttccggttcaaaagtccggtcagttcatctgtccgtgcctcgtaataagcctgctcataaagccgtgcatttttgatcgcaattgatgccacagaggcaatcgagttgagcagcttcagatcattgttatccagcttcttatgtcccttcttttctcccaaaagaagtacacccaccagatcttcatcatccttcagtccgatgcatgcttcaatcttctgatctctcagctgttttttctctgcttcccacatggctttatattccacagttgtcctgaattcccgcatgaggattccttcgctctttttcagccagcacaccatcggattgtcctttttcagacgaaaggaacggtcatccaaaggtccgtcactatacttcatcagataatcaccgctttgcagctcctgaatacagatatagatgccttctacctgcaccgtacgccggatcacatgaatgatctcatccagaatgtcctgaacacagaggctcctggatacggcagcgctgaaatttttgagatcctccgcctgctgcagctcttccttcacgaatacgtttttcataatctcacgccagacaaatgccaaaagcattgctgttcccagaaaacacacagaaaataccagggaataataatttgaggtctgcggaagaatctgctgcagtgcatccgcaatataaggcgataagttaaagtagagcacaaaattcaacaagagcccgacaccataacacagcccctcagatgccaggagccgcagctgaaacagtcttctccgtatcagtgcatacagaattaaaaatgcattgaccaatccaccaagaatatctatcgggaatccggaaaacaccggtatcagaagcgcgatctgtccggcaaacagaaaacagataccaaggaggatcggctgaaactgcttgcccatcgtccggtttttccggcaaaagtgcagcagtacacttagcacatggatcacagtcagtccacccgctgcaaaaagtaaaatcacatgccagtttgtccgatagacaaacgagagtttttcacccgtcttcaccagctccggcggtgccagcaaaaatccatgcggcacattgactgcaaataaaagcagatacagcacaccataaaaaatactttcgctttttttcgttttccctgcaaattccgtaataaaacgatagtatccaaagggcagggcaaacagcccgaacaatgatacgtgataccagaaccggtacccgggccagatcagatttctcataaaaagagaacctccggtccagcagatcatcgcgatgagcaggatcagaaagctgttcgcaatcttattccgccgtgctgccagcatcaaaagcagcataaaaacgtaacaaaaaagtgcaatacacgaaatatatccataggtccccatcgttttatctccaattgcttttctgtatctgaatcaattccgtcagttctctctttgaaggattcatatgccggatctcttttccgtttttttctcggtatgcctcaaaactcccacaccgcaaaatcgtcacgaccagaggatccattccgagtatctttttcagatcgcggtaatcctgatcgatgtatttaaaatatgtcgtcagaatctccctcagaatctctgtgctcactgcccgctgtacaaacgcttctgactccatttccacatacagatgcagaaacggccggttctgttcattaaattcttttgccgccgtccaatgtatcaccggaagaccggataagcggatcgcacttatgatcccattttcagatattcttgtaaatcccgcaatatctataatcgaaggcacacggtcaatatattcaaaacgtggaatttttgtcccatcctcccggtttgacagcccaacacagcgatatacatcaccgcagcggtaccggacaaacgcaccgccctttaatactgtcagcaccagctcatatttttcgcccggcagcacctcattcatcaaaagtgtctgtggaataaaatccggatgttcctccaactcctccatatctttttctgtgataaactcatagaaacagctgtccggaaaaaagtacatgccatcgcgtgtccagctttccgttccgatcagggacggttctgtacctgcaaaaatctccattggccggattccccataattcttccagctcgtccttataacagcggttgtccgttcccgctaccataaatcccttcagcccaaacaggtctttgggacgaatcggccggccctcttttttgcttagatgctttgcccgggccatccgataaagcatatgcggctcacagccaagcagactgcgcagattgccgctgcctcctcctgatgatgccagactctggctcactgcatacgtcacacttcccagaccgaaaaacagttctacatccttttgcagtgccagcttaaatccaagcttattacgctgactgaatgtcatattcactgcttcctttacttccggcagaaaacgaatatctgtctcctcaccaagaagcagcggcaaaagccccgttgcatacggcagcggcgccagcccgtaaagcatcttatctccttcctcgtaggaaaaatgtcccttctcctcacttgttgccagaagcaggcaggccacaacattattccgaaacgtatccagcatacttcgtgtatacggtgccaccttgatcggatgctttccgccttcccatgttgtctgaatccagatcaccggatttcccggaagactttccgcctgttttctcagaagaatatccgcataatcctcatacgttgtcagtggaaccatcctgcgaaactcttctatcgtctgcggtcttttccccttcagaatcaatgaaccaagctcacagctgctaaaaagctgaatctgttcttccatcaggcgattctgaatcttcatatattcttcaatgttcagatccagaaatccacagtactgattccagatttcctgatattcccgcttttgcagccgttcgctaaggctcattttttcatctcccttctgaaaaagtcaaaacaccttccggcacttttccggtttggaaagagaaacggagtcgtttttctgtatttctcataatcataaaacgtctgtggaaaaatcacccgatcctgcagacagatgtagcagacattccatgctgtcaaaagagcaccgtccacagcagcacgcgctgttccgatcataagtgcaagtgccagatagaaaagtgcaaaccacaggacaccgggatggcggcacagtgcatacatgcctttcgtatacgtttttcttctgtgattttcctccacatacgtttctccaaacggtaatgcaaaaaacagagtatacaccattagtccgaaaaaaaacaatgcaaatattccgaaaaacaccacacacagcggctgcttcctcatcccgtcaaaaccatctgcaataatcccgacactggaaaaagccactaacagagtccccagtaaaaagaacctctgaagcagcttgtttttccacgtaatgctgttgatatcataaagaaaatagcacagaaaacctgcacatccagtccattccacccaagtcattctcgttttccgtttcattccatatcgtttgttttcacgcaggatcagatttccgaactgtcatccagatacgcagtttttgaccctggcatcattatataatacctccattcgatacgcaagcgatattgcagagaatttaggtcgtttgcggcggtttggcaactgtttggagaatgcggctatttgcaatccacttcactgcctgtaggagagccacgaaataaaaagaggccgaaattccaaaatcagaatttcgaccccgttcagaccatctttgcgatctgccttttttcttttataatgcagcttacatcagccttacagtgctgtgccctgtgcgatcattgcatctgcaactttttcaaatccggcgatgtttgcacctgctacatagttgccctctacaccatatctctttgccgcgtcagagatctttgcatagatgttgttcatcatctctttgagctttgcatctacctcttctgcggtccagctcaggcgcatgctgttctggcacatctcaagtgcggaggtacctacaccacctgcattggatgccttacccggcagaaacagaagtccgctctccaggatgtaatctgtagcttctctggtagtcggcatgtttgcaccctctgctacaacctgacagccgtttgctttcagtgcctttgcatcgtcgaggttcagctcgttctgtgttgcacacggaagtgcgatgtcgcattttactgtccagatgcccttgccctctgtataaactgcacccggaactgcctgtgcatactctttgattcttccgcggcgaacttctttgatctcttttacaaggtcaagcttgatgccttccggatcgtaaacgtatccgttggagtcgctcattgcaacaacctttgcgccaagctgctgtgccttctctgtagcgtagattgcaacgtttccggaaccggatacaacgacagtcttgcctgcgatatccatattatgctccttgagcattgcatccagaatgtatacaagtccgtaaccggtcgcctgtgtacggatcagagaaccgccccaggtcagtccctttccggtcagcacaccttcatattttccggtcagtctcttgtactgtccatataaatagccaatctctcttccgcctacaccgatatctccagccggtacatcttcgtctgctccgatgtacttggacagctcggtcataaagctctggcagaatgccataacttcacggtcggattttcccttcggatcgaagttggaaccgcccttgccgccgccgatcggcagacctgtcagagagtttttaaatgtctgctcaaaaccaaggaatttcaggatgccctgatttacagacggatggaatctcagacctcccttgtacggtccaattgcgctgttgaactgtacacggtaacctttgttgatctgtaccttgccattgtcatctacccacggaaccttgaaagaaatgatgcgctccggctctaccagacgctcaagcaggctgactgctctgtactgcttctcatttgcatcgatcaccagtttcagtgaatccagtacttcttttacggcctgatggaactccggctcgcccgggttctgtgctacaactctctcgtagatctcttctgtataagacatatgaattggcccccttgcctgataaatttatgcggcataccggaaaacacagtttctgctgccgcgtctcctcacggatatccggttatcgcatagcagatgactgtcattttggtctgcacatgaattttatcactctgcaggctgtatcctgtccgctatataacccaaaatacccgcggctgcgccgcgggtatctatgtctgctccgtcacacacatgcgattattatacactaccaaaaatcatttggcaattattttttgcatcagcacgctattactttaacgttgtgctatctcgatgtgtttttgttacggctgcgaagcggatctttgcaatccgcctcatcgccaaacatactctgatgccagatgatctatttacttgccggagttactgttattactgtcgtctgcctggctctggtaatctgctgcagcccccagggtcagtgttactttctgctcctcgtatccatcaccggactgacggctgatggtaaccggaacttcctcgcctgccgcatagtaagcaagtgtctctttcagaccggacatgcttgtcacgctgctgccatcaaactttgtgatgatgtcacctttcttcagacctgcatcctctgccgggcttccttcactgacatcagtgacataaatgccttccgggatgccgtaaagctctgacatttcattcgaaactgccttgccggtgattccgatataagcgctgtcctcttcactgaccgtttctgttcttgtctttttattcatcagatcctcaagaatcggttttgcagtagaaatcgggatcgcataacccataccctcaacaccgttcgcagatgcctttgcggagttgataccgatgactctgccctgcatatcaagaagtgcgccgccgctgttgcccggattgattgctgcatcagtctggatcagtgtctgctcattgccctcgatctggatcgtacggttcagcgcactgacgataccggtcgttacggactgtccataaccaagtgcattaccgatcgcaacaacctgctgaccgactaccagatcatccgaatcaccgatctctgcgatcttgattgcatccatcgtgtcatcggaaatatcatccagtttgaccgctacaaccgccaggtcatttgctgcatcggttcctttgacaactgcctcatacgcggagccgtctgcaaaaccaacggtaagttctgttgagttttctactacgtggttgttcgtacagatcaaaagctcgtcatcattctgtccgatgatgattccggagcctgcacttgtgctctcctctgtataagacggagcaccgtatccgtatctgctgaagtagttctgcacttcctgtactgatttatttgtaatcgatacgactgccggcattactgccgctgccacatcgctgactcctgtgatcgtgccgtctgttgaaacctcggcggtatcgatatcagagcttgtagagatcagctccacttttttactgctcataagagaaacatcgtttgcactgtccttatctgcaaatcccatcagtccggtaactgcacctgccgttaaaacgcctgcacataaaagagaaatcaatgtctgttttttcatatataagacctccttagtctttgtatctcagaaactcccggaagcttccgtcacccggggggatcaccggagcctttctttttgctttctttcgtttctgttgtcttttctttttctttatgatgacagtataatggcttcctttgactgaattgtgattaaaatgtggtgtttctgtgaaatcggacattttttctggaaaaaaacggattttccagagacaaacctgcccctccagatgaaagaatggagagctggcagtgcatacataacgcaacagcttgctttttccaacgcctgatgctattatggtgtgcaaaaaatgaaagaaggatttcttatggaaataagcgtattacttgcggaacagattcttaaattatttctgattcttctgcttggatttttgcttgtaaaaacaggaaagttaaaagcttcagacagtaaatgtatctctgtgatacttgtttacctgattttaccctgcgtaatcatcaattcttttcagattgaatatacaccacaggtacgaaatggattgttgtatacactgacagcttctgtcgctgcacatattgtcttcattctgattgcagcaatcactcgaaagccgctgaagctgaatgtgattgaacagcttactgtcatttatacaaacggtggaatcctggttgtacctcttatcaaagcacttcttggagatgaatatgttatttattcctgcagcttcatcgtggttcagctgatcctgatctggactcactgctgtcatatgctttgcagagatgagcatttacaatggaaaaagatcctgttgaatatcaacgtcatctctatactggcaggtgcgttattattttttaccgggattcgtttaccgaaagttccggctgaaacgattgatatgatggcagacatgatcggccctatgggaatgcttcttgccggcatggcaatttccgagacgccgcttaaagatgtatttgcgcggattcgaaactacattccggttattctaagactgcttgtctgtccgcttgtcatcctgcttgttatcagaatttccggcgcagcaaaatggataccggatggaaaaaatatccttcttaccgtatatcttgcctgcatcacgccagcctgcgctaccgttacgtcattggcacagctctacgataaagatgccgcatattccagtatcctctatgtacttaccactgcatgctcgattttgactatgccgtttatgatcctgttatatagcctgtggatataaaaatgaactctgacgtttttagagctttgattatgtgtttcaggaataccgcatttccggctattcctccgccagcagcaccatcccgaaccacgtcacgatccctgctccgttcataaactcaatccccgctttttctgccagcggcagtaccacgatcccatatccctctacgcagggcatcatctgatccggatagcggcacggaccatccgggtaggcgcatttctcacagatctcacaggactgtgcggagagtgcaagcgtctccccaaaatagggacgcaaaacctcctgcaccttttttgtcaccgcctcatgctccggccgcgttgccagcgtctcctccagattgtcaacatccgccacctccgcgatcgtcgtaaatacaaacacctccgaaaaatggctgcaccgtccctgacattcctttacggttccgactcccggcggacaggaccagctcttcccgtaacgcgggcattccttccggcagatttcacgtacatgatccgaaaatggaatgtccttttccgaaagccacgcatactgcacgattggaaggtcaagaagctgctgctcgatttcttcccgcttttttctgacaagtttttcctggttttctgtttctaatttctgtggttctgatttttctacttccatttcttccattttagtctctccctattctgtcagtttctgttttccgatgtttctcactcctgctttcacggacactttttctgttttcacggatacttcgtttcttccctctcagttcccggtcgctttttccgctttcacggacactttttctgttttcacggatacttcacttcttccctctcagttcccggtcactttttccgctttcacggacactttttctgttttcacggatacttcacttcttccctctcagttcccggtcactttttctgttttaacggacactttttctgttttcacggacacttcgctttacatgatcactttctttcgtttcgtggcgccgcacttctctcagtatatccgattcccctcatttatttcaacccaaaccgccacgatttccccttgaaaccatccttcacacttgattttccctcgcaaacttgttatcctatcatacagatatattctcgggatttttttgtgcctgattttgtgagaaaatctgtgggcggcaggaaagacatcgagagtacatcggaagaagaggaggaattgtatggcaaatttttgtcttatgatacagtatgacggtacccgctacaatggctggcagcgtcagggaaacacagcggatacgatccagggcaagctggaagcgatcctgctgcagctttacggcgaacctgtcgacctgaacggctccgggcgtaccgatgccggtgtgcatgcactgcgccagattgccaattaccgtatcccacgaatgctgagccgtcattcctgttcgcagattcaagagtattttaatcagtatcttccgcaggatattcgcgtgcttgccgttgaaaaagcgccggaacgctttcatgcaaggctgtcggccacaagcaagatttacgaataccgtattgactgcggagctgtcgcaaatattttcgaccggcgttaccttcttcgcatcgaagagccgctgaatattgaaaaaatgaaagaagctgcctcttatctcatcggcacacatgattttaaaagcttctgtgccaatcgtcacatgaaaaagtcaacggtgcgtaccattttcgatatctcgattgaagaacaggatggaatcctgcgcatccgctatcacggtgatggttttctctacaacatggtgcgtattctcaccggcacactgatcgaggttggcaccgggaatcgggcgccttttcagattccgatgattctggatggtcttgaccgctctcttgccggttttacggctccgccgaacgcactgtttcttgtagatgttttttatccggatacagttccggaagtctaatactgtaccagctacagaaaggagttccattaaattatgaaacaggttattttaacaggtgaccgaccgaccggccgccttcacgttggacattacgtaggctcacttgccagacgtgtccagttacagaattccggtaaattcgacgaaatctacatcatgatcgccgacgcgcaggcactgactgacaatgcggagcatccggaaaaagtgcgtcagaacattctgcaggttgcactcgattaccttgcatgtggacttgatccggaaaaatccaccatctttatccagtcgatggtgccggagctcactgagcttacgttctactatatgaatcttgtcacggtatcccgcgtacagcgcaatcctactgtaaaatctgaaattcagatgcgtggttttgagacgagcattccggtcggatttttctgctatccgatcagccaggcggcagacattaccgccttccgtgccactgcggttccggttggtgaggatcagcttccgatgcttgagcagtgcaaggagatcgtacacaaattcaacaccgtctacggtgaaacactcaccgacccgcagatcatcctgccggacaaccaggcctgcctgcgtctgccgggtatcgacggaaaagcaaagatgagcaagtctcttggcaactgcatttatttatctgatgagtcagaagacatccggaaaaaaatcatgtccatgttcactgatccgaatcacctgcgtgtacaggatcctggccgcacagagggcaatccggtcttcatctacctcgatgctttctgccgtccggagcatttcgcagaatttcttccggagtatcagaatcttgacgaactcaaagcgcattatcagcgcggggggctcggtgatgtcaaggtaaagaaattcctgaacaacgtcatgcagtcagagctgggaccgatccgcgagcgccgcaagatgtgggagagccgtccggcagatgtctttgatatcctgaaagccggcagcgaaaaagcacgtgccaccgcagcaaaaaccctcgatgacgtgcgtcacgcaatgcgcatcgactatttcagcgaggaaaatttaaagcagctgaccgcacaggagtaaatatattttttcgcaattcctttcatcgcctctcgcagttatcaaaagcactgcatgaattaacggtgagaggtatctctcaaaataagattataaaaagcgcagagattcgagtcaaacgactttccctctgcgctttttcatgctgtaaatctgatacagacaaattcattccgccgcttattgctccctgcacttccgcaggaaacttacctgctccgtatcaaagcggatattcgcaatccgcttcactacttgcctgactcagttaagccgtccctggcttccattataatcttacgattcttccgctttctccagcgcaaacaccccatactgattcacaaaatccagcagcacatatccctctgcctcaatttctttttgctgcttttcactgtaaatacagattgcgagatacgtgcagccccggtgcttcgcattttttgcgatttcactgtatttgtcactctcaaaattgatgtcgtgatagatcgtgcggtcaatctccgccttggctccgcgtccaagcctgccgtacggcatacggatcgaagcgtcatacacacgtatataaggtgacagattgttgtccgttgccagaagtgcatccccgtcaccgcgatgtgcattgataagattgcagacgtgcgccacctcatccggcacctgctgataattgtgcgcccggacataattgccctcataaatgctttttccggaaaccgctgtcaccccaagcattatggcaagcattgctgcctgagcgatccttttcttcggcatccgcaccagcctcgtgccgacatacgccagaagcggcaccaccggaactgcccaaagcacacgccagtacacttcggcaccgatacatttctgaagaatccaggcacttaccggaaagaagaaagctgccagtgccagaagcgtgtagatggcaactgcgcctgctctcgcttttgtgcacgttctgtccgcatcttcccggcaggcctcactctgctctttatttacgatgctgttttcaatctcagactttctgtcatctttttcaggattttgtccaaattttatatatttttttctgccatattgccctcttaaaaacagaccggccaaaataaacagcacagttccggccagcagatacggatatccgcttccattccagtacgactgccaggtggaaaatattaaattgatcacttctttcatgacagcccctttcactttattagcacatatgctgccccgagcacgattgacgggatgcagcacagaatgcatgttatgatccttttcggctcacgacagtgaacggctcccatcactgcaaaaatccccatcaccagcggcgaaagcatgattcccattgacgataccaggcagcaggcgccatttgtaagcagcagaaaataccagggaagctccgatttcttttgcatcacggttttcatgcacagccagaccgaaagcggcaaaagtgccgctgccaggagacctttgccttgccagatacggatcatctgaaagttcccggaagtgtaaacggaaaaaccagaaaaccacgtcagcgcacaaccgagaatcaaaaaaatccctcttgcatcggcattttccgggaaaaacagctttgcgaactggtacagcacgagatacgccatgaccagaaatacagccggaaaaatcacatgcgccacaattgccggatgaagcccaccgcacagctggctgatcaccgccagaaagattggaaacggtgacagtacgtagcggctcggcagctttcggtatgcattcccagtataaggattcaccgaaaaaatcgtatccgtatgaactgcggtcgtcgcagtgccgacataaaatgcatcatcggcatccatgtgtgccagaagggaagcgacacagatctgcgctgcgatcaaaacaagcgcgatccacagccatgcggagatacttcgcagacgcgcccacagcccggcagaccagggtcttttttctactcctgcgtctgaatcttcggctggttttactggttttccctcatcatgcttcacactggctttctgatatttcactttccactgccaaatgccggctcccgccgtccccactccgatcactgcatagcagatcgacaggacgtgcagcggcagtttcagccagatcatcggcagcgtcagaagctcagtcataaaaaaaagaaatacatagccgatcagaaagctctgaccatggctcatcgttttttcttttctgaaaaacacagtcccggctccccagggtaccagcatcagccagaacagtgcgagaactgcctttcctgcaaagctcataagcgccctccgtcctgtctcatacgcagaactccttgatctcctgccataccgcagacaccggaagtccgaccacattgttgtaatcgccctcaattccctctacatacgcagcgaaacgtccctggattccatatgctcccgctttgtccatcggctcgccggtcgcgatataatcctggatttcctcatctgtcatcgcataaagatacactctcgtctcctgtgaaaaagtctgtttcgaaatcacagagccattttccttcacgatcagcgtcactccggtaaatacggaatgcatctccccctggagctgcctcagcatccgcagcgcatctgcttcatcctttggttttcccataatctcaccgtcctgacacaccaccgtatcagctccgatgataatcccatccggaatctgctctgccactgcctctgctttccgacccgacagctcctccacgacctctgacggaatctgttttgtgatcttttcttctccggaagccggaagtaccgtaaaatccaacccaatctgagcgagcagctcccgtcttctgggcgaagccgacgcaagaataatctgtttcatgatgtcctccttctgtaaaatctgctggacagcgccagcaaatgatgtgataataaaaaataaaatagataaaaggaattataccacaatgtttctcattatagtaaaccagattgtaaaaatgctgcttttgctgcttctcggtatcttctgctaccgcaaaaaactgatcgaccagaccggcagcaaaatgctcgccaacctgcttctgatgatcgtcaatcccatgctcgctgtattatcgcttcaggtagattacagcccacagctggtccatggacttctgctttcttatctggccgcatttctgacgcacattgtcggctgcattctctccaccgccctgattcgtacgaaaggaaatccagactgcggaatcgaccgcttttccgccatgtattccaactgcggatttatcggaatcccactggttcagagtattttaggcggtgagggcgttctctatctgaccgcctacatgaccgtattcaatattttttcctggacgcacggcatgatggttatgaccggaaatttttcacccaaagaactcctgaagggtcttctctcaccgatgatcctttccagtctgcttggtctgctgctgttctttgccgaaatccgcatcccggcactgctggccgactccatgaactacgtggcatcgatgaacacaccgctcgccatgatgatcgccggtatttccgtggcacagacagatctcttcggtatgctgaaaaataaaaaaatgtacctgatctcgctggtgaaactgcttgtgctgccagccatcgttctcatcggacttgctgcagcacatctgccgtcgactgttgcctgcacaattctcgtggctgccgcctgcccggtcgctgctaccggaaccgcctttgcactgcgcttccagaaaaattaccgatatgcatcagagctgtatgcgttcacgacgatcgcatcgcttgtgacgattccgctgctgatgtttgtggcagagcggattctgtaacagctcaataagataatgcatacaatacgaaatttctcacttttcttcgcgtcgtagttctgcacagggcaattttctcaaaataagtttttttgcagaattgctataagtaagtcccctgcttattgctctgcgcaattgaagcaggggacttgcctgattcagttaatctcttatgtatttcccttcatggtgtccgatctgttccgtcaaatatctgtttctcagatcaggcacacctgcttcactgccggatataaatcccctgcgattcaataaaatcgtccagatcctcgatcgtctcctgtgcccaggtctcgctgactggtgcagactttgtattctcctgctcgtcagtacgcccctgctcctgtttttctttcttcacttctttcatacggatacgctcccctcatctgtcttgctgatcttattcgatctatatctcacagtttttcagccaatatcattactgctcctgccgatccgttttttattccctgcctgctttttatcaggctgtcgtcagctcctgcctcactcattatcctttgtccagaagccttcctggccaagctcggtcatctgtagtccgcgctctttgcggtccttgaactgtagctccgggtttttgatgctgaccctcgtaccgcccggtacagaagatgtgatgaatgcattcgatccaatgaccgcgccctctccgatcaccgtatcgccgccaagaatcgaggctccggaataaaccgtcacattgtcctccagtgttggatgacgttttgtgttgcgcagggtctggcctcctcgcgttgaaagtgcaccgagtgtcacgccctgatagatcttcgcattatccccgatctccgttgtctcgccgactaccacgccggttccatggtcaataaagaaatattttccgatcgtcgcacccggatgaatatcgattcctgtcagactgtgtgcatactccgtcatcattcgcgggatcagcggcacaccaagcagatgcagttcatgcgcaatccggttgaccgtgatcgcaaacacaccaggataggaaaaaattacctcgtccgtattgaacgccgccggatcgccgtcgtatgcagcctgcacatctgtcgccagaatttcacgaagcgccggaattcggtttaaaaactcctttacgatacgctctgcctcctgcggcacttcctcatctgtaaatttttttgtacccgtatggtacagcgcctttgccacctgcttgcgcagccgatagctgatatcttccagcagctctcccacatggtactcgatcgaattttcattcaggttttttacttcaaaatatcccggaaacacgatacatcggatctcctccagaatatcaatcacgatttctttatttacccggtttctcatattgatgctgcatgtctccgaatgtcttccgtaactctccagaatctctccgacaagcgtatcgatttcctttttatatgccattttttacacctttctgtggctttttatttttgcctttctattcttctttcggcttctccgacgctttcgcagctgccgcctcatctgcttccgcggctacttcatccgtcttatctgcctgaatcgtctctttcgattcttcggctgccgcttctgcctctgccggaatttctgctggcgtctcttctgcctcttccagcgcttcctctgtcgctgctcccgcgtctgcacccggtacttcctctgccacttcttctggccgcgcagcatcactctcttccacaattttctctgtcacatcggcctttgcatcactttccgcttctgctgcttcttccacagcctcagcgtcgccctcttcctttgacgtatcttcctgcacagatgattccgtcacatcttctgcctccacatccacaacggtctctgccgcttcttctgtattcgcttctttaccatccacagagtcaatgacttccccgtcttcttttccctcgatctttatcggctccggcatccggttgccgcagttcgagcagaaacgctcagtcgctgccacttccatgttgcagcaagggcagagtaccacgccttttacctggcggatctcatcctgcagaaggtccatcacactgtaacgctctgtgatcttgcgaaattccgcttcaaatccctccggcgccgtatctgcatctttgtacttatcgtacagcttcttccccatctcaagataaagtttattcagatacctcttttcctcatttaccttgctgttcagctgacgcacctcattcatcttctggacttccaccatggtatctttactgaacttcttaacttttttactgatctcctcgaaattcatcataatgcatcctccttactcattgtaaataagtgccataaatacgagatcctgatcggaattattctcaagcgcatggctctgtcctacctcgatcagacacgcatccccaggtccgacctctgttctggagccgtcattatctacaaacgtaccttttccctccaaaataaaatatggttctgtgttcccgatgtgctgatgatatccgatgctgcagcccggtttcaggcgaaccatcgcgtacatgcttccgtgtccgttcagttcctcctgggtcaggatatggtgaaattccacctctccctttccaccgcgcagttctttttttatctcaatttgtgctttacgtaccatgaataaaatcccctttcttactttctctttatcttaaaagaatcgccagaaattgtcaactttattccaattctttcagaaaaatataatatttgccagctcccggttctcagaaaacgtcctctgctcgctcgccatgatcagtccctgtttcgtttcataataattatatccatatttttcttcaaaacgcacacttccatcaggctcatcaatcccataaaaagacatgccgtccgcggtataatacggcttcctctgccagtaaccggcaaagcagtgatgcgtatgcccgaccataactgcagtgacatggctttcctttacaagctgcgcaatttctgccggacaggacaccgccctgattccttcatgcgcatcaagaagatggtgatgtgtcattaaaagagacggcctgtctccgacttttttcagttcttctgccagccagtctgcctgtccctgcacaaagcagccatcgctctccccaaaaaccgcgctgtcaagcgacagaacatccagttcatcgccgctccagtgttcattgtatggaaggtctgcctctttttctccctgtgctttcattccaagccagccactgcgaaactcggccttacggtcatggtttccaggcgttacaatcattttgatcccgcgaagatttttggtaagccaggtacggagtacttcataatcttctgcctttccatcatcgcaaagatctcccgtgatcattaaaagtttgatgcccggatgctccgaaaaagctctctccaggcaacggtcgagcagctccagcggatttgtcatccgatataacacagacgcatacccctcctgcgccgcctcatactgcacccgaaaatggatatctgatatgtgaagaatctgcataacaatgtcctttctattgatttctctcgtttatttttttataatgattccgaggtgaaaaaatgaaaaaaaaagcatccgctcaacttataaacgaatacattgaaaaacatcagcttcagcaatacatggacacgaatctttccgatatcgccgagctgcacacatttcggcgcgacgactatctgatccatgcagaagaagcctctgactatctctattttcttgtaagcggaaatgtcatctgctttacctgcaccggcagcgaacgggatgaatgctttgcataccatcaggctgttaccatgcttggagaagctgcttccctgtggggaaaaccgccgcttgccaatgtaaaagcactctgtgactgtgtctgtattgcagtcagtctgcggctgtatcgccagacgctgatgaatgacctccgttttctgcagcatgtctgttatacactcgcatgccgcatgaacaacgaagggcagatctgtgcgcttgtagagccgctggaaatgcggctcgccaaatttattctgcagtactccaccaacaacatcttcacttttcagctcaatgactgtgccgatatcctgaatacaagctaccgccatctgctgcgcgtgctgaaaaaattctgttccgatcagatcctttccaaaacacgcaatggatatctgatcactgaccgaaaactgcttctgcagtctgccggcgaggtatctaacgcagcttcttccggatataccccgtcaggacatccagcaaaaataccgtcacgatgacaccaattaaaataatgctcacacggtcccagtttcttgcctgaatcgcaaagatcagcggtgcaccgattccgcccgcgccaaccagtccaagcgttgctgcgcttcgcactgcaatctcaaaatggttcagcgataaggatgcataaatcggcatcagctgcggcactctcgcatagaaaaaggtctgccagaatccggctccgacggcatgcatggcctctaccggtttttcatccagcgcttccatctcttcggtaaaaagctttccaagcataccaatctgatggacaccgatcgccataacaccggcaaacgggccaggtcctaccatttttacaaaaataatggcatacacaagttccgggaatgcccggagtacgttacagatcaattttccgattctggcgataagcgggcagcctctccagaggtttgaagcgctcagcagcattaccggtactgcgagtactgttgcgatcgtcgtgccaagaaacgcaatgccgatggtaagcagcagaagggaaaatacgtcttcaccgcttccatcgtaaaaataactccacttcggcgacagcagtccccggatcacatcgcctgccattgacggcgaaaacgctgccattccggaataatcaattccagctgcgcagtaaatgatcaccgccagcacgatcaccgtcactgcgatcttttttccttttcctggtttcagatccatcgcagcctgtcctgattttttctctttttcgatcatgccagcctcctgcgaattgcctcgctcaatccatctacaagcactactactacaaggatcagcagaattacaacggaaactctgtcatatttcagcagtgccagagaagaattcaagattacaccgattcctccggctcccacatatccgagcaccgtggatgcacgcacgttgatctccagtgcataaaatgtgtaacttgcaatctgattgaggatctgtggaaaaacagcccatactgcaatctgtactttatttgcaccgatcgactccgctgcctcaatcggcccgtaatcaatcgtctcaattgcctcatagatcagctgtgacaccatgccgaatgtaaatactgcaatcgtcatgacaccagtaaattctccgattccgatcattgctaccagaagtgctgcaagcagcagattcggaatcgtccggatcacatccaggaaaaaacgcacgatcgtcgtaacgatctgattcttcgtcacaacaacagttgccagaaatgcaaacggcaccgcgaaaagtacaccaagcaccgttccaaccaccgacattttgatggtcagcagcatcggttcaataattttcggaaggtacgaaaaatcaggtgtcagaaaacgcttcataaaggaggtcatctgatccatgttgctgtaaatctctccgaaatcggcatctgtcacatgaatgctggctccaacgcagaccgcgagcagcagtacaagaaagaggtgcttgtaccagttaaaatgaaccgtatcttttaacttcatatctgtccccttctcttaaattttcctgccatagattgcaatcagtctttcatccgtcagttcctctggcgccccgtcaaatacgatctctccggcctttaacgcaataatccgcgttgaaaaactacgcgccagctctacggaatgaatatttacgatcacggtcttcccaagtgtagtattaatgttctgcaggtctttcataatcttctgcgtcgtcaccgggtcaagagaagcgaccggctcatccgccagaataatatctgcctgctgtaccagcgtccgcgcgatcgataccctctgctgctgtcctccggaaagctcatcgcagcgggaatgcagcttatcttgcagatccacgcgctccagcgcatcctttgtccgctcataatcttctttggaaaacagaccgaggatactcttccatgtagaataataaccgagacggccggaaaggacattcttctgtaccgtacttctctttaccaggttgaactgctgtgagatcatgccgattctgcggcggatcctgcgcagttcttttttccctgccttcgtaagtgagacgccgtcgatcgtaatctcaccctccgtcacatcattcagccggtttacagaacgcagcagtgtgctttttccggctccacttaaaccaatgatggagacaaactctccatcattgattgtaagattgatatgactcagaccttttaccccattcgggtatgtttttgagacattatcaaaaatgatcatcggttttccttcccgcgattactcagcagccttatctgtgtacgcttcgattgtatcgtatgcagactcatctgcctcaccgtaaccggtatggccccacagagacattgcttcttttccttcctcatcgtttgccatgttcaggaatacatctttgatctgtgccttgaggtcttcgtccatagacggctgtactgcgatcgcatcgttcggaatatctccgtctgtcaggtaaagtaccttcagatccttgtacagatcataatccgtaaacttggaagaaaatacgtatcttgctccctggaatacgaaacatgcatcctgctgaccgttcagaactgcagtcatctcactcggaatatcatttaccgttgtcagtgtgcagtctgtcaatggatcaataccaagatccttcatctctgctaccggataaatgtatccgcttgcggagttcggacttaatgttgcaattttcttccccttcagatcctccagggattccatatcgctgtctgcctttacaagaacttctcctttgaaggtagaggtgtactcgccctcgatcggctcttctgtgtcctcatcatattttacaagctgtgaactgagaatcgcctccgctgcatcaagatttcttgcctgcacatacgctgccggcggcatgattccaagatcaaccttgcctgacgccattgcttccacgatagttgaataatccgttgcaagtgttacatttacatccatgccaagcttctcagacagataatctgcaaacgggccggtctttgcttccatagaaccatcattgttggtcggaacaaactgaacattcagcgttccctctgcagaagctaccattgtgaatcctgcgattgctgccattccaaggcctgcgatcaatgcgcgtacgaaacctttcttaaccatagttgtctcctctcctcttttggaaaataatagagtctaataatttttacaaaaagactatacctgtttttcatggaaaaatgatatgacacaggtcactttttacagggtttacaactggattttacttattttacacacaaaaaaacctctgaaataaattcagaggtttcagaggcgtcaaccggaatcgaaccggtgatagaggtgttgcagacctttgccttaccgcttggctatgacgccatattcttagtgactccgacgggaatcgaacccgtgttaccgccgtgaaagggcgatgtcttaaccgcttgaccacggagccttaatgaaacttttgtctgaagtatacgccgaaagttatcgatatatacaacaaaactccccgagttgggctcgaaccaacaacccttcggttaacagccgaatgctctaccattgagctatcgaggaatactgtagaaagcatatacaaccatccgatttcaccgggtgatgcacaccgatcaaagatcgtgcgactacgtgccttcaaaaccacatacagaataatactacattcatccgataattgcaagtcttttttagacttttttaaccctaccgattgctttgaaatctctttctccgcgtttggataagcttgcgaccgattagtaacagtcagctccatac

SEQ ID NO: 1377 - DNA, 6127 bp, Unknown
  16S sequences of unknown bacteria
agacttcctagtctgcacgggcctgttttctgtcgaaaagtccacagcgggattgcttttgaattactccgaatcgtcctcatagatcggcggcgcgaattgctccatggctgcgcgaagcttcgggtgccggattacaaaatgaatggccggggatttgtgctttgagaccatcgcccattggccggggcgcaaaaggatttgcagattgcggaagggcaggcggctgctttgccgcagcgtgtagccggggtgcgccgcggcaaaacgctccgtctgggccaggtgcatctggtattcctcgtaggtatagggaatgtccgtctcataaaacagaccggagagggccaggagcatcggcgctttgacaaattcctccggcgaaagcagggggaccgtgtccgtcaccgcaccgtgagccaactgacgctcgatcagcaccctctgggccgcagcatggtccaggatctgtgccgcagcctccggtgccagggcgcgcttcgccagaaacgcctgcagcacatccggttcgaaggtataaagcggcagggacgcgcagatatgggcccaaggtcctggcgtctgtgcatcggccagcaggaaggcctgcagcgcggcggcacgctcggcccggtagatctccatgagcggctgagcctgagccagtagtgcctcagcccgacgggtgtaataggcgatgtcgtcgcgctgctttgtcagcgtatagcgcccggcactgtgctgcccggcgatggcctcgcccgccagagccgccgcgccggagaccttgagcagatgggaaaagacattgttctgcacgcccttgagataatacggcgcaatctgccccgtcatatacatggggatccagctctccaggcccagcatcatatcatcaaagctgcggtccagattgtggatctggtagagctgcaagcctttttttagcatcagagccatgccatacatccacttcttcggaaactccgggtccttggccatctcctccatgggcatatcgctgtacatgatgaccggcgcctgggatttggaaagcaccgtcgccttgagaaaatccaactcactggtcatcatttcagataggcccgtataggtccgtgccgtcggcagctgaaagggcatggtaggcacctttatctcatcaaaatggatggcgcggatgtattcattcaggtcaaagccgtcgagcttttcgaggaatgcgcagacgctggcctgttgcccttggtccgcacccagcagccagccctgcagcagcgcacaggcggcggcattgtcctccagcgactgaaccgagcagcccagcagcgtagcaaggacgccgcgggatgccgcatccctcgcctgtccgacagcaaaccgggcgacgccggctgcaaactgggccgggtctgccggttggcgggtgccggagcgaaagcgcgacagagttgaagcatcgtaattcgtcgcctgacaaatccgggccactggcagctgcagcacgcggatgagcgtatccagatgctcccccagctgggaagggccggcggcagttatctccgggcaggataagaacgccgcccgcacctgttgtgccgtgagtgcctcttctgctgcccgctgctgcgagaggtttgcaatggcgtcgcacagtgcggaaaaagtcgccgactgcacatccggtacccgctccccagcgcggtaccggctgatggtcgccggggagagcccggcggccgtgcagagctcgctggctgtgcagtccaggcgggcaataaaaccgtttaacgtttggctgaaattcatgctgtacctcccggatcgcagaaagagagcttttcccgctcattaaattccataatcataatccatactccggattctgaaagaaagcgtgcaccaagaatcccgtgcgctgcacacgcgacaccgtcaaatgcagagcccggcacaccaacggcgcgatgcaatcacttttcaagcttttcgtccgtttctggtataacccagtataaaacgtacggccggaaaatacaagtgtttccatcttggcattgccaagacgggaatccaccttgtgccacgcgtaagtgtttgataagctaaattaagcaagataaacacatacgctataaaccgacataaccaacataacacgataacacggcatacgcagcgggcctcgtgcaccgcatgcacacgggagggtattgctatgaaaaaatggatactacgctgcatgctggctgtcagcttgctgctggtcatctgcgtcacagtaggcgcaatcggagaggaaaagctcccaggcgatgcgggctatggctacagctatcgcttcgtcacccgggacaccattgagatcacagcctacaccggctacgaacgcaacgtcaccgttccggcggagatcgacggctacactgtcgtcggtatcgcgtattttggccgggatgaggccattggacaaaacccagtagtcgaacaggtcacactgccggacaccgtacgctatattggcgcaggcgcctttgcctattggccacgctctgatgacacagtgagcgcgctgcgagaaattgtcctaccagccggtctggaggtcattgaggaaaacgcgttttacaactgcttcagtctggaaacagtggaagttcccgctagtgtgcaaaagattggaccctatgccttcgcaaactgtggtgcactgcagaattttaaattatcgggcaaccagactgtcctccaagatatggccctaggaagcattctgaacagcgaagggttgattggtatgctccaggacgcctggtatgcctgtcaggacgacttttttatctggaacggctatctcttcggctaccagggtgagagcaaaacgccagtcattccggcaggtgtccggggcatcatgggctacgccttccgcggcagaccggagatcaccgccgtgacgatcccggactccgtcgaatttattggcgaccatgcctttgaaaactgcacggcgctgacctcgctggatattcccgccagcgttacgcggattgaaaacggggcttttaacgactgcagcggcctaaaaagcgtgacctttcaccagggcctgcatgtcatcggcgagtatgcctttgaggactgcacagctctgacagagattacactgccagatggcctggaggagttgggcgactgcgcctttggctcctgcgaaatgatccaaagcatgtacttcccgtccagcctccgtgtggccgacgtgagcgctgtgcaggatacagcgtggtacaatgccaagcaggagggcgagctggtttacctgggcggcgttttggttgggttcatcggctacgacctgccggagacgctcatcgtgcgccctggcacgcacacggtaaagctggaaaacgtctataccgatacactcaaaaccatcaccctgccggaggggctggaaacgctgatcctacaggggacttacaccaagctgacgagcctgaccgttccggagagcgtcacgtacatcgacgcagggaccttttacgagctgcgctccctgaagctgccgcaagaagcaacgctggcccagggatcatttccccgctgcaggcggctggagagcgtcacgatccccaaagggaacccgtatctgggcgcgttttttgcctgcgacgggctgaaaagcatcaccctgccggacgatgttctggtgctttccggcggcatcggcggcaagagtcttaccagtgtcgacttaaaccaagtccgggtgctgggagaaggtgcatttgctgattgcagtgcgttgactcgtatcacgcttccggagagcctcgttgccatcgaaggggtcgccttttccaactgcacagcgctagtcgcagtacagggtggtaaaaacgtccgggacctcggctacggctgcttcgcaggctgtacagcgctgctggatttcggtaatctgccggatcgtgtgcgccgggtcgatcataccacattcgaaaataccgcttggtatcagaatcagccggcgggcgtcgtctattttggccgcatcgcctattgctacaagggcacgatgccggagggcacgaccctttccctcaagccggggacgatcagcgttaccattggttttatttttgagcaggagcctctgacgccccggacgctggcctattttgagcagccgaacctcgtcggtgtcgtgctgccggagagcgtgcgcgatgtcggcgcatacagtctctgcaacagccccaatatcaaagccatcgacctgggcggcgccgtctccatcggcgacaacgccctcaacggcacagctgtgcaggagatcaccctgccggacagcacccgttttgtcggcgcagatgcactgacgggcgagcatttgaaagctgtgcatctgaacgatggcctggaggtcatcgaagagggcgcatttttcagcgggaccggcctgcaaggcgtacagatcccggccagcgtgcactatatcggttaccacgccctcggttgggcccccagtgatacgggctgggtcagccagcccatccctggctttaccatccgaggccaggccgattccgcagcccagcgctatgcggtggcaaatgaattcacttttcttgaagcactcccctgcaccgcgcaccgctacgccgagaccgtcgtccccgccacctgccaggcaggcggctatacccgccaggtctgcaccctctgcggtgatacgcagatcacagcaaaaacgtccgccaccgggcatgcggcagcaaacgatgcagcggtcgccgcaacctgtgtgctgcccgggtacaccggcggcagccactgcgccatgtgcggcaccgtcctgtcgcagcatacgctgcagccggccctggggcacgactggatcagcagctgggtcgtcgaggagccgtaccagaccggctacggcatgacctgcttctactgcggccgctgccagggctatcgctatgagcccgccgggacacagcatgtgcaccattatatcgattccgtcgtcgcgccgacgtgcattgacccgggctttaccgtccacacctgcgcctgcggcaatacgtatatcgacagtcatgttccgcagctggggcacgattttgtgaacggcgtctgcacccgttgtggcctttccgaagccgacgccccctgtgacggcggcgcacactgccccagtgcccggtttatcgacgtccccacccccagcaactgggcccacgcgggcatcgactacgccgtgtcccacagcctgttcgccgggacctcccagacccagttcagcccgaagggcgtgatgaaccgggcgatgctcgtcgccgtcctctggcggatggcggggcggccggagcccagcaccgcatgcccgttccaggacgtggggcctgatacctattatacgaaggccgttgcctgggcagcggagaacggtgtggtcgccggtgtctcggcgacacggtttgacccggcggcgaatatcacccgggagcagatggcggcgatactcttccgctatgcagcaaaatccgggctggataccagcgcccggggcgataccgccgccttcccggaccgggaccgggtggcatcctatgccagcgacgcgctgcgctggtgcctggccgtgggtatcatcagcggctcggcagaaaacggcaccgtctacctggccccccaaggcagcgcgacccgagaacaggtcgccgcgatcctgatgcgctactgcaagcacatcagagcctaatctatcgcagaagtcgccttagacgtgttgtctaaggcgacttttttcgttttaacaaaaattcccccctcgcgggttcacagggcatccacgcagaccgggatctgcgtcaggggtgtaatggtgtccggctccactttgcagcgcagggccaggagcgtcacgccggcctgctgcgcttcgaccaaggcccgggcaaaggccaggtcgttctgttcattcggccgcacgcagacgacatgctccatggcagcgacaaagagaacataagccccatagcccgcttgggccgcgcggaggagcgtgcgcacatgacgcgtaccccgctgggtcggcgcatcggggaagacaccc

SEQ ID NO: 1378 - DNA, 19153 bp, Unknown
  16S sequences of unknown bacteria
cttttttgtcgtccgcataaaggtctgcgcgacggatagaggaggtcttttaaaggaggaagtattgttttgcgccggaaaggaaaagataaaaattccctttttttctaaacgaaggcagccgaacctttaaaaatccgcgaatttgtaatatatttttatgatattgtgtcgtggacttgacagacggcgtacaatttgttacaatgttattatagtccgatgaaaatttaaaaatcacaggggtacccctgtattacgcaataggcattgcgtaataaaacccataatagccaccatgcctttcgcgcggacagacggatattttcgaatatactatttacgggatgcaggcggataatgtccgaattttccgcacgtttccgtaccctgtcgggatcaggatgacgtattttcattcggtctttgcggaaaaggacgtatgcccctgcgcaagcgggagaacggtctttttgcggcttttttgtcggaatccgcttctccgcacggaaaaaacacggaataaaagtccgcttttttcttcgcttttgcgcctctgcgcggaaaattccgcctcttcacggattcgtctgtttccgcttttatttgtcctttttgtccctgcgcgcgagaagaaggaatataaaaagcgctttgtaaatatatatagaaaaggttatcgggtgagagaaggaagttatgggaaaaggtttgtctaaaaatactaaaaaacaactgatcaatatccttttcctggcggtgctgatcggagtgacgctgtttattctttttacaagcaaccgcgaactcaattttgaaaacattaaggatttcatcctgcgctgcaatccttggctgatcgtcgcggcgttcgtgtgtatgctgcttttcatcgcgttcgaggggttgagtctgcacctcatcagccgccgtttgggatacaaacccaagctcttctcgtcgatggtgtattcttcggcggatatttattattcggcgatcacgccctccgcatcgggcgggcagcccgcttccgcgtattacatggtgaaggacggcatggacgcgggagccaccacgtttacgctggtgttcaacctcatcgcctatacggcggcgattctcgtcatcggcgtgctcgcgtttattttccgtccgaggatgttcccgcacttcgaattcttcgtcaagtttctcatcatcgcgggcatcgttctccaaactttgcttttgggcttcttcatcgcctgtatgtggtgccataaagcggtgttgaaggcggggaacggactgatttccttgctggcgcgcatgaagatcgtcaaaaacaccgagaaatggcgcggcaagctcacggacgaggtggagaaataccgcctcagttttatggaaatcagaaagcatcgggccttgttttttcaggcgttgctcctcaacgtcgcgcagcgcgtttcgcaggttctgatcacctgctttgtctgtacggcagccgacccggatgcgtctttcgtcgatttgttcgccatgcaggcgttcgtccttttgggctataactccatccccctgccgggaggcgtgggagcctttgaatatctgtatctgaatatctacaccctgcgcttcgataatacgttcatcgtggtggcgatgatggtgacgcgggtgatttcctactatctttgtatggcgctcagcggggtcgttacgctggtgtatcatatccggctgatgaagagaaaaagacaagaaataccgagagagaagagcgaagatgaagaacacgagtaaaaaaatagtcggcttttatcattatggcgtgatcctcacatatttgtccgtcattgcggcgatcacggggatttgtttttctgtgggcggaaacaaggacgcccgtcccgacataggcgtgatatgtctgttgatttcgggcttttgcgacgctttcgacggcgccgtggcaaagacgcgcaagaataggtcgagagaggacaaaatgttcggagagcgcatcgattctttgagcgatctgatcgctttcggcgtcgctcccgccatgatcggctttggaatgaggctcaatcgctggtattttattcccgtttacggcattttcgtgttgtgcgcgctcatccgcctcgcctatttcgacgtgaccgaagagatccgcaccagcgaagaaaactgcggcaggcgtctttattacgaggggctgcccgtcaccaacgtcgccttcgccctgccgattttctatctcatcgccactatgttccctccctatacgatggcgcgcaacgccgtcatgctgatcgggtatctggcgctgtccgcgctgttcgtcatccgtttcagaatgcccaagctcggcgtcaaagggctcatcgtggccatgctgattctggcgatcattttaggttccctgttcctcatcaggcgggcggtgctggcatgaggccgatcgtaaaaaagaagacgctgcgccctgcggcgtctttgcgttttttatacgagaagaaactagggacgccttttttaaaactgctcacctcccgtttcgtttccagggcggtggggagatacctcgacggacggctctccaaggggcttatcaagggctacgtcaagaaacacgggatagacatgaacgagtacctggcggagcaatatccctcttttaacgccttttttacccgccgtatccgccccgagcttcgtccctttgatttctctcccgaagcgtttgtttccccctgcgacggaaagctctccgtttttcccgtggaagaagggggaaaatttgaaatcaagggcttttcctattccgcggaaacgcttttgaggaacgtggagcttgcggaaaaatatcggggcggctggtgcctcgtgttccgcctgaccgtagaggactatcaccgctatttttatatcgacgggggaagcaaaggggaaaacgtctttatcgaaggcagactgcacaccgtacagccgatcgccctcgaacacaggcgggtatttacggaaaactgccgggaatataccgtgctgcacaccgaaaatttcggcgatgtgacgcaggtggaagtcggcgccatgatggtgggcagaatcgtcaacaatcaaggcgcgggcagctttcgaaggggagaggaaaaggggcgctttgaattcggcggctccacaatcgttcttttggtggaaagggagaaagtggttctcgacgaggaactcatcagaaatacgctggaagacggcgaaacgaaagtgctctgcggggagcggataggaatcaaagaggttgccgggcggtaaagtttccgttcggcaatttttttatcaacgcttaccccggtaattttggaaaaagggcttgcctttcggcaaggcggaggtccggaaaagagaaaaagcaaaatgtcgcgtccgaaatatttgcgaggagtattgacaatttcgttgttagagagagcgcacgcaggcaagcgtttctatgccgtcggaaaggcgcatcgcctatacgataagagaaaatacgcaaactgcggaccgttcgggagataagaacagcgcggaagccgcacttcgttttttgtatcttaaaaaatgtagagcgttatgcgcctgagagaagacacggaaaccgccgcgggcgcggctttgaaaatttacgtgcccaaagacgcagacagggcggggagagcatatctatcgcgcttttggcgccgtcaaggtcggtatgccgagtctgacaggcgtcgatacggaaggggtgttcgaaatatacgttcccgggaaggcatagaaagaataccgggcggaaggcataaaacgaacggctttcaaaagtcgtccgtttttgtgtaaattatggattttatgtaaaaatcggcggcaaacgcgtaaaagtgcttgacggaaaacaaaataaagggtaaaatagagaagtataaaaatctgttgatggagaaattcgatgacagccaataaacctttgaaaaaaatgatctgcgcggcacttgcgggcgtcagcgtgttcgcttccgccatgatgttttccgcgtgtacgacttctcatcccaaagtggaaatgaagattgcctttcacggcgaaacgtatacgctcgaatataaactgtatagaaagcgcgcgccttccaccgttcagcactttttggaactcgtggagcacggctattacgacgggctttgcgtgcacgattacaacagctcttcggaaaaattgtatacgggcggctatacctatgacgccaatcagacggcggacggcggcttggtggagaaaaactatttcgatatcgtaaaggattggaatatgacccagaccgtttgggacatcaacgataaagaccctgtctacaccctttacggcgaattttccgacaacggtttcagcgtggaaaacggcgctttgaaacagagctacggctctttgacgatgtactatacgcccaaggaaaaatgcgctacgtacgtggacgtcaagcgttcggacggcaaggggaacgacgcgaagctgtataagtacaacagcgccacgtcccttttctatatctcgctctcttcctcctcgtcgggcagcggtacgtcttactgcacctttgccacgctcgaagacgacagcgtggaggtcctcgacgatttgaaggcggccatcaccgattatatcgaggacgaatacgagggcaacgcggcggatttcgcgccgacgtcaaaagtcgtcgtggacgaggacgaccgctatgtaggctccgacaaggaatcccgggaatattccgttcccctcgaacccatcgtcatcaagtccgtcaaagtcaagagctattgattcttttcagggcacggcgtttcgcacccgatgataagataaaaaaagaccgtttcccgcgcgaaaggggaaacggtcttttaagtttgttgtcgcaggcggcacttacttaaaaggtttgcaggttgtcgcaggatcctgcgtatccctgaatgtcgaggaagggggcttggaatatttcctctatttttaaagatcgcgggaaaatattgtcccgcgttattttttatccttgaatatcgacaacttttccctgtttcacctccgcggtgaaatagcgcagctcgtatagccgttctttctttttccgcacgagtccgcaagtcttcggatcttccgtcagggtcacgtcgatgaaatcccctaaaaacgccttgatgtgctcgctcttttctttcagctcctcgctcagcatctccgtaaagtccgcgccgatcaatacgctttcgaaaaacgcatagggcagaagttcgtcctgcgccgcctgttcttcgccttcgcgcgcttgctgacgaatgcggaaagaggtctgataacacccgtcttccgtcagcgcccattcgcactccgccacccgtttcttgctgtccgagaggggcagggtagcgctcagcgtattattttcgactttatagctcaggaatcgctcggaaagcacgcactttcccgcgtcgttgaacaccgcgagcgtgtccccgccttcgaggaaaaacagaccgctttcatagcggatgacgcaggattcgaaacaaggagggagttccgaaacaaaaaagccctttgccgtttcgagggagaactgtaacgcgccttgccggaatacggtgacgaggttgccgacgaaacgttcctgcgcgatgattttgagcgaaaaatcggacggcggaaaatcgcgggcatagacggcgacgccgtcgcggagaatataaatttcgcatccctgcgggggagagaatcgcaatttttcggtgatgaagaacccgacggggagggcgccttcggggataaattcggcaaaaacgttgtctttgggttctatttccgcgaagcgctcgaaagagtcggtcatgccgaaatagacgcctccgagcataagcgcgcacgggcgcgaggacaaaaaataaattttcatacttaaatatattcttttcttttttgttccatgtataaatcttgaaaaatatgttaataattccttcaaaacggaggtgacgttatgaacaaaatcaatggttacacggaagaagaggcgaaaagtttggtagaatacatttgggcgggaaagcaggcgggcaaaacgcttacttatcttttcgaaacttacggagccgaacacggcagagcgaaaggcagcgtgaggaactattattacgctttgatgaagagtcagaagaaggacgaaagggtagtgaagttattggacggcaagcagctttccgtggagcagatccgcgaatttacggaagaggaaacggataaggttttgaggagcatccttgccgaaaagagtaagggagtatccgtgcgccgggcgatttgcaatttgtcgaaaggggacgacaagttgatgctgcggttgcagaataagtatcgcaacgttttgaagaaacaaccggagcgaatcgagtcgatcgcttcggaactcggcatgggaacgaaggacaggagctttttgcagcgccgcttggagaacgaaatcaacgcgctgtacgataggctcacgcagtcgttgaaggaagagaacgcccgcctttcgggggagaacgcgcgtttgaaacgcgaaaacgaagcgttgaaacgccgcgcgtcctttcgggaggtataaatagaagccgtcggacatccgacggcttttttgcggcaaaggaagaaaaaacgcttattttgtcgaatgatgcgtataagaaggggaaaagccgcccatactgactgtacgggatcgtcgcctcgcgcgcgttccgtataaggaggatttgaatatggagaaatttaccatagggcttttgctcggcggcatcggcggcgctctgcttgcggcgaatagctgcaaaatgcgcacgcttgtaagaaaaggacaggaagagatcaaacagcgtcttgatgagatgatggacgaaaaactcaaagagatggaaaacggcggcagcgtttttggcggcggctccgagaataacgaatcgggcgaaaaaatgcccgaaaaatcagaatcgcaggggcagggtaaagacgacggcgcgaaggaacgcggaaaataattttccgtaagcgcttttaacgctgttgttttcaccatgttttcaaaaagcgcgacgaaaggtaactttcgccgcgcttttttgtaaaagaaaatcccgcgcttttgcgcggggggaagctatatgctgtccgatctgccgacgagataatccaaagatacgttgaaatattccgcgatggcgatcagactgaaaactgtgggaatcgaattctttttccacttgcaataggcgttgaaatcgatgcggcaggacttggaaaacttataaaaagtaagattgtgcttttttaagagcaattctattctttcgcagaaacactcatgtttgacggcgggaacataccccgtaaattcggaacgtcccaccatatagtcgagggaacagtcgaaaaagtcggcgagcttgatgagagaagcgagagagggggaaaatctttggttttgccaattgcaaagacaggtgcggagaatatggacttctttggcgaattgggtaatagtgagatcgttgcattcccgatattcttgtatgatttcattgagcgaatccatgtaatttgtcattttttcctttgttacgcggcgcaaaagccgcccatgtgaaattctttaaatcgcatataaaaatcaaatggaatccgaccttcccacgaggtaatcgacggaaacattaaaatgataagccaatttatttaataattcgggggtaggggtagcgcctctttgccagcgggtaaagttgtaatttttaaatttgcaggaagtggctatataatttgccgtttgatgattcttttccattaaaaattttaaacgtttctgaaaagaagttcgttgtatggcgagataaacttcttcatgctctgtccttcccagaagaaaatcaagagaataattcaaaaagtctgcaaccttgattaacgaatcgagattagggtaagcatccctgtttaaccacaaagaaacgttttgctcggacaccttggctgattgagcaaattccttttgagtgatgcctttggtttttaaatgccattcaagtgcttccggaaaagcctcataatttatttcttgtatatccatagtataaatttacaacaacgggacggtattttgctcggtaatcaggcgcacgtagtatacaataacttttagaaaaatattaaatgaaatccgacctgcctacgaggtaatcaacggaaacattaaaatggtcggcgagtgcgcttagtatttcaggcttgggttgagtaccttttttccatttggaaaagttggaatttttaaaattacatattttggcgatacgattagcatggacgccttctttttcgattaaatcatttaacctgataaaaaaagtggtggatttagtggaaggataatacttttcctgatcgctgcgttctaaaagatagtcaagagagcaatttagaaaatcagcgactttaataagggaatccaagtttgggtaatttgttctatttatccacaggcaaacgtttcgtgccgatacgtttgcccttttagcaaattctttttttgttatagagtgagtttccaaatattctttaatgctatcagaaaaaatattaaaattcaattttcacgccccaccaaataatccatactacaatcaaaatattttgcaaggataataagattttcgagagaaggaatgcgtactccaaaaaaccaatcgtcaatgctctgttttgaaaaaggcaattccttttttaatttatgtcttgaaaattttttttctttaagaattttttgaaaacatagagaaaaaggctttgacggggcaaagctttgagtccgatattcgttgacgcgaccgcagagaaaatctaaggaacatttaaaatagtcggcgaattgtatggcgcgtgcggtaaaaggcaaaacttcctttcttaaatatttataaagtagcgaaatttcgattcctaacgttttgcaaagcagctccttggaaaaactttcggaggaggctttttccgcaattaattcttctaatcgttctccgaaaatttcccgtacactcatttaaaaatttccctttttttaaaattatgcctaacattatccaaaaacgctggacattgtcacggataaggactataataggaacataaaattgtatgatgttaggatttttagaaagcgattaaaaatctcttcctactaaataatccaaggtacagccaaaatattctctaagctctatcaaattctcgatagtaggaagccgaacatcattaaaccaatcgtcaatgctttgttttgcaaaaagatttgtctttttaaggtcttgcctttttatgcctttttctttaagaagttcttgaaaccgctcggaaaacttttttcttttgtgaaactgtatttcttgatattcttctgcataaccgaacaaaaaatttaaagaacacttaaaataatccgaaattttaatagcattttccacagaaggagtacttttgcctcctgaatacttatatatgattgaaaagcttagctgtaagtgttttgccaattgcatttcagagagatctttttcactcattaaatattttaatttttcactaaaaatatattgaatatccataaaaatccttttatactattttgactgaggttagtaaaaattcgggattcttctcaaatgttaggttttaaattcatatctgattagtgaaaataaatagtaaactaataaggaggtgaaaaaatgccagtcaaagactttatagagtatttaaaagtgctggtgaaagaggaatttgaagcgataatttccatttacggcaacgtgctcgtcctcaaatttgcggacggcgttgaaagaaccatcacggtagaatgattttgtgtataaaggagaaattttatgaaagattcaattttagacgagttgtttacgggcaactggaaaacgcccttggaagtgaaattccccgaaggaacggaagatatcagggaaaaagaaagcgatattcacgccaaagtagaggaattgttaggagaaaacagtcctttactcgatgaaatgttggcggaaagattctcgtacgaagcccatcttcaaaaccaatccttcaaaataggcgtcaagctcggcttccgattcgccctcgcctgtctgggggaggataagtcataatcgtccgagatcgacaaaaaatcccgaagcggccatgaggggcgattcgggattttttatgtccgaaaagagagttgtttagtcgaaaaaactttgcaaaaggacggggcaggggtgcgaatatcgcaaaggagaaggaaaagaggaaatttattcccctatgccaaaaacaacgaaaaaaagttgctttaaaatcgggaaaatctatttcaaaacgatagacgaacggaaacttttatggtataatgattccatggttttcaaacgggcgattgctttcgatataggcgacaaacgcataggcgtagctgtcagcgacccttttaacgagtacgcgatgccgtgcgaaacgtattttcgcacccgccgcttcgacgaggacgtggcggcgatagccaaaatagccgaggcgcggggcgcggacgtcatcgtctgcggtatgcccgtcaatttcgacggcacggaaagcgtccagacggaaaagacccgccgttttgtggaagccttgcgggaaaaaacctctcttcccgtggaattggaagacgaacgcttcacgaccatgcaggctcgggaagtgcagatcgtggggggcgtaaagcgcgacaagcgcaagcagacgatcgattcaatcgcggcttcttacattttggaagggtatctttcgcgcatgaaaaagcgtgcgcgggaggaatccgaagaaaacgcgcgataaggtctaagggggagttatggctacgctgcggggggaaataaaggacaaaaacgatcgtccgctccacgattgcgagatcgcccttttggatgaaaagttccgggagctttgcctggtgaaaagcgatgaacggggacgttttcaaatcgaggcggagaacagaatttatccctatttttacgcagtgaaaaattacggagtcgattttctggaattttggggaaataacgtcgatttgaccgccgactttgaaatgaccgttcgcatcggcaaaatagagatatacggaatgaattgttttcagatcaaatgtccgctgcctacgctttccgtctatttccgccccatgagtctgacgcggcatcttcgcaaggagaaagacatcgccccggaattggaaaaagagaatatccgcgtaacgataaacggcgcggcggcggaagtattggtgatcaaccgcgtaaaggaatatgcgggaaaagacggctttttgagcggttacctcttgcaggcggatacgtcgaaaatctttttgtccgaaagaaacgttctgtttttgcaagtttatgataaggaaagcgacgatatcggagaggcaatgtcctttttctcggtctgaaaggggaatacgcgttcttaaaaaggcttcatataagagcatataaaataaaggcaaggagcgccgcggcggaaaaagcggcgaaggataaatcatggataatcagaatttgactgacgacgaagagtacgacgataatattctcgaactcgaagacgacgaaggaaacgtcgaaaagtatcttcacgtaggcacaatcgaatataagggcgaatggtattgctttttccaaaaagcggaacccgaaaccgaggaagaggaggatgaagtggtcatgttcctcttgaagggcgagggggacgaacaggagcttcttcccttggaggacgaagaactgatggacgaagtttttgcggagttttgcaaccagtacgagcagtacgaggacagcgaggacgcaatgaaactggacggcgcggaagactgataaagaccgtcttctttccgaaagcgcaaaagatgccacttttccccatggcgggcgaagtggctttttttgacaaaaaagaaaaaagaggcgggcagggctgcgacgaacgcctgaaatgcgcgcttgaaaatcagggaggacagggagaggtatggcaaaagcggaatattttttacacggggatttcgatacggtcttggcgactttggaagcggcggttttcaaaagcgcttcggcgagtttggaggattccagcgactttcgcgcgccctcctgccgcgtcgccgttcgcgtatacgagcggtacagctggacgggcggcaatcgggtcagtttgaatatcacgctgacggaaagcgacgggcaattgttttgttccgccatttcgtcgggcggcagtcaggcgatgttctttaaaatcaatactttcggggaagaggcgtttctcgactgcgtgcgcgaggctttggaggcgttttcggcggaaaacgggaaacaatgagaaaaaatccactcaaaaggggcttatagaatgacggaaaaagaaaaactcaaagagcggcgcaagggactgaacgaggctttgaaggaaaaactcaaagaggcgtttcaagccgtatttcccatcgctttgatcgtgctgggattgtcgcttacgctgacgcccttaaaaacgggcacctttctgcttttctccatcggcgtgttgctgctgattgtgggaacggcgctgttcgcgctcggcgcggatatgtccatgctcgtcatcgggcagaaggtgggcgccactctcacgaagagcaaaaagatctggctgatcgcctttatcagctttgtcatcggcgtcatcgtcacgatggcggagccggatttgcagattctggcggagcaggtgagcgatatagaaaatatggtgctcgtcatcaccgtttccgtgggcatggggatctttctgacgatcgccatgctgcgcatcgtgttcggcatcagcctgtccgttctgctggcgattttttacaccgccctgttcgccgtggcgctcttgttcgtcccccagagcttctgggcggtttcctttgattcgggcggcgtcacgacgggtcccgtcacggttcccttcatcatgtctttgggcgtgggcgtcgccgccgtgagaagcggcaaaaagagcggcgacgacagcttcggtctggtggcgctgagcagtatcggtcccattctcgccgtgatgattctcggcatcatttataaggcggaaggcggcgagtacgagatggaaaccgtgtttgtgccggaaaccacgcgcagcgctttcgcggcgtacggtcggggactgggtacatattcgctggaagtgctgcgcgccatttctcccatcatagcgtttttcgttctctttcagctcgtgacgcgggcgttccccaggcgtcagctgatcaagatattcatcggtcttgcgtataccttcgtgggcctcacgtttttcctgacgggcgccaacgtcggcttcatgcccgtcggcagggagatcggtcaggcgctggcgcagatctggaacggctggctgctcgttcccgtggggatgctgctgggctacttcgtcgtatcggcggagcctgccgtatacgtcctgaataaacaggtggagcatatgtccgcgggcgcggtgagcgcgtcggcgatgaaaaaggggctttgcttgggcgtatgcgcggcgctcggctttgcgatgctgcgcatcgtcacgggcttcaacgtcatgtggctgctggtgcccggctacgcggcggcgttgattttgatgccgtttacgcccaagctgttcacgggtatcgcgttcgactcgggcggagtcgcgagcggcgccatggtttcctcctttattctgcccatggcgataggcgcgtgcctgtttctcgcgcccggcgaaatcatgacgctggcgttcggctgcgtcgcgctcgtggcgctggcgcccctcatcagcatacagatactcggcattcattacaagcataagacggctacctataaaaagaacttcctcaccgaggaagacggcatcgtggaatacgaggtgaactgaaatggaagcgattgaaaagacgttaaagacctcgctcgccaaggaaaagatcaaaaaaatgcgcattgcgggcagggaaaaggaaggcggcgaaaagaagccgtcgcggataaagctgctggtcggggtggtgtccgcgggcgacgcggcggaagtttcccagctctgcaactccgtgggggcggcgctcagctactccttcgaagcgttcggcaccgcgcagaccgccgttctcgactatttggggcttggcgaaacgcccaagcgggtgatcctttcgctgatccccgaaagcgcggaaaagtcgattctggaaggcatacaaaaggaaatggcgctgtatctggtggggaagggcatctgcttcacgctgccgctgacgggcgtttccagcatcgttgcgaacggtcttttgaagggcgctccgcaggaaaaaaacaacgggagggaaggaaaaatgaaggaagacacgagaatgtacgatttgattatagcggcgatgcagagcggcttcgcggacgacgcgatgaacgcggcccgggaagcgggcgcggcgggcggcacactcattcacgccacgacgctcaacaaccgcaaggcggaacagctgatcggcgtcaccttgcagcaggaaacggaagttttaatgatcctgaccaggcgcgagggcaagctcgccatcatgcgcgccgttcaggaaacggcgggactgaaaacggacgcgggcggcgtcctcttctccctgcccgtggacaatctgataggagtcggctccatgtcgcccgacgtggcgacgcccgaacgcaaggaataactttacgcatagggcaggtatgcggcgaacgcataccttttgatgcggaacgggaaagcgactcttttttgaaaggcatagcgcaaggatttcctcgcgcctgtccgcccgaaaaagggtcgtttttgtatgccttttggggatgcaagcgtcgattgagcgaaaaagacggcttttcaagcaagacttgcttgcattctgccgccgcgcgtgataaaatttccgtaaaacgaggctccctttggcgccgaaaaacggaagaaaaaaaggatactgtcgtatgaaagatatatggaagagattaaaaaaataccgattgccgctcgtttcggcgttcgtgatgctggtgctgtccaccgtctgctcggtgacgctgcccacgctgatgacgaatatcgtcgattacggcatcaacgcgaaagacatcgattacgtttatagaacgtgcgcgataatggcggcggtcacggcggcggacgtcgttctcgtcgtggtcgcctataagataggtcaggaagcggtggcggcgttctgcggcgatctgcgcgcggaaattttcgcaaaggcgaacgccatgccgatggacgccttcaaaaagatgggcacgggcgctctcatcactcgttccatcgaggacgtggacagggtgggcgacgtgctcaatacgctgatgagcgctctctccgccattccctttacgatgattttaggaacggtgctcgcctttcgcaaggaccctgtcttggcattgattttgttcgcgttcgtgcccgtcattctcgcggtggtcgtgctcgtttcgcgcaggctgcatcccctttggaagctctcggacgaatacatggataaacagaacgcgctgatccgcagccgcctttcggggatccgcgtcgtgcgcgcgttcaaccgcgagagcgcggagcaggaaaagatagacaaggcgacgcatatcatggcggggaatatcatcaacgccaatatccgcgcggggttaataagtcccgtgtgtatgctcgtgctcaacttggtgacggtgctgattttgtacgtgggcgccttccgcatcacgctcgaaggcagtaaactgacggtgggcgggatactcgcggtcatcgagtacgtggggatgatcatgtcggggatcatgaccatttctttctccatttccgagatcccccgcgcgcgggtgaattgtatgcgcctcggggaagtgctctccgcggaatcgatccccgaggccacggatacgcacctgcccccctttaaaggcgccgtttctttaaagaaagtcggctatcgctacccgggcagcgaaggcagcgcgctttccggcgtggatatggagatcgcggcgggcgagaaggtggcgctcatcggcgggacgggctcgggcaaaagcactctcgtgcgtctgttgacgggactttccgcgcccacggaaggggagcttcttttcgacggtaaacccgtttcggaaattagcgaacagcggatccgggacaacgtttcctgtgttttgcaaaaggacacgattttttcgggcacgatcggggaaaacgtggcggcgggcaggcaggtaagcgacgaagagataaatgccgcgatagaggacgcgcggctcgcggagtttgtcgacgaacagaaggaaaaactcgcttatcccgtgacgcagcgcggcggcaacctttcgggcggtcagaaacagcgcctcgccatcgcgcgggcgattttgaagcccgcggcgatctatattttcgacgatagcttctccgcgctcgatttcatgacggaatcaaagctcagggcgcggctcgcggagcgtttgaaaggcaaaacgcagatcatcgtcacccagcgcgtcacgacggcgatgaactgcgacaaaatttacgtgttcgacgcggggacgatcaacgcgtcgggcacccattcgcaactgatggaaagctgcgggatctaccgcgaaatctatctttcgcaaacccgatagtgcgttccctccgcctttgtcctgacggcttttttgccgtacctccgcggttttctctttcccttcgcgcgtgcttttttctcgcgcgctcccgccgttgtctttggcgggcataaagaaattgcggacataaaaaatttaaaaagtacggcgtcccttttccgactaaaaactttccctccaaaaaacttttaaaggatatcgatatgcaagaatcgaccacaccaaacgaaatcaaagaaaaacccaaaatagaaaagcgttccaagcggagcgcagggattctcaaacggatgttaaaagacgtttcgaagatccgttttcagctcgtcagcgtggtgtttatggcgctgatcatcatctcctgcaacattttttcgccgcaacttttgggcggaatcatcggggacgtcagcgatttcgcgttgaataaaggggatgcgtccgcattcttgaagggactgataaagccccttgtcatgctcgccgtcatctatgcggtgtattctctgttttcctggctgaaaatgtatacgttgaacaacgtcgtttcccgccgctttacctgcgaacttcgtatttcgatggcggataaaatttcccgccttcccgtttcctatctcgataagacgacgacgggggagatactcgcccgcgtcaataataatgtttccatgatgggcaactcgattcacgaagcgctggatgtgcttttaatgggcgtgttgcagctcgttgcgatcgcggtgatgctgttcgtggaaaattggcagatggcgctggcggtcattttgctggtgcctctgtccaccgtcatctcgacgatcatcgccaaaaagagtatgcgctattacgataagatgtggaagagttacgaggagctgtactcgtgtgtcgaagaagattacggcggaatagaaacggtcaaatcctataacatggaagaaaccatgaagaaaaaacacgccaaaatcaacgacgggcttacctatgtcaataaacgggcggtggttttgtcctccgcggtacagcccgtcatcgctttcaccaatcacgcttcttttatcgcggtgtgtctgctcggcggaatcctcgccttttcgggtaagatcgaggtggcgacggtggtgacggtcgtattgtattccaagaacttttcggggcctttaatgcagattgccaacggtctttcttccattcagcacgtaggcagcgcggcgaagaaggtgtacggttttctcgacgaaacggagatgacgacggaaacgcccgtacttcccgcggagattcggggggacgtggagtttaaggacgtggagttttcctatacggaggaaaagcccctgatcgaacacctgagtttttcggtgcgggcggggcagaaggtggcgatcgtgggacccacgggggcgggtaagacgaccatcgtcaatctgctgatgtggttttacgatcccaaaagcgggcatatcgaaatagacgggcataatatcgaggaggcaaaccgagaggacgtgcgggacaaattttcgatggttttgcaagatacgtggctattcgagggcaccgtgtacgagaatatcgcctacggaaaggaaggggtgacgaaagaggaggtagaggcggcgtgtaaagcggcgtattgcgatcgttttatccgcctgctgcccaaggggtatgaaacggtcctcaccgattccacctctctttcgggcgggcagaagcagcttttgacgatagcgcgggcttttctttccgataaaccgctgttgattttggacgaagccacctccaacgtcgatacgcgcacggagatcctcatccaaaaggcgatggataaactgatgaagggcaaaacctgttttgtcatcgcccataggctttcgacgattgtcaatgcggatatgattattgcggtggatagcggcagaatcgtggatataggaacgcacaaacagcttttggaagaaggcggattctacgccaaactttacaatagccaatatattctgaccgcctgaaaaatcagtcggtcaaacgcgcggggcgccccaaagggacgccccgttttctatcgtttgataaacggctctaaaaacgcgaacaaacgttcggttgatacattcctcggcggaaggatttaatcgccgctacggggcgattaaaggcgtttaaacgcatataaggagtcgtatagagaattgttttaatcggactcaggcgcaggcggcacggg

SEQ ID NO: 1379 - DNA, 32759 bp, Unknown
  16S sequences of unknown bacteria
tgtagttaatacagatggagatgaattcacaatcggcggcaaggtatacagcatatatggcacatgtcattgacaagaggtgccctgcgggcgtgtgcagcgcgctcagaacatttaagattgatgaaacgaagtgcaggggctgctcgctttgttcaaagaagtgtcctgtcggcgctataagcggcgagctcaagagcccgtttaagatagatgcgtcgaattgcataaagtgcggcgcctgccaggcaagctgcaacttcggtgcggtaatctgtgagtaaggaggggaagcaagatgggttatatgtatatcgacgatatgaaagtcgaatttgaaaacgaaaagaatattcttgaagttacgcgcaggataggaatagagcttccgaccttatgttattattcggagctttcaacgtacggtgcctgccgtatgtgcatggtcgaaaacgaaaagggcggctttgaagcagcgtgctcgacgctgccgcgcgatggtatgagaataaagacaaatacgccggcgctcataaagcacaggagaatgatacttgaacttttgctcgccgctcactgcagagactgcacgacatgcgacaaaagcggcgcctgccgtctgcaggagctggcgctgcgctacggcgtaaagcgtgtgcgttttgcggatcatagagaagaaaaaccgctcgatacaagcagtaagagcatagtaagagatcccaacaaatgcattctctgcggcgactgcgtgcgcgtctgccgtgaaaagcagggaatgggaattctcgattttgcttaccgcgggtctaagatgcgcgtaatgccggcatttgaccgtaagcttgccgagaccgactgcgtaaactgcggacagtgcgcggcggtatgccctacaggagcgattacagtaaaagatgaaacggacgagatgtggaaatacttgaatgacccgaaaaaaatggtggttgtgcaggttgctcctgccgtgcgcgttgcactcggagagcagttcggacttccagaaggtgccaatgtaatgggcaagattgtaaaggcgctcaagatgatgggcgtagacaaggtatttgatactgttgtcagcgccgatatgacggtggttgaagaagcgggcgagttccttgagagagtggctgcgggcggaccgtttcctatgttcacatcgtgctgccccgcatggatcaagtatgcagagacaaagcaccctgagttcataaacaagaatatatcgagctgcaagtcgccgctgcagatgttcggagccgttatcgacgagctctacggcaatgatccggagagagaacttatttcggttgccgttatgccttgtacggccaagaagtacgaggtatcgagatctgaattcacaaaggcggacggcaagcgcatcgtggagctttcgctcaccacacaggagcttgccaatatgataaagaatgcgggtattgattttgcaaatctggaagaggaattcctcgacgcgccgtttgatatgggcggctcgggcgcaggcgttattttcggcgtgacgggcggcgttgccgaggctgttatccgcgaatgcgcgaaggataagacgaacgcatatgtaaaggaaatgcgcgatgtcggtgtgcgcggcaaggagagtatgaaagaggctgtcatcaatgttgacggcagggatatacatattgccgttgttcacggactgaaagcggctgaggatcttattcaaaaaatggaaaggggcgaggcgtattacgatatcgtggaagtaatggcgtgtcctgaaggctgcatcggcggcgcgggtcagccgtttgcgctcaatccgagaagggacaagcgcgccaaggcgctctaccgcacggataacgatatgagcatgaagttctcgagcaagcatcctgagactatttacgcatttgacgagattgtgaaaggcagaaatcatgagatgctgcatgtgcattacaataagaacgaaaagtaagagataaacggcacaaagctgtttgcgaatatgcaagaacgaccgcaggatgcttttctgagcatcacctgcagtcgttttatcttttttgtataattttgcgaaaaagatagatgcttaagtgctgaatggtgcaaaattatcttttttgttggaattgcctgatataaagataatttttgaaaaatataatcttaaggcttaaaaaagccttaagcggaactattatttgatatctgctttccaaagtccgtgcagattgcagtattcgtatgcagcaatggccttttcgccgtccgcaagcataaatgaagcttcgggcgcgtcggctgaactcagatgttttctctgacagccgtcttctgtctcgagaattatccaagaaataagatgttcgtctgtcatagggtgcgcgtcactgccgacgtttaccgtcactttgtttccgcttacggtaacaacgggtacatgcttttccgccgcaccgtcgctcgtaccgggtacgagttctgtcatcttttcaccgcagcagacgacaggcacacctttgtcttctaccatttctatgatgttgccgcagtgcatgcatttaaaaatctttacgctcatgagaaatcctccgttataataaattttttgcaaatatcagtggcaaaaacggaaaaaatatgaattgtaaattccgtgatttgccgctttgaatattttgccttttgctgctatattctatgcattatttaatcagcaaatatcgtgataatttgaaaataagcgtttaacgaaaaagatgctaaaaacaataggatttatacgaatataaacaagcatttgggcaaaaaataaacacccggaaacgtgtgcgaggatataaactcaaaaggcttgaaaacactgatttaggcactcaaaaaaacatttaaaatgttcaaaacttttttctaaaaaatacttgcgttattccttgaaatagtgtaatattataaagtctgctttatgcgaagaagcgggaagttgctgagctatcaggtaatttccgcggagaattgtccctgcatgacgggggcgaagggattcgccgtcttttcgtttgtgtgttaaattaggaaacacacggcagcgtgttaaaagcagaatgcggagttcaaaaaaccgcatgcgcgttgaaaaaacggcagtctgcgctgaaagagttgcacagcgaggcagaaccccttgtgcgagaatagcgaaaacagtacaaaaaatttaggaggaacaaaatgagcgaattacagaaaatcagaatcaagcttagagcttatgatcatgcacttctcgatgcttctgcggcaaagatcgtggaaactgcgaagaagacaggcgctgatgtatcgggaccgattccgcttccgacagagaaggaagtcatcacaatcctgagagccgttcataagtataaggacagccgtgagcagttcgagcagagaactcacaagagacttatcgacatcaccaatgctacgccgaagactacggacgcgctgacaaagcttgatttacctgcgggcgttgatatcgaaatcaagctctaaaggaaaatgcgtggacgcataagtgtgtgaacgcataagcgcggaaacgcaaagagcaaaaagctcaaaacaacacagtaagggacactcccttagaatgatctggccgcgaagccaaagccgaaacgcgaggacggcagcacatctcggattttgcaaactgcaaattgcaaaaacgaagttgtgcgagcgtgagcgagcaggagtccccgaaaagcgtgagctttttggggaagaggagcgacacgcgagcgtgtgagcttcgaacttgtgagaagcgaaagaagcgagggtcggcgcgacgagatccgctgtaagaaaaggagaaagaatatgaaaatgattttgggaaagaaaatcggaatgactcagattttctccgaggcaggagaggttattccggtaactgttatcgaagcaggtccggaagtcgttactcaggtaaagacagttgagactgacggctacgatgcagtacaggtaggctttgaagacacgaagccaaagagagtaaataaacctctgacaggtcactttgaaaaggcaggcgttccagtaaagaagcacctcgcggaattcagacctgacgaaggcgacagctacgaagtaggacaggttattacggttgctgattttgaagccggaaagaagctcgatgttacgggcgtttccaaaggtaaaggaacacagggtaatatcaagaggcacggacaccacagaggccctatgtctcacggctcaaagcacaagagacttgcaggcgcgcttgcggcgggtacttatccgtcaagggtatttaaaggcaacaagggtccgggaagaatgggacgtgaaacagtaactgttcagaatgtagtccttgtaaaagttatcgaagacagaaacctcatgctcgttaagggcgcggtaccgggaggcaaaggcggccttctccgcatccagtacgcagttaaaggtcaggataaataagctgggaagggaggaagtagaaaatggcaacagtaaaaatgcttaatatgagcggcgcggaagtcggaactatcgaacttgccgacgcagtattcggaatcactccgaaccagtacgctgtacatgcagtggtaaaaaattatttggccaatcagagacagggcactcagtccgctaaaaacagaggcgaagtaagaggaggcggcagaaagcctttcagacagaagggtacgggccgtcacagacagggaagctcaacagacccttcacaggtaggcggcggcatagtattcgcaccgaagccgagagattacagatatacaattcctaagaaagtaaagagactcgcaatgctgtcagctctttcatcgaaggtagaggaaaaggaaatcatcgttctcgacgcgctcacatttgaagctcctaagacaaaggaaatgatcaaagtgctcgaaaacgtaaaagcagaaaagaaggctcttatcgttacagccgaaaaggatgaaaacgtggtaagatccgctgccaacattccgggagtaagaacggcgctcgtaggtacgatgaacgtatacgaaatcatcaaccacggaagtttaatccttactgccgatgtggtaaagaaaattgaggaggtgtacgcataatgaagactccttacgatgtaataattaagccggttatctccgaaaagtcaatggacgatgctcaggcaaagaaatacacatttaaggttgcgaaagacgcaaacaagacgcaggttaaactggctgtcgaagaaatcttcggtgttgaagtaaagaaagtcaacatcatgaacgttaacggcaagaaaaagagaatgggaagatatgtaggtatgacggcttcttcaaagaaggctatcgttactctcactgacaagagtaaggaaatcgaattcttccagggactgtaaaataaggaggtagtgacaaatgggaatcaaaaagtataatccgactactcctggtttaagaggaatgacagtttctacattcgaggaaatcacaaagagtaagccggaaaaggcgctcacagtgacgctcaagaagcactcgggcagaaacgtaagaggtaagatcaccgtaagacacagaggcggcggatacagacctaagtacagaattatcgacttcaagagaacaaaggacggtataccgggaaaagttacggctatcgaatacgacccgaacagaagcgcaaacatcgcgctcatcgtatacgcggacggcgaaaagagatatatcatcgctcctaacaagctcaatgtgggcgacacgatcgtatcgggacctgatgcggatatcaaagtcggaaacgcgcttccactcgaaaacattccggtaggtacgatcattcataatgtagagcttaaaccgggacgcggcggccagcttgcaagatcggcaggaaacggcgcgcagcttatggctaaggaaaataaatacgcacaggtaagactcccttccggagaagttagaatgataagaatggagtgcagagccacaatcggcgaagtaggaaatctcgatcactctaacattcagattggtaaagcaggcaagaagagacatatgggtataaggccgacagtaagaggttccgtaatgaaccctaacgatcaccctcacggcggtggtgaaggtaaagccggaatcggacgtgtaagcccggtaacaccttggggcaagcctgcacttggctacaagacgagaaagaagaacaaggcttccaatcagtatatcgttaagaagagaaatgagaaataaggaaggagcataaataatgggtagatcgcttaaaaaaggtcctttcgtaaacgctaagctgcttaaggctatcgatgatatgaacgcagctaacgaaaagaaagtaattaagacttggtcaagaccatcaaccatattcccgcagatggtgggacacactatcgcagttcacgacggcaagaagcatgttcctgtatatattacggaagatatggtaggacacagactcggagaatttgctccgacaaggaactacagaggtcatgctgccgacaagactacaaagaagaagtaagaaaggagataatgtaaaatggaagcaaaagcaattgcaaaatatgtaagaatgtctcctatcaagctcaagcctgtttgcgatctcgtaagaggcaaagacttaaacgaggcactgacaattttaaagtttactccgggtaaaggctcagagattgtagaaaaagttgttaaatcggctgcggcaaacgcagaaaacaatttcgatatgaatccggacgatttatatgtagctgaagtttatgcccatcagggaccgactatgaagagatggagagcgggggcacagggaagagcatccatcatactcaagagaatgagtcacgtaggcgtaactctgaaggaaagaaactaagataggaggtttactaaatgggtcagaaagtaagtccacatggattgagagtgggcgtgattaaggactgggattccaaatggtatgcagataagaataacttcgcagattacctcgtagaagataataaggtaagaacttttgtaaagaagaagctgtatgcagccggagtttcaaaggtactgcttgaaagagcggcaaacaatcagctcaagctcatcgtgctcgtaaacagaccaggtatggtaatcggaagatccggaagcggaatcgacgaaatcaaggctgatgtcgagaagatgacaggcagaaacgttgtaatagaaattaaggaaataagaagagcagagctcgacgcacagctcacggcagagagtattgcacaggctcttgaaaagagagtttcgttcagaagagctatgaagcaggctatcggcagaacgatgaaagcaggagctaagggcatcaaggtactcgtaagcggaagagtaggtggagcggaaatcgctcgttccgaaaagtacagcgagggcaacgttcctctccatacacttcgagcagatatcgactacggatttgcggaagcggatacgacatacggcaagctcggcgtaaaggtatggatcaaccacggcgaaattcttgacaagggtctcaagagccctattcctgaagaaaagcaggaaagaacgggcggaaagcgcggaaaccgtgacagaaacgacagacgcggcggaagagacgacagaagaagagatgacagacgcggcagccgtgacagaaatgacagagcagaagcgccgaaggctgtaaatccgagagttagaaagactccgaagccggagcctgcacctgctcaggaagttgcagaaccacaggtagaagcagtagaggcagtagaaactgctgctgagactgaagcataaagcttaggaaaggaggaacacgctcatgttaatgccaaagcgcgttaaaagaagaagagtccacaggggaagaatgaagggcgttgcgactaaaggtaatacgattacttacggaagctacggtctcgtttcacaggaatgcggatggatcacctcaaatcagatcgaagcagccagagttgcgatgacaagatcgatcaagagaggcggtaaagtatatatcaagattttcccacacaagtcggtaacaaagaagcctgccgaagttcgtatgggatccggtaagggtgctcctgaatactgggtagcagttgtaaagccgggcagagtaatgttcgaaatcgacggagtatccgaagagaaagcaagagaagctatgagacttgcagctcacaagctgccggttaagtgcaagtttgccatcaaggagaacgtagtagcagagggtggtgaggcataatggaattgaagaaaatgagagatatgacagtgcctgagctcaatgcggaactcaaaaagcagaagaacgaactcttcaacctgagatttcagcatgtgacaggacagcttgaaaaccctataaagatgagggatgtcaagaaagatattgcaagaataaagaccgttatcagagaaaaagagcttcagggctaagaaaggaggatgaattatgacagttgaaagaaacagaagaaggactagagtcggcgtcgtagtaagcgacaaaatggataagactatcacagttgcaacagaagacttcgtaagacattccctttatggtaaggccgtaaagagaaccaagaaggtaaaggctcacgatgaaaacaacgaatgcaatatcggtgatacagtaagaattatggaaacaagacctctttcaaaggacaagagatggagacttgttaacattatcgaaaaggttaagtaaaggaggcaccagaaaatgattcagactgaaacaagattaagagtcgcagacaattccggtgcaaaagaactcttatgcatccgtatactcggcggaacaagtcgtcagtatgcgaatataggcgatgtaatcgtctgtgccgttaaggacgcgacaccgggcggcgcagttaagaagagcgacgtagttaaagctgtagtagtgagaacgaagaagggcgcaagacgtcctgacggaagctacgtaaagtttgaccagaacgccgcagttattataagagacgataagaatccggtaggtactcgtattttcggaccggtggcaagagaacttcgtgacaaaggcttcatgaagatagtatctctcgctccggaagtattataggaggtgcgggaatgaaaattaaaaaagacgatatggtaatggtaattaccggtaaagataagggcaagaagggcaaagttttaaaggcaatgcctaaagaaaacagagttatcgtagaaggcgtaaacgttcagactaagcaccagaagcagactcagaaggcgagagccgagataaagcacatcgaaggtcctatcgatgtatctaacgtaatgtactacgataaaaaagcagatgctcctgtaagaatcggatataagattgaaaacggcaagaaagtcagaatatccaagaagacaggcgcggtaatagactaagaaaggaggagacgattttgacagcaagattaagagaaacttataaaacaagcgtattcccggctttgacggaaaagttcaattacaaaaatgtaatggaagttccaaagcttgagaaggtaacgataaatatgggactaggcgaagcaaaggacaacgccaagctcatggaaggagctgtggaagagcttgccatcatcacgggacagagacctgttgttacaaaggctaagaagtccatcgccaactttaaggtgagacagggaatgcctgtcggcgccaaagttacgctccgcggagataatatgtatgaatttatcgacaaattcttcaatatcgctcttccgagagtaagagactttaagggcgtttccagaaattcgtttgacggacgcggaaattactcactgggtatcaaggaacagctcatattcccggaaatcaactacgatcaggttgataagattaagggtatgaacattgtattcacaacaacggcaaaaagcgacgaagaggctatggagctcctcgcacttctcggaatgccgtttgagaaataggagggaattatggctaagacatctctcaaagtaaagcaggcgagaaagcctaagtactcgacaagagcgtatacaagatgcagaatctgcggcagaccgcattcggtactccgcaagtacggaatttgcagaatctgcttcagagagcttgcttacaagggtgaaattccgggcgtaaagaaagcaagctggtaaaagtataagttaatttgcgaaggtcgttgcatcggaatcgcgaagcgattcggggcccccgcaaagcgtaagctttgtggggaagaggagcaccagccgaaagtgtgagaagcacagcgggctgtgtttcgaacgaattgaggcttggtgcgacgaaaccgcgtaaggaaggagaaataaagtaatgacaatgacagatcctatagcagatatgctaacgagaatcagaaatgccaatactgtaggtcacgacaccgtagacgtaccggcttcaaagatgaagaagtcgatagcggaaatactcgctgacgagggctacattaagggatttgacgttatagacgacaacaagcagggtactatcagaatagagatgaagtacggagcaggaaaagaaagagtaataagcggtattaagaagatttcaaagccgggactcaaggtttacgcaaaggcagaggatgtacctaaggtactcggaggcctcggagtcgctatcatctcgacttcaaagggagttataagcgacaaggaagcgagaaagctcggagtaggcggagaagtaatttgttacgtttggtaggaggaaaagaaaatgtcaagaataggtagattacctgttgctctccctgccggcgttgaggtcaaggtagacggtaacaatgttgttactgtaaaaggacctaaaggcgaactgcaggagcagatcagcaaacttataaaagtagaaattaacggcgatactctcactgtaacgagagacagcgacgataagacgcacagatcgcagcacggtcttgcaagaacacttataaacaacatggtagtcggagttacaacaggttttgaaaagaaactccagctcgtaggtgtaggttacagatgtgaaaagcagggcaaaaacctcgtgatgaacctcggatattcgcatcaggttattatggaagatcctgaaggcatcacaacagagtgtccttctgcgaacgatatcgtggtaaaaggaattgataaggcatatgtcggcaattatgcggccaacatcagaaagtggagagagcctgaaccgtacaagggcaagggtatcagatacgaaaacgaagttatccgcagaaaagaaggcaaggccggagctaaataataggaaaggagtaaaaacattatggctattgaaagcagaaatgatagacgtgtcaagagacatgaaagagttagaaaaaatgtatatggaactcctgaaagacctaggctttgtgtttacagaagcaataagaacatttcggtgcagattattgacgatgtaaatggagttacattagcttccgcatcatcgctcgacaaagaactcaagtccgaaatcgcttacggcggcaacaaggaagctgccaagaaagtgggcgaagcaataggaaagagagctcttgaaaagggaatcgagacggtttgcttcgacagaggcggattcttatatcacggaagagtaaaagaacttgctgacggcgcaagatccgccggactgaaattctaacaggagggaaaaggaatgcgacagaatcagatagatgcatccaagcttgatttgaaggaaacgatcgtaagcatcagacgtgttgccaagactgttaagggcggaagaaacatgagattttccgttactgtagtagtaggaaacggcgaaggcgttgtcggctgcggactcggtaaagctcaggaaattcctgaagctgtaagaaaagctacagaagatgcaaagaagaatttaatcgaagttcctatggtgggaactactataccgcacagaaacctcggcgtattcggcgcaggccgcgtgcttctcatgccggctgcacctggtactggagtaatcgcaggctcatcggtgcgtacagttctcgaagctgcaggtatcaaggatgtaagagcgaagtcaataggctctaataatactgccaatatggcatacgcaacacttgaaggcttaagagaccttacgacagttgaaaaggtagctaagctcagaggaaaaactgcggaagaaatcttaggataaggaggacgcttaaatggcaaagatgataaaagtaacacttacaaaaagcacaataggcgcttcccctaagcagaaaaaggttgtagaagcgcttggacttaagaagatgcaccagtcagtagagctggctgactgcccacaggctcgcggagcggttacaaaagtagcgcatcttgttactgtagaagaattataggaacggaggtgcaaaagatatgaaactgcatgaattaagagcagcagaaggttcaaccaaagctcctaaaagaaagggcagaggtactgctaccggccagggcaagactgccggcagaggtatgaacggacagaattcaagatcgggcggcggcgttcgtcttggatttgaaggcggccagatgccgctttacagaagactccctaagagaggttttacaaacatctggggaacagaatacactgtgataaatgttgacgatctgaacagatttgaggccggcactgttgtaactcctgagttactcaaggaagcaggtattgttaagaaggctaaggacggtattaagatccttggaaacggcaagcttgaaaagagtgtagaggttaaagctcataagttcagcaagacggcgatcgaaaaaattgaggctgccggaggaaaggcagaggtgatttaatatgggtatgcttaaaacaatggctcaagctctgaaaatcccggatatcagaaagaagctcatcttcacgattctgatgctcgtaatattcagaatcggctctaacatcccggtaccgggtatggacagagctatccttgccgatgttttcagcggcggcacaggcttgtttgctttgtttgacttgttctcgggcggtgcgttcagcaactttacgatatttgctctcggcatcactccgtacattacggcatccatcatattacagcttcttacgatagccattcctgcgcttgagaggctctcaaaagaaggaacggaaggaagaaagaagattgcacagtacacgcgttatctcacagtagtgctggcacttgtgcagtctgttggacttactgtgggcttgttcagaagagcgcttataagcaggggcgcgtttgatgtggtagtaattgtactcacattgtcggctggtactgcattcctcatgtggctgggcgagcagataaacgagcgcggtatcggaaacggtatatcgcttctgattttcggaggcatcatttccagacttccgtcggctgttcacagcacttatctgcagatgagaacgggagatgtgggaatcgttacagtaatacttttcctcgtatttgcgcttgtggtaattataggaatcattgaaatacagcagggaacaaggagaattccggtgcagtatgcaaagagagtagtcggaagaaagatgtacggcggtcagtcgacgcatattccgatgaaggtaaaccaggcaggagttatccctgtaatcttctcgctctcgcttttgcagttcccgctcacgctcacgtatttctggcctaattcggcattttcgaattgggtgacgacgtggctttcaccgtacggcaatgcctggggagtgacgatatatacggtgctcaatgtagcgctcatcatattcttcacatatttctatacagcgattactttcaatcctgttgagattgcgaacaatatgaagaataacggcggctttattccgggaataagaccgggaagaccgacggctgaatatctgacaaaggtaatgacaagaattgcgtttgtaggcgcgatattccttgcggtaatagctgtaatgcctacgataataggacagtttacggcgcttgacttcagcttcggaggcacttcgcttctgatcgttgtaggtgttgcgcttgactcgatgaaacagcttgaaaaccagatgctcatgagaaattatgaaggtttcttaaagtagcagggctgcaaaaaggagatgaagatatgaatttgattttactgggacctccgggagccggcaaaggcactcaggcggtaaagatagtagaaaagtatagtatccctcatatctcaaccggggatatcttcagagaaaacatcaagaagggaacggagctcggcaagaaagctcaggaatatatgaacaaaggcgagcttgttcccgatgatctggttgtagaaattgcctgcgcaagacttctcgaagacgactgcaaagaaggattccttctcgacggtttcccgagaaccgtataccaggcagaaaaactggatgaattcctcgccggctgcggcaggaaggtggagcatgtgctcgatatcgccgttgagaaagaggagctcatcacaagactcatagggaggcgcgtttgcagatcctgcggagccagctaccatatcgtaaatatgccgcctaaaaaggaaggcgtatgcgatatctgcggcggagagctctatcagagagcggacgataccgaagaaacagtagctaacagaattgaagtgtacgaggcacagacgatgccgctcatagattattatgagaaggcgggcataatcgcacacatcgacggcgctacgggtcttgataatgtgtttgctgacatcgtaagcgtgttggggtagcaggatgattattattaaatcacaggacgaaataagtttgatgcgcgaatccggaaaggtgacgggatatattcttaaggagcttgaaaatttcataaagccgggaatatccactatggatataaacgaatttgtggaaagcacaattcttaagaataagatgattccgacatttaaaggctacggaggtttcccggcatctgcgtgcgtatccgtaaacgaagaagttgtgcacggcataccttcaaaggagcggatacttcgtgagggagacattgtcagcgtcgatgttggctcaacatacaaaggctatgtgagcgatgcggcgcggacatacggagtcgggaatataagcgcagaggcaagacgcctgattaaggcaacagaagcgagcttctttgaaggcttgaaattctgcaaggtgggatatcgactttcggatatctcgcatgcgattcaggtttcagctgaaggagaaggatacggcgtgataagggattttgtgggacacggcgtcggaaaagagatgcacgaggatccgcagattccgaattacggaaagccgggcagaggaccgaggctggcagcgggtatggtgtttgccatagagccgatgatcacgcagggcagttatgatgtggatgtacttttaaatgactggactgtggtgacggttgacggaaagctgtcggcacactacgaaaatactgttgttatcactgatggtgagccggagctgcttacgttgtttgaataagaaggagatgtatttatggcgaagaaagacgtcatcgaggtactgggaactgttgtggacgctcagcctaacgcgatgttcaaggttaagcttgagaatggttacgaggtactcgcgcacatttcgggaaaaataagaatgaacttcataagaattcttccgggagataaagtaaaggtcgaactttcaccgtacgaccttacgcgcgggagaatcacatggagagataagtagaggaggaataagcgatgaaagttagagcatcggtaaagcctatctgcgaaaagtgcaagattatcaagagaaacggtaaagttatggtaatctgcgaaaaccctaagcacaagcagaagcaaggctgataagtcaaaattttaaggttaattattaaagttaattatagttaaattgaatgccctgtctatattacgccaagttgcgtgacggaagataggagaaggaggatagtatggctagaatagccggtgtagacttaccaagagaaaaaagagtagaaataggtcttacttatatctatggcattggcagaaaaagcgccaatgatattttggaaaaggcacaggtgaatcctgacgtaagagtcaaggatctgacagaagacgaagccggtcgtatcagaaagatcatcgaccaggaatacgtagttgagggagatctcagacgtgaagtttcgctcaacatcaagagacttatggaaataggctgctacagaggaatcagacacagaagaggacttcctgttagaggtcagaagaccaagacaaacgcaagaactcgtaagggtccgaagaagactgtaagcagaaagaagaaagctactaagtaaaggagggagagcacaatggctaaaactgtaaagaaaacagtgagaaaaaagagaagagaacgcaagaatatcgaaaaaggccaggcgcatatccagtcctcctttaacaatactcttgtaacactcacagatctttccggaaacgcgctgtcgtggtcaagcgcaggcgcgctcggatttaaaggatcaagaaagtctactccgtttgctgctcagatggcggcagaagaggctgcaaaagccgctatggaacacggacttaagacggttgaagtttatgtaaagggaccgggttccggaagagaagcggctataagagcgcttcaggcagcaggccttgaaataactttgattaaagatataacaccaattcctcataacggatgcagaccgccgaagagaagaagagtttaattgaaaggaggagtaatttaaaatggcaagatatacagaagcaaactgcagattgtgcagaagagaaggtcagaagcttttcttaaaaggcgagagatgttacagccctaagtgcgctattgaaagaagaaattacgctcctggacagcatggtcagagcagaaagaagatgtctgactatggtactcagctcagagagaagcagaagactaagagattttacggaatgcaggagactcagttcagaaacctgttcgacaaggcttcgagaaagaagggtatcacaggtgaaaacctcctgatacttctcgaatcgagacttgacaatgtagtcttcagactcggatttgcatcctcgagaaaggaagcaagacagctcgtaacacataatcactttaccgtaaacggcaagaaggtaaacatcccttcatacgaagtaaaggccggagatgtaatcaaggtaaaggaaaagagcactaattcacctaaattcaaggaagttaaggaaatgtcaatcactgttccttcgtggcttacagttgatgttgaaaagttagaaggtaaggtagtgagcctcccgacgagatcggaaatcgatacgccggttgcagagcacttaatcgtcgaattgtactccaagtaatatagccttataaataagctgtatcttggaataaaaaggaggtttttttcatgattgagatcgaaaaaccaacaattgaatgtatatattcaccggaggaaccaaactacggcaaattcgtagtggagccgctggagagaggctacggaacgacgctcggaaacagcctgagaagaatactgctctcatcgctgccgcgagctgccgtaacttcggtaaagatcgacggaatacttcacgagttttcaacaattccaggagttaaagaagatgtaactgaaataatattaaatcttaagaagctcgctgtaagattaaacggagagaacaccaagagggttattatcaacgccgtgggaccgaaagaagtaacggctgccgatattatcggtgatgcggatatggagatattcaatccggagctgcatatagctacgctcgaagagaacgcgacgctggtaatggaaatcaatctcgcaagaggaagaggatatgttcctgcggagcagaacaaggacgagaatactccgattgcgataatacctgtagactcgatattcacaccggtaagaaaggtaaactttaccgttgagaatacgagagtaggacaggtaaccgactatgataagctcatacttgaaatctggacagacggttctattgcgcctgacgagggcgtctccatcggagctaagataatgcaggagcaccttgccctgtttataggacttacggacagcactgaaagtatggaaattatggtagagaaggaagaggatcagaaagaaaaagcgcttgagatgactatcgaagagcttgagctttccgttcgttcgtttaactgcctcaagagagccgctatcaatacggtagaagagcttactcatcgttcggaagaggatatgatgaaagtacgaaatcttggtaagaaatcgctggatgaagtaaaacacaagctggaagagctcggtctttcactcagaccgagtgacgaatagacactttgaagaagggagaatagatatgccgggttatagaaaattaggaagacccacagctcacagaaaagcaatgctgagaaatctcgtaacggatcttttcagagaagagagaatttcgacaactgactgcagagctaaggaagcaagaagagaagcagaaaagttaatcacacttgcaaagcgcggtgatcttcacgcaagaagacaggtgctggcatatgtttacgacgaggatgttgtagcaaagcttttcgatgtaattgctcctaagtatgctgagagaaacggtggatatacgagaatactcaagctgggaccgagaaggggagacgcagcagaggtagttttccttgagctggtttaggttttaaattatcacattataaaaaagagccgatgcggaattcgcaaaggctctttttgctacaaactttactaaaatcacagcgatgcatgaatgcacatataaagcgtatccgtcagatttgtatagtttaaatgcgctcaatttatacggatgcgccgctgtactgtactttattttgtcattgtcttaactgttatgctcgtcgcggaggagcagtgcggcgtattcatagaccttttccttgttttgatcacgcagtctacggcatatagacaaaagagcttcttctttatcatcgagcagcttgcccacttcgcggggaagtttgttcgcctcgaaatctgtatataaaaactcgtccattgttacatcaaataggtctgcgagctgtttcagtttttcaacggatggttcggaaacaccgctctcccatttttgtacagtagtaaaagatttatagcccagtttttcggctatgaattcttgcgaatatccgtgtgactttcgcaaaaatcgcagattatttgaaaaattcataaatgttcctcctttatctcctaattatattatatgcaaacttgaaataatatcaagaacaatataaaaattactaaaaataaacataaatttttaagttgtgattgacacttgaaaacaaatcaagtattattataagtagaacaggaggacaataatatgccggaaaaatatactttgagagaattgagagcgagaaaagattggactcaggaagagacagcaaagcgactgggagtatcgctgcaaacgtataatgcttgggaacagaatttcggcagtgttaaggtgtcgcctgccgctgcaatagcaaaagtatttggagtgccgctcgatagtattttttttggcaatgaaattgaaaaatcttcaagcgaagttgaagaataggaatgatatacaacttgttttgaaagcaaacgcaagcggaaagcctgcgtttttttggtatttgacggtctttttgtttaccaaacagcacttttgtgatatactaaaatgtaaagtttaatttcgactaatttcagggaggtgttatatagatgaaagagtttaaggtaatagacattaaaggaataaagcttggcgatggcatcgtaaagatatgctatccggtgacgggcgccagcattgatgcgatattcgatgaaatggaatatgtaaaggatcagccttgcgatattatagagtggcgtgttgatttttatgaggacgcgcatgatgaggaagctgtatttgcgcttctgccaaaaatacgcgaaattataggcgaagataaggtactgatgtttgttgtgagaacggcagatgagggaggtaataagtcttttgacagagaatattatttcacgcttataaacagagcaatagacagtggactcatagatattatagatatcgaatattattcgggcaagaagaattatatggcggctattgaacatgcaaaggaaaagggcgtcgtatcgataggctcgcatcacatttacggtggtacgccgaatgccgtggaaatggtggacattatagatatgatacacggaagagcagatatcgcgaagctcgctgtactttcgcagaattataaggataccgaaagagttctcgaagcgggcaagatgcttctcgattacgaaaatacaacatcaccttttattttaattgctatgggtgaggcgggaacagagacgcggagaacagataaattcttcggctcgtgtctttcctactgccaaggcagagattcgatgtcgccgggacagcttccgctcgatgagctcgttgctatgagagaaaaggttttaaaagaaaagtaatacgaaaagcagctcataaagctgcttttcatacgcagttatgaaaggaacttcaggatgaagaaatttagactgataatgattgcggcacttgccatccttgcctgcactgggctctttgcctgtactgacagcgaggaaattatgaaagattatatagatataatatcacaggaagcagagacagatgaagcactgcaggagatattagcagaagcggaagaatacatagccgcgaatataagcaaacttgaaaaagaggatgctgattatatgttttatctttatatcgacagggcaaagattgtcgcaggtgaagaagtggaaaaatttgcaaaacttgtagacgattatggcgtatatctgagcgaggcgatgaacgatatgctggcaatagagcttaatgaacttgagaatccgcttcccgaatttaaaggaaatgaaggggaaggagaagaggcagcattttggagcgaggttatggaaagagcgcttagtgtggaaaatgctgtaaaccagcatagggaaactcttacgagcgccgagtacgagtatatgaagccggaaatagtatggagatatgagtactacataaactatatgctgataggctcgccggagagaattatctttgacagcgagacgcatcttttcagcagcgatgcacaaaatgcatataccgtacttgcgcaggcaaatccgaattcggtgacggcttacgcggtaaatgagtttttcaattacctggcaagcatagattatgaattggacttaagggatgcagattcaggcaagatatattatgatacctgcagatatatagttgaggaagccggtaagaggctgtaccagcaggaaaacagccagcagtaaagcagaaaaggatatggccgaacagtaagtaaatcgcattgataacgacggagatatatgaacgacagtattttaaaaatagaaaatctaatatttgaatatgcgcagtatgaggacggggagaatgtccgggcggttgatgatgtttcgcttgaaatagagcgcggcagctttaccgcgataataggcagaaacggctccggcaaatcgacgctcgctaaaaatataaacggacttctgctgccaacgtcgggtactgtctatgtaaacggcattgatacgtgcgatgagtcgcaaatttgggaagtgcgccagacagtcggaatggtgtttcaaaatccagacaatcagcttgtatctacgatagtggaagacgatgtagcattcggccctgaaaatatgggtattgcaccggaagaaataaggctgcgcgtagatgaggctctcaaagccgtggggatgtacgagcatagaaaaaaagcgccgcacctgctttcaggcgggcaaaagcagcgaatcgcgatagcgggggcgatagcgatgaagcctgagtgcatagtattcgacgaaccgacggctatgctcgatccttcgggcaggcgcgatgttatgaatataataaaagatctcaacaaagaaggtattacggtagtgctcattacgcattttatggaggaggcggcttcggctgacagggtcataataatggacagaggcgtaatacttgcggacggtacgccgcaggagatatttaaggaatccgataaaatcagagaaatcaatttagatgtgccgcttgcggttgatttggctgacaggctcagaaaaaacggaatagatgtaccgcagaatataatatcgacagaggaattaattgaatgggtattatcgtaaaaaacattactcatatatacagcgagggactgccgcacgaaacgacagcgctcgataatgtaagctttgaaataaacgatggagaatttgtgggcataatagggcataccggttcgggcaagtctacactgctccagcatctgaacgggctttttaaaccaaaatcaggaagcatcattgtcggcggtacggatatcacagatccggcctgcaagctcagagatataaggcgaaaaatcggacttgtttttcaatatcccgagtatcagctctttgaggaaacagtagcgcgtgacgtggctttcgggccgaaaaatctcgggcttacggaagaagaaacggagatgcgcgtaaaagaggctctcggcctcgtagggcttagttatgacgaattgaaggacaaatccccatttgagctttcaggcggccaaaaaaggcgcgtagcgattgcaggcgtggtggctatgaagcctgaagttttgatactcgatgagccgacagcgggtctcgaccccaaagctcacagagatattctcgatatggcggaggaaatacacgagcacgaagggaatataacgattcttgtatcgcacaatatggcggacatagcgcgtctgtgcgatagggtaattgttatggataaaggtcatgtggcacttgcgggcacacctaaagaggtattttcggatgaaaagcgccttacggatatagggctttcgctgccgcccgtttcttatcttatgcacaggctaaatgaaagaaatgctgacatcaaggcggatataatggatatagacgcggcctgccgcgaaatacagaggttcttaggagaaaagggatgatcagggacataacactcggtcagtactatcccggtgattcgcttatacacaggctggatccgaggattaagataataacgacaatagcatatatagcagcactttttatcgctgacggttttataggacttgcaacttcggcggctgttatctttatcgtgacagctgtgagcagagtaccgctttcctttataatgcgcgggctcaaaccgatattttttataataatatttacatttatcataaatctgtttatgataccgggagaaacgcttatatcgctgttctggggactgacgatcactaaggagggactgcgcacggctgtgtttatggctgtgcggctcgtacttctcataataggctcgtcgctgctgacgcttactactaagccgataagtttgacggacggaatagagagcctgcttaagccgcttaaggtgataaaagtgccggcgcacgagctggcgatgatgatgactatagcgctcagatttataccgactcttctcgaagaaacggacaagataatgaaagctcagcaggcgaggggagcggattttgaaagcggaaacatattccatagagccaaaagcctgattccgatacttgtgccgctgtttatatcggcctttcgcatagcgcaggagctggctatggctatggaagcgaggtgttatcacggcggcgataacaggacgcgaatgaacgcgatgaaaatgcgtgcgggagatttcgtttttatggtattaactttagcctttatcggaataattatatgtgaaaggtattttatatgaaaacgaagtatttggcagaggcggctgttatcgcggcaatttatgccttgcttacgattgttttggctccgataagctacggcgctgtgcaagtaagaatatcggaagcgcttaccgtgcttcctttttttacgcctgcggctgtgccaggactgtttgtaggctgtatagcagcgaatattatgagtccgtacgggcttgcggatttgatattcggaagcgcagcgtcgctcataggcgcaattggctcgtatcttttaagaaagaagccgcttcttgtgccgcttgcacctgtaatatcaaatggaataattgtcggcgcaatgctgtattatgtatatgaggtgccgctgccgctcatagtgcagatgctttatgttgcgctgggcgaagttgtagcatgttatgcgataggctatcctcttatgaaatatcttaataagtataaaaggattttttagatgagaaacggaaaacttgtcataacggcgctcgtgctctctgttatggtgcttgcgcttataatacttgaaagttttgatataaggccaggcaggtcggaaagtgttcaggccgccaacggcggagtctcggattttgacggcgggggcgcagcgtctgaagtaacgccgcgcgtgccggtatttgaatttgatttgaaatatacaaagtatcttgttgaagcaccatatgaatatgaggttaatggagaaacgagaaaatttgaatttgaggaaatggtaaagtcgatagaaccggcgcggaaggcttttgagagcggaacggtggcatatattgataattacaagaacagaaacggggaggctccttatagaaacgggaaatcagcggatgatttcggcggtttaagatcggcgagcgcacccggatattttgacagctccggaagcggtgactttcgttatattgcggatggtacgctggtagcggttgtaagcgaaaatgagaattttgcagaagttaaaattgtcggtgaagacggcgaacagtcgtatttcgtgcctcagcattatgtttctacagacgacccgctcactgcgctcgataagataatagttgtggacagagccaatcagaatatcgcggcctttgaaagagtgccggagcttgatatagagcctgtaagcagtgcaaatattacggggttttataaagaaagtgcagagagcgttgattcgctcggcggtgacttagataagacagacgcggctcagagcgagacttctggtgatgtgcaaaagaacagcctgtcagaaaatggcggcagcagcgacaataagatagacatttcacaaatggtaaatgtagatgtaatggaatgtgcagccgacggacttaacgaaggcgctatgccggcggcgtttcccggcggcagagccgaatggaagatagtatcctacagtctggcgacaacaggaaaatcaggcaagtatcatcagccgacgccgctcggatattattatgcgatagagaaaaaaccgagattttattatttgaaagacggtaccaatgatattgagggctatgcgccttatgctataagatttacagcgggtgcatatgttcacggggtagccgtgccttatgaatacaccgatgacggtgtgcgcgttgatccaggcatccgtgagttttcaaattctataggaacggtgccgctctcgcacaagtgcgtgagaaactacacgagtcacgcaaaatttctctacgattggtatgagcacggaaagacgattgtgattgttatagagtagaaagtaaaattgtaagaataggcggatgcacaatgaggcagagaaaagtaaagaatctcgaagaaaaaatagaggcgcttggtgagtacaaggtggccgcacctgaaacactgcgcggcaagtggagcgaattttttggaaacgctgatcctatatatttggaaattggctgcgggaaggggcagtttgcagcaaggcaggctgagcttcatccggacagaaattatgtggctgttgaaggacaggattctgtggccgtgcgggcgatggaaaaggcggaggcgctttcgcagaaatcaggcagaaaaaaccttgtcatcgtatgtaagtttgtaaatgatcttggcgaaatgtttgcaggcggcgagctttcaggaatttatctcaatttcagcgacccgtggccgaaagacaggcaccggaaacgccgccttacatacagagaaaggctgaaaagttatatgcaggctctcgctccgggcggattcatagagataaagacggataacgaggcgctgtttgcttttacgcttgcagagatatcggagtgcgggtatacgcctgcggctttttcttatgacttgcataaagcaatatcagatgagaaaaaagaaagcggaagcaaggaaagcggcagagctgaagaagtacggagaaatatagaaaagcagagctgcgatgcaaatttcctggaggcactgatagatgaagcagccggtgtgaccacggaatatgaggataaatttaaggcgatggggcttgcgataaaatatgtgcgcatagaaaaagagaaatcataggtgcagtcagcaagcggaacgaagaggcaaaagagcatcagtgcgatgctctttttatttttttgacagcggttttgtattgtgcgcgtattcttatgttattgtaataagtgaagatatatacaaaaaggagggttaaatttgaaaaatacttacggctatgttcgtgtcagcacaaaggatcagaacgaggacaggcagctcctcgcaatggcaagtctcggcattgagccgcagaatatatttaccgacaggcagtccggcaaggattttgagcgtacacaatacaagctgcttacgcaggcgctgcatgagggagacacgctttacattaagagcatagacagactggggcgcaattatgaggaaattctcgtacagtggggcatactcaccaagcaaaagtcaatagacattgtcgttatagatatgccgctgctcgatacaaggcgcggaaaggacctgcttggcaactttataagcgatctggtgttacagatactttcatttgtggcggaaacggagcgggtgaacataaaaaagcggcaggcagaaggcatcgcggcggcaaaagcgcgcggcgtcagatttggaagaccgaggacaccgcttccggacaacttcacagctatatacagcaggtggaaagcgggagaaataacgggaacagctgctgctgaaaaatgcggtatgccgctggccacattcaggtacagagcagatatatatgacaaagaactgctgtcaccggaagtacaaaataaaagataaaacgggaagtatatttacaaaaatgtgtacattcttgtaaatatacttcccgtatgtaccataaatagaataacccgaaaatgacaaaaaagcaaggagaatattgcatttttttggtaaaatactttaaaatcttataattttcggattaacaagaaagtacgcttttttacgaaaagtacccttattcatatttttacggagccaataaagtacacattattgatttgcttaaatggcagacacgcaggaatatttgctatatatttagaggtatgattttagaggtatgattatggaagagcacaataagacagcagaaaagggaaaagagattgagagggaggcagggaaatcatatattgaaagcgacaggcgtgaacgcagattttttaggattgcctttgctgtggtatttacagctattgcgctttgggtgtttataggactaaaagtgttgtaagaatgctgcttgttttatgattacagcgatgatgcttccccgaatgtactttgaaaaggtgcagttatcataaaatattaaaatcataagaatgccggataaagataattcagcaaagaagtgcggaagcggcaaaggtatatcagcttcattctgatatataaaaacacagccgcaaatttaattcttggctgtgttttttcatctgttaaaacattcctgcgctctatcgtttttcaccaatgcggcgatagtgattcgcggcaagatataaattatggctatgcggcttataagcatagctcggcgcccgcaatcatgcggcgctaatattgcagcagtttatttgtcagcgggttcccatttgcagcgtacgggcgatacgatagcaccctctgctttgagctctttaaaagctttgtcgacatcggctttttccattcctgaaagttttacaacatcgcccgcagaaacgggtttgcctgcttctctcattatttcaagtactttatctttcataagcaaatcctccattgtaattcgataattgtagtataattatataggaacattcgttccctgtcaattaaaatccacagggtgttctaagcaattagtatgcggaaaataattattatttatgcagagcaccttttctgctattttataaattcagcaatcaagaggcctgtttcttttgttcctactttggtatagccgtcggaggcgatatcgggagtgcggtatcctttgtcgagaaattcgtttacggcgttttcgatgctgtctgcttcgcgcgaaagcccgaaggtgtatctcagcatcattgcaatcgaaaggatcattgcgacaggattggcgatgtcacgtcccgcaatatcaggtgctgagccgtgcacaggttcatacataccgaaatcgccgtctgcaaggcttgccgacggcagcatgccgatggatcctgtaatttggcttgcttcgtcagacagtatgtcgccaaaaatgttgcttgtgagcagtacgtcaaactgttttgggtttcgcacaagctgcattgcggcgttatccacatacatatggtcgagggcaatatcaggataatcttgggcgacagcttcgacaactctgcgccaaagccttgagctttcgaggacatttgacttgtcaacgctgatgacatttttgtttcgcttttcggcgagactgaaagcagtttttgcgattctttctacttccatttcagaatactgctcgacatcgtatgccgcaagaccaaattctgttttttccgttccctttttaccaaaatatatgccgcctgtgagttctcttactacgagaatatcaagcccgccgctgataatttctgctttgagaggggaggcgttcgcaagctgcgggaataccatcgccggacggaggtttgcgtaaaggccaaggagcttgcgcagctccagcagcgctttttcggggcgttcatcacccggaaggtcgttccatttgggaccgccgacagcggcgagaagcacagcatcggaggctttgcagatatcgacggtttcctgcggcaggcatttgccggtcgcatcgatagcggcgccgccagcaagcaccttagtagttttaaagtcgcagccgaatttttcggcaatgcgcgtgagcacatgaagccctgcatccattacctcggggccgataccatccccgggaattacggcaatattatattttttattattatcactcattttttcacctttaatttcggatataaattaaaaaatagataaaggcttatatatcataatataagctgaatacacaagagcaggcaaagtaagctgtcaaataaaccgtcggcagtgcctgcatatgcacatctgtgcaaatcagcaacgtgtaattgctattttatgctgttgaggagtccgccggaagcgatgatttgtttgataaaatcagggaacggcgctgcctgatatgtttcacccttggtattgttcgttataacgccggtgttgaaatccacgcttacatcgtcaccatcgtcgatgccgatgctggcttcgggacattccagaatcggaagcccgatgttaattgagtttctgtaaaagatacgcgcaaacgacgaagcgatgacgcagctgatgcccagtgccttaatcgaagcgggcgcgtgctcacgtgaactgccgcagccgaaattttcgcctgcgaccataatatcgccggtatttactttagttgcgaaatcaggatcggcatattccatacaatgtgttgcgagctcattcatatcctgagtattgaggtatctcgcagggatgatgacatcggtgtcaatgttgtctccaaatttatatactcttccttttgcatccataattatctgttcctttcctataatcctctgaggttttgcggctgacttaccttatgcttacagcgcgtcaggaccggcaattttgccgagaactgctgaagctgcggcaacagcagggcttgcgagataaacttctgaatcgccgtggcccattctgccgacaaagtttctgtttgttgtggctacacatctttcacccgcagcgagaatgcccatatatcctccgaggcatggtccgcatgtaggcgtggaaacaacgcagccggcgtcgataaatgtttcgagatacccgagttcaatacattccttataaattttctgtgtagcggggattataattgcccttacatctttgtgcactttctttccttttaatatctttgcagcaacggccatatcagagagtctgccgttggtgcatgagcctattaccacctggtcgataggaatatcaccgacttcgtcaattgtctttgtgttctcaggcaggtgagggaaagctacggttggtttaattgctgcaagatcgatgtcataaaccgcgtcgtactcggcgtcttcatcggcctcatatttgctgtaaggtcttgaaactttatctttcatatactcttcggtaacggcgtcaacagggaagatcccgttcttggcaccggcctcgatagccatattggcaatcgtaaatctgtcgtccatcgtgagtgatgagacgccgtctcctgtaaattccattgacttgtagagtgctccgtcaactccgatcataccgataatgtgcagtataaggtcttttccgcaggccggtgggttgagtttgcctgtcagattgaatttgatggccgcaggtactttaaaccaagcttcacctgtagcaattccagcagcgagatctgtcgagccaacgcctgtcgagaaagcgccgagagcgccgtatgtacaagtgtgcgaatccgcgccgattactgcttcgccggcagctacaaggcctttttcggggagcagagcgtgttcgatgcccatagaccctacatcatagaagttatcgagatcaaaccttttggcaaaagttctgctctgcttgcacatttcagccgattttatatccttattcggaacaaaatggtccatgacaaaagtaactttactcttatcgaacactttatcaaagcctgctttttcaaattcgttaatagaaacaggggcggtaacatcgtttgcaagcacgaggtcaagcttggcgcgtatgagctgtcctgcgcttacgctttcaaggcccgcgtgagatgcaagtattttttgagtcatagtcattcccatatttaaattctcctttcggtttacattgttcttatccgtatttttcgatattgctatacaaaatgaagttttttgttcatacggttgagtgcgcttacaagagcgtttaccgaggcgagcacgatatcggcatgcgttcccactccccagtatttattgccttcgctgtccgcaatgcagatgtaagcggcggcctttgaattggaatccgcgcttacagcgtgctcggaatatgttatgaacttgtaatcaaaatggtatccagtctttctgagtgcgttgctgacagcatcgagtctgccgtttccgtctgcctgaagattgtagactttatcgccgataacgactcgcatcttaactgaaaagctgtcgtcgtcctccgattttgtcgtcgaaagatgactgaaagaagcgtccgtaatgtcgagaggcgtaaagtagttgacatactcgtttttaaattcttcaaaaatttcttcgtaagaaagctcgtgctgtgatttgtcggaaatatccttcatcatatatcctatctcgcttcgcatatcggcagggatcttgtagccgaatctcgtctcgagaatataggcgataccacccttgccggactggctgttgatgcgtataacatcgccgtcgtattcgcggccgacatcgtgcggatcgataggaaggtaaggtacagtccagaatttttcgtcgttttcctttctatagttcatacccttggctatagcgtcctgatgcgagccggagaaggctgcaaatacaagttcgccgctgtaaggatgtcttggtccgacgctcattgatgtgaaagtttcgtaagcgtctaccacctctggcatattggaaaaatcgagctgcggatctacaccgtgacagtacatattgagggccagcgtcacaatatctacattgcctgtgcgttcaccgttaccgaagagagtgccttctattctgtctgctccggcaaggaggccgagctcggcgtccgctactcccgtacctc

SEQ ID NO: 1380 - DNA, 3716 bp, Unknown
  16S sequences of unknown bacteria
tgagtgatttgccgttaagacagagcttgatttcgccgttattccaccccgcaaaccacggacttttgaccgaaacgtcatttacaagatagtagttgcctgtgtcgttcggaagggtatttgtcgacgaccaaggcatccatatttcttcggaatgagacgtatggtcgcccgaatcggtgtcgtttccgcagacgcaatgggagtgaacgggactttcgatgaccaccttgcgggaatcggcactcagagtgctgagatcgtcgccgggattatatgtggaaacattgccgttcttgtcggtggcggtgatcttcgtaaagccgcttacggttccgaaggtgggaccgcgcatcacgatatccttggactcaagctccaccagactgctttcgaaagtcggttttgcgtaattgtagccggagaatgcgtattgattactttttgccttgagtacgctgtttttaacggaaaaagtcgtgtctacgccgtctaagcatattgttcttcccgcttgcaaaacatccgactctgcataaatcacactgtctgtgcaggtggttccgccttggccctgcaaaactgcgtaaaaggctgcaccttgccctaaagccgaatatattcccgcatgaatatacgagttttcgatcgagatcctaccggtggcataaacacacccgccctgcatcgctttctgcacatttccttggcggtccttgccgacgataagatccagcgccgcgttttttatctttaagtcggacacacggatcgccacattgtcgccgaaattttgcatgccgccgatcaccgtgatatctgccgaacagttacggatctcacagtttgccgttgaaattgcataagcgctccgatacccgtcctttgttccgggaagggtgaccgtcaggctgtcattacggctgtttcccttgatgagaaaggaactgactgaagcggagatcgcgtaaatgctcaccgtcttatcgctttcgtccgcccatttgatctcgttttttcctttaaggatcagcgtgtcaatgccgctgcgaatgtctatggctcttgtttcggtcgtcacgctgatttcggcgttttcaagggtcagcgtttttgattcgacgtcaaaagttatgctgcccgaaatgccctcgccgacaatgctgccgcccgccgcgggcacggatattccgttgattttcgccgaaacctcatccgccgcaaaggctgccgtcggcagagtgctcatcattacgcatatggcaagaaacatacctattattcgttttgtcatttcgctttacctccgttcccggtatcggctcagtcaagcgccgtaacggttatgttataatagccgtcgccgaagttcgtatcctggaacatcatgtttgaaaattgtaatgtgagatttatatcctcgtcggccgtgtatatgttattatatgccacggtcagtcttgcggtttgatttgctttcggtatgacaacagaggttcgcgtgccaagcagcatttcggaattattatatccgtcaacaagcgacacaccgcatattttatcgtcgctttttgcgctcaccgaaaccgtcccgctgaaaacaatgctgtaagaatggcctttggaaagcgtgattttcttttcggaggagctataagaaattaaatttccgtcggattttttcacggtgaaaggaagggttccccagccgtagaccgtaccgcttgcggcaaagtatccggcgcacgagccgtcctttccgtcttttccgtcgacgccgtttttgccgtcggctcccttttgtccgtccttgccgtcggctccgtcttttccgtttgttccgtctctgccgtcggtacctttgagaaccgacaaatcataaatatcatgccaaacggtatcgccgatataacgccattcaagcatattttcattaactcggaattccggcgttttgccgttctccccgttttcgccgttttgccctgcaagaccttcgatgtcggcgagagccacaaggttttgccattcttcgccctcatagcgccattgaatatacaggtcggttttttgaatttcaatttgtctgccgtctgcgccgtcaacgccgtttgcaccgtttgcgccctcggccttaacaccggtatcggtggtaccgatccaccaattgccgttttcgcccacaaaaggagtcttgccgtcggctccgtttataccgtccttaccgtcaattccgttagtaccgtcttttccgtcaactccgttggtaccgtcttttccgtcaactccgttggtaccgtctttgccgtcaattccgttggtaccgtccttaccgtcgataccgtttataccatccttgccgtcaactccgttggtaccgtcttttccgtcaattccgttggtaccgtctttgccgtcaattccgttggtaccgtccttaccgtcgataccgtttataccgtccttaccgtcgactccgttaagtccgtctttgccgtcggctccgtaaagctcggtgagcgccgccaaatcgcgccagtcggtttcatcattatatttccattgaatggcggtgccgttattacgcacctccacccgatcggccgccgcgcttgtttgttgaaccctgccgcagccggcagaaagtaaaattccaagcattaaaagcccgccgaccgcatttctcatcatttttttcattttgcgttacctccgttcaaaaattcagagcggtatttatctgcaaacagggcgacgccctgttttaaaacctccatttggcttttcagataatattcgtcctcaaacatggcatagtgcacgcaggcgcggacaaatataaaaatcagcggcgtcgtgaccgtatagggtattccgattttcttccctacatagagagttaactagagcatttatggccgtccgattttcggctccaacaatttagcatattcggtgtatcgctcgtttacaccctcaaaaaacttttttccgtattcaatatatttcggatgggtgtagacctgatacatgaggcggtatttgcttccgtgttccctcgccgtccaatagggcacctcctcgataaaacgcatgacgtcctttgggtcggtgggtgcctttttcataaaatcgtcctccaccttggccatgcagtaggcggtggactcgacaatcagctcgtcaagatttttgaaataggaataaagatttccctgggtgcagccgcaggcctcggcgagcatttttatccccgtgccggtaaggccgtgctcggcatagcactcatagcatttttccatgatttcaattctcttttcattgtgttgtttttctgttctcattgttttgcagcgctcctataattaaatgaccgttcatttaattgcagtttaacacactttttgcgaaattgcaagtctttttcaaaaaaacaaaaaatcgaaagcgcaccctctcgaacggacttaaagcctataaaaaagaaaaagcccttgaaaaatcaagggcataaaagcttttctccttgccgcaggagctttaattcggcaaaaagcaagtttatatcaaatcggattacggttataatactgtaaaataaaaagagcaaggtgtaacccttgcattataattcgtgccgcaggcacacctaacttattatctattactttttacttattacttcccaaaaatcccgtatcaagctttatttgaag

SEQ ID NO: 1381 - DNA, 9638 bp, Unknown
  16S sequences of unknown bacteria
ggatttcaaacggatcgtactgaccagcgcattggcagcagctcatgtactgctgctggttgtgtcaaaagatctgggagcggctctgattttctttgtgacttatctggtcatgctttatgtggcatccagacaacctctttattttctggggggattgctggcaggaagtgcggcagcctgggtagcatggaaattgtttgcccatgtgcagactcgtgtgcttgcctggagtgacccattttctgtgattgacaaggaaggctaccagattgcgcagtctttgtttgctattggaaccggaggctggttcggtctggggatcaatcagggaatgccctataagattccggtggtggagcaggatttcattttctctgcgattgcagaagaaatgggtatcctgtttgcactccttttgatttttatatatctgagcagcttttatatgattctcaacattgccatagtgttgaaggactcctactataagctggtcgctgtgggacttggaacattaatgatctttcaggtgtttttgtccatcggaggtgtgactaaatttattccatctacgggtgtgacgctgccatttgtgagctatggaggaagttcccttctgggaagttttctgatctggtcggtgatccagggaatgtatctgaaacgaagcgatgaggtgacaaaagttgagcgggaagcagacgaagaaaaagcaaaaaaagaaaagaaatcaaaacaatcaaaataatcgtgagtatagctttgtcctgtatctgtttaccgggctttttgtgatgctgatcggttatgtcagcatgtttcagattacgaagagccgggaagtgatcaataacccgtacaatgcaaggctggaagcctttgaaaataaagtgatccgcggaagtattctggcatctgacggacagcagcttgcctacacagaagtggatcagaacggcacagagacccggaaatatccttttggctgcacattttcccatgtgcttggatattcggattatggtaagaccgggattgaggagctgggtaatttccagctgatcacatccaatgcgtattttatggagcggtttttcaatgaactaaaagaacagaaaaatgtgggagacagtctggtaactacgttggatgtggatctgcagacagcagctcacgatgccttgagtaagagaaatggagcggttatcgtcatggagccgtctacaggaaatatccgtgcaatggtatcaaaaccagattatgacccttcagaagtagcgtccaaatgggaggccttcagcagttctgatgatggaatcctgctgaaccgtgctactcagggactttatcctccgggatcagtatttaagacggtgactttgctggaatatctcagggaacatcagatggatccgactggattttcctatacctgcaaaggaaagatcagtacaggagaccgcaatatcagttgctatcatggaaaatcccatggagaactggatctgaaaagtgcatttgcaaaatcctgcaacagcgcatttgcacagattggaagtgaactgaatgtggattcttatgagcagttagccgatcagcttctgtttaaccaggatcttccgctgtcttttccatacagtaagagttctttcgcattgaaggacacagacacggagaccacgaagatgctcacagccattggtcagggggatacactggtaactcctatgcatctggctatgcttatgtcggccattgccaatgatggggtgctcatgacaccacgggtgctggatcgtacagaaaattatacgggtacgctggtagagcggtatgagccacaggagtatggaagtctgctgacatccgaagaagcagaaaatctgaaagaatatctccgggcagtggtgacagacggaacgggaagtgcgcttcagacggactcatatacggtttatggaaaaactggtactgcggagtactccaataataaaaaaagcagccatgcctggtttgtgggatgggcatcgggagacaaagaagatctggtggtggctgttcttgtggaaaaggtcggttccggaagtgaatatgcggtaccgatcgcaaagaggatctttgatacttattacggaaagtaaggattcatcttgtcatttgtaaaaaaaaatggtatcctataaccagtcttagaggcacaccaaacgacaggaggaattgcagtgatagaagcaacgagctgcggcggtgtggtgatttttcgaggtaagatccttcttctgtacaagaattataagaacaagtacgaagggtgggtactgccaaagggaactgtcgaggctggggaggaatatcctgagacagcgcttcgcgaagtgaaggaagagacaggtgttgatgcagagatcatcaaatatgtcggcaaaagtcagtacagttttacggtaccggaagatgttgtcgaaaaagatgtacattggtatctgatgatgtcggacagctattacagcaaaccacagcgtgaggaatactttacagattccggatactacaagtttcatgaggcgtatcatttgttgaaattccccaatgaaaagcagattctggaaaaagcgtacagcgaatatctggagatgaagaagacgaatctctggaaaaaccgcaggtaagaggagaggttgttggaaacgacagcctctttttgtaaaggaggatcgtgggatgagatggtatcgtcctttataccttagtaaaaatactgcagaccagatcgataagatcagggaaaaagcggctgcaggcgcatgggtgcccggcatctattttgtgacactgtcctcggaaccaggacatcttctggatctgtttcataacaccatgctgaaggaatctattttcagagatgtgcagagactggatatcgtaggagtagcacagggacgtatggaggcgctgcgcatggtggagaagatcgtaaaggataaatatcaggagaccggtggatttgatgtgaccgcgtggtttccggaggaatatttcacagatagtgaaggagcataggacagcagatgctgcatatcatcatatttatattgaaaattataggaattctgcttcttgtgatcctgggactgatcctcttgctggtaagttccgtgttgtttgtaccgatcacctacaaagtcagggcagaacgcaaggatggagtgatccaggtacgagcagttgcaggctggatgtttcggctgctttcagtgcattacaggcttcataccggtcaggaacctatgcagctattacaggggcggatctttgggatacccgtgtggaaaccgctggagccaaagaaagagaagccgaagaaggctgaaaagaagtcaaaggaaaaacagtccaagccgaagcagatggaggcgaagcaactggagcagaaggccgaagtgaagtcatctgacaaagccaaggagcgcctgaagaaggatctgactcctggaacagccgttgcaaccataccgcagccggaaccggaggtatccaggcaggagcagccacaggacaaacaggcgcagacgaaaccgccgcggcagagcattttgaaaaagcttctctatgcaatccgacggatttatggtaagataactgccataggaagaggattattctctatggtcgtgaaactgcttcatatgccggagaaagcgtcagagacgataggaacgctgacggacttctggaatctggaagaaaatgtgaaagccagagaatccatatggcgggaactgaagttcctgtggaagcacagtcgtccaagaaaagcggatctgacacttcattttggatttgaagatccatcctggaccggacagtgtatgggagtcttgtcgatcctgaatgtctggtatcctggaagaatttttttgaaaccggagtttgaacaggagatctttgagggaacactttatataaaaggtcatatgatgctggcagtgccgctgctgtctatattccgtctctggagggatgagaatgtgatgaaaatgtaccggcgcttcagacagtaacaggaggtttttatttatgagcgaaaaaaataataacagctttgaatctaccgtatcttctctttttaaaggaatggatcaatttatctccagcaagactgtagtaggagatgcaatcactgtaggtgataccatcattcttccactggtggatgtatcctttggcgtaggcgcaggcgcaagctccgcagagaagaaggacaatggtgccggtggtcttggaggaagaatatccccgagtgcagtgctggtcatcaaggatgataacatccgtctggttaatgtaaagaaccaggatgctgtgactaagatcctggatatggttcctgattttgtcaataagtttacagccggcaaaaaatctgacccggaagtagataaggcagtggatgagattgtaaatccaaaataatacaaaaaaaagtaaaattttacttgcattatttatataattctgatacaataacaaaagttgtgagtctcccgactcaaataagcctaaggaggtgcaatgatggctaaatgtgcagtttgtgaaaagagtgttcactttggaaacaatgtgagtcattccaatagaaaatccagcaaaatgtggaaatccaatgtaaagtccgtaaaagttaaaatggacggtggagcaaagaaaatgtatgtgtgcacttcttgcttaaaatctggcaaagttgagagagcttaactgaccggtaattatttaattggaatggataggagggttgtcgctgtgcgatgacccttttttcgcgaaagaaggctgacagatctctagcagaggaaacagcactggtacccgcagatgatgagaacagcagacagcaggatgcggataaacacatgatcagtgggaagaaaaagtgtcaggaagattccgattccgatgaaaaatatggcaaatccaagctttctcttcatgggctgtcctcctttgcggagagattcttggtttattatatgaaatatagaaatatttatttcttttttacctgttatcgggtataataattacaattatgattatgattgggaggtatttgtatgcagggacagattcatacagaacttggcagtatattaattgatgcggatgtggtggctacttatgcaggttccgttgcacttggctgtagtggtatcgtgggcatggcatccctggatatgcgtgatggactgatgaaacttctgaagaaggacagtatcaagcgcggtatcgaggtggcaatcgaaaacaatgagatctacctcggctttcacgtgatcgttgcttatggtgtaaatatcccggtcgtatctgaaaatctgatcgattctgtcagatatcaggtagaggagtttaccggtatgaagatcggtaagatcgacatctttgtcgaaggcgtgagagtgatagattaacgagggaggaacttcactttgattaagacgattgatgcccagatggttgcaaaaatgtttctgggcggcgcaaaaaatctggaatccaacaaagagtggatcaacgagctgaatgtatttccggtaccggatggagacacaggtaccaatatgacaatgacgattacagctgcagcagcagatgtaagtaagctggacaacccggatatgtatacccttggaaaatgcatttcttccggttctttaagaggcgcaagaggtaactccggtgttattctgtcccagcttttaagaggatttaccaaaggcatccgtgaccatgaggagctggatgtgatcgatctggcaggagctatgcagaaagctgtagagactgcgtataaggctgttatgaagccgaaggaaggaacaatccttacagtggcaaaaggagctgctgacaaggcagcagagctctctgagagtgtggaggatgtggaagaattcgcacgccttgttatcgaagaggcagaagcagtgcttgcaaagactccggatatgcttccggtactgaaagaagcaggagtggtagactccggcggacagggacttgtgcaggtgctcaaaggcgcatatgacgttctgacgggcaaagaggtggattattccttcgaaggtcagaagaaggctgaaccggtcaagatcagtgcgcagacagaggctgagatcaagtttggctattgtacagagtttattatcatgctggataaggaattcagtgaaaaggcagagctggagttcaaggcatatcttgagtccattggtgattctattgtagtcgtgtctgatggcgaagttgtcaaagtacacgtacatacgaatgatccaggactggcgatccagagagcgctgacttatggtgcactgtccaatatgaagattgataacatgcgtctggagcatgaggagaagctgatcaaagaagcttccaggattgctgaagagcagaagaaagcggctgaagagaagaaggatgagccgagaaaagcgatgggcttcatctctgtatctatcggtaacggtgtgggagagatcttccgtgagctgggtgttgactacctgatcgagggtggacagactatgaacccaagtaccgaggatatgctggaagcaatcgagaaggtaaatgcagatactgtatttatccttccgaacaacaagaacattattcttgcagcaaaccaggcaagctatctgtgtgaggataagaagatcattgtagtgccgaccaagacagtaccgcagggtatcaccgctatgatcagctataacccggatgaaacaccggaagccaatgcagaagtgatgcaggaagagattcagaatgtgaagaccggtcaggtaacttatgcagtccgtgatacgaagatcgacgacaaagagatccacgaaggcgatattatgggaatcggagatgccggaatcctggcagtaggaaagagcattgaagcaaccaccaaagctatgatggcagagctggtagatgaggattctgagattatcggtatttactacggagaagatgtgaaggaagaggatgcacagaagcttggagatgagctggcagccctgtacccgaatgcagaagtagaagtacacaatggcggacagccgatttactactatgtgatttctgtggagtaaatattatagaccgatagatatgtttattcatacaagtatgatttgcatatctatcggtcattttgtattgttcggaattatcctaccgtcttttccagaactctggtaaagttctctcttgcaatcagttctttttcgcgtttggtcagtcccagtttatcaaagcactggaacagcttatatatttcggaacagtctttcatgcctgctacactcaattcaggatcatctgtcatagttcctacaacatcgggagtgcagaattcaaagaaatcaaatccacagcccacatgttcaattcccatgatgttgatcatatgatcagcatgttttgcaagctgctcgacggtctgctttgctttcatggcatggacgaatggagtgaaggagttcaagcctaccacaccgtccagatcccggatcgcacgaagctgcgcatcggtcagattacgcggaacatcacagagcgcgcggcagttggagtgagaggcaatgatcggagccgttgcaatatccacaatatcccagaagccattttcattcagatgagaggtatctacaagcatgccaagctgctgcattctctttacaacgttttttccggcttctgtcagaccatctgtcagaccggtagcagcacctgcacccagcagatttttctcattccaggtcaacatgccatgacggcatccaaaattgtaatattcgtcaaccttagatacatcatcgccaatggcagccataccttcgatgccgatccagatgtaaaatttaccagcatctcttgcctgtttcatctcagcgacggtatgtacgatctgtacctcatcacattcagcggtttcgtcaagaatggcctgtttgatctgcgcggttcggatggcatagtcctgaatgtcaggtcgctcaacccagatgacgaagatgctgccttccacctgaccggcacgaagccggtccagatggtgattctttaatacattcttttctccatgttcccttttgaccgttacgtcggtccagatatcagagtgtgcgtcaaaatacatgaataacttcctcttttccttagtatgcaatacttaatcatgtaatctggtgattacgcgccgaggagacctccaaccacaacaccaaggtatgtaccgatgacataaccaaaagtaccgatcagcataaccggtccgaccagcttggtccatccctgggagattgccattcctgctgcggttgttggtccaccgatattcgcattggaagcaagaatgatatcttccagatcaaagtgaagcagtttaccaaatacaaagcagaacagcatattggtcagcaccatgattccggtgaagactaacagcagcggagtctcggtaatgatcttgacaatagaagccggaacaccgataacaaacaggaacagatagataaaataagtaccgatctcctgagaaccggacagattttccacctgtttttcaccaacagtagcagcaaacatggcgatggtggtgatccatacatactggcttccgaagaacgtattgagaatcgacagaagagtattggaggtcgggatcactgcactgatgccagatgcgatcagttttgcaaggaatacaacaacaacacagtaagctacgttcatagcgatatctttcagagaaatctcttttctgttccagtatgcagcagcctgtgtctgtgcatctttcagatcagatactttcactgcatcaatgtgtggatgagtataatatttctggaagaacttcatgcctgcaatgaagatcagggcgaagaagtaaagcgccattaacaggttatcagcaactgtagcagctgctttgatctcccctacattaaattctgttgccagagctgcaaagttcacgccgcctccgatataggaaccggtcatgatcgctgccacacctgcaagtcctggaataaagttgtgaagcagggcatatgcaagaaatgcaccggcaactgttccggcggaaccgatacagaagatgatcatgatccgtccggtctctttccagatcttcttcatgttgcactgaagcatcagcagcggaatacccatggggactgcgaatccccagataatgtcatcatacagggtacaggcggtcggaataatggacaggttggaaagcaccagagcaaataacagggcgatgatcgcacctgagattttggaggcccacatgtatttctgttccagataaatggatatggcaacagctacacacatgaccatcagaagcgaccaggtatcatctggcgcaaccagtgtttcgcgtcctacaagggacataaacagtgaacttaacataataaactcctttcttgcaaaaaaaacgaggtaaatccttgtattaagaacttcctcgttcagatcgcaaccacaatgtattgtttctgttataaattatatcgtttttttgcaaaaatgcaatactttttataaaa

SEQ ID NO: 1382 - DNA, 9571 bp, Unknown
  16S sequences of unknown bacteria
ggttttgctatacaaaaaagccgggcgaatgacagtctgccagtgaaaagagcggagaaaatgcacaggatgtaagctgctgtggaaaacagctgaaagagagccgagggaaagatcaatgagtaaacttattatatagattaaacattcataatacgaatgaaattgttgttgaaattgcggacgaaatatggtttacttttaacaaaggaaaactttggaggtgctatgatgattattggagaaatgcgcagcaaagactattatcttggcatacatcccaaaatgaagcaggcattcgattttctggaagcctgttttacccatgatttggaacctgggcgccatgaaattgatggcgaggatctctatgccctggtttttcactatgatccccaggagaaagagaatccccgctacgagacgcatgaccgctatattgacattcagtgcatggttaccggcagtgaatatcactggtatctgccccggtgtgacttgcaggaggggactgcttatcaggcggacaaggatattaccttttatccctttgcgggtgaaggaagccggttggcggtgaagccaggcgattttaccatcttctttccccaggatggacatttggccggtattacggacggaagtgaaaatgcatgtacaagggttgtggtgaagatcaaatgttgaaccagtcgttatctacagatgccggggttgtacaggataaaagcggcctgacactgagcctttgcaaggcatttgatattttgaattgctttacgccggagacgccgacgctccgcattacggatattacaaagcgggttggcatgacacaaagcaatgtatccagacttgtcaacacgatggtagtgtatggatttatagagaaaaatgatgagtccggttactatcagcttggaaagcggattattacattgtcgagcgtggccctgaaccatagtgagattcgatgccaggcattgcctgaactttacaggctggaacaagagttcaaagtcggagcaaacctggccgtgcttgcaaatgacgagatgtattatttggcgcacgtcgatagccggacttctcccagaatgtataccatggtagggcataccagtccgctgcattgcaccgctatcgggaagattctgcttgcgtctatgcaggaggcggagattgcacggatcctgaaggagaaggggatgcgttcttatacgccgcagacgattacttcctatgaggcgatgatggagcaaattgagcggatccgcaagaaaggatacagtgtggagtacggagagcggtcgtttggcagttcttgtattgcggcggggattcgcggacgatccggaaagatcattgcaggaattagcgtatccggaaaattctgtgacttaaacatgagcgatcatgaggaggaagttgcacatattgtaatggaatcagctgcgattatttccaacaagctgggccatttggtataatgagaaaacatcggggcaattgccccgatgtttttttactctattttacagatggatattgcataatatgaatgatatatttataataaacgtgaaatccaaatttttatcaggagggattgcaatgcgttcagcgatggaggcaaccagcggcaggtatatcagtgcgcgccattcctgtaccgacctgggggaggaattgaagctgctggcggtaaaaaaggtataccttttgggtgggcgtcgtgcactggcttcggtgctcccgcgaattgaaccggcgttgaaggaggcgaggatttcctatcaggttgctgtgttcgaagggtactgcacatatgaagcggcacacttccacgcggaaaagctgcgggcagcaagctgtgattgtattgtcggaatcggcggcggaagatgtattgatacagccaaagctgcatctgagtttgcggactgtatgctgggaaccattcccacccaggcggctacctgcgtttgctgcacgaatatggcaattatgtatgaggtcagcggccgatatctgggccccctatatcctcgaaggcccatagcttttactttggcggattatgagatcctctccgcggcgcctgtacgctatattgcttcaggaattgcggatgctctggcgaagtatcctgagcttcgtttcagtcaaagggggacgtgggattgtacacaggtagatgatgcggcgcttcaggcgtcttatgccatgtctgccagtacgtgggatgtcctgatggcaaatggacagagagcatatgcaagcaatgcagccggggtaatagatcctgcattcactgctgtcattaatacgaatctggtaacgaccggagtcatttccggattggccagaggcagtaagcaattggcaatggcacatgcagtctataattactctacaattgtatttccgcaggcgtggagggaatatttgcatggggaaatcgtttcggtaggaattgtgctgcaggaatattacacccaggctcctgcgcgggaaattgaacaatacattcagatggcaaaagccctgcatgttcccgtatgcttacaggatattggtgtagcaggtacaccggaggaactggatcaattgcatagcgctttgatgcagaagtttacggagttttccgatgaggaggcaaaaagactgcgggaagccatggactgcatcgtaaagctctagagttaaggcaaaataaacaacaaaaactaaaatatcaatatgaaataaacaaaaaaatcttgtttttgatctaaattgcaaatgtatattgcataatacaaattaaagtgctattatgcggatatccaatacagggagaaaacgctgaggaggtatagtatgaaaaagtttttcgcttgtttcttgtcagtttgcatgatggcggcttgtttggctggatgcggttccgaagaatctgtgtcggatgacggggcgcagagttccgctgatggagctcaggtggaagggacagcaagcggactgccggaggaatacgatttggtgatgagcatggggacagagacttcctctacctatgccatggggatccagatcggcgagtacatcaatactctggcgccgaatatcacctgtaccgtgaaagcgggtgccggtgcatcgaatctggcgcttctcaacagcaatcaggcggtaattggacactccaatagtgatacggcttaccaggcgatgacgggtacgggagactttgctgagccgttgaccaacttttacggcgtggcatctgtcatggaatctgttttgcatgtggcggttcctgcggattgtccggtggatactttcaaggagctggtggacgagcagtatcccatcaaactttctgtgggtgtccagggcagctccattgaaagcctgattcgcaacatttttgcgtactatggtgtcacctatgaggacattgcttcctggggcggaaagattgaatatctgaacattggcgatgcgtccacattgtttacagatgggcagttggatggtgtagcggtcatcgccggcatgccgtatgcaacctgctctgaaatcgcagcatcgaaggacattaagttccttgcactcgacgaagatctggttaatgagtttacctctatgggatatgtcgcgcgctccattccggccaacacctataccggacaaacggaggatgtgccgtctctcgcggcactggttacggtttttgccagtgaggaggcagatgaaaatgtgatttatgagatttgcaagttcctcaattcggaagagggaatccagactctcggaaatctcaactccggctttgccgattatatgaccgggccggaaagcggcattgccggtatcgcggtagagctccatcctggtgcagcccgctattacgaagaagtgggtgttagtcagtaattgttccgaaaagtttgaaatcaatgggctgtatggcaatgatacagcccattgattttaggaggtactttatggaagagaatgcattagaaaagaagagctcctggctggatatcatcgggaagattatatttgtcatcggtctggctgcatcctgttttcatatctacgtatctgcaacgggaattctggaagcgtataagatgcgtacgactcatctgatgtttttgctgccgctgacctttttgatctatccaatgagaaaaaagggacgcttttcaaaaatcacaatcatcgattttatctggttcctggccacattggcgagcatggtctacttgagccagatcgcgtattccaggctgcttatgcggattccctttgtatcacccgcaacgaccctggattatgtggttgccattttcctggtaattgctgttctggaagcgacaagacgcgttgctggtatgggaatggtcgtcgtgtgtttagtggcgctggcctatgcgtttttcggtactcatctgaccggcagactccggcacacggggacgactttaaagcgcatggcggaacagatgtgcctgaccacgaatggaattttcggatccacagtagcagcttccgccacatatattttcatgtttacccttttcggcgaatttttggagtattccggtgccggacagtttttcattgatattgcttatgcggtgacgggaaaagcaagaggtggtcccgcaaagatggcagttgttgccagtggcctgatgggcatgatttccggaagctccacggcaaacgtggtttccaccggtacgtatacgattccgctgatgaaaaagacgggatatcgtcctgcatttgccggtgctgtggaggcagctgcctccaccggcgggcagatcatgcctccggtcatgggtgcggcctcgtttttgctggcggaatacgtgggaatttcttatatcagtctttgtgccattgcagcgataccggcgatcctatattttatagcggtgtttattgcggtccatttcgaggctgtccgggtaggactcaaaggtctggaaaacgatgaaaacgcaaaatcgtggcagtggcttctcctgcatcagggatatctggcgacgccgatctttgtcattttgatcaccatgattctgggatactcggcatataaagcagcgctttattccatcgtctcgattctggtcattcttctgatcgaaaagcggggcagagtggatctcaagggaatcgtcaatacactggcaagaggcggacggtctgccgttatgatcgcggttacctgtgccgctgcgggaattgtaatcggcgtgtcgaatgagaccggaatcggagtcaagtttgcaagtatcatcatcaacttcgggaaaggaaatcttttgctgattcttccgatggtgatgctggcgtccattgtgctgggcatgggacttcctaccagtgcatgctatatcatggtggctgcgattgcagttccggccttgattgaaatgggatgcagcaccatggccagtcatttgtttgcgttgtacttcggcgttttctcgggcattactcctccggtggcaatttcctcctatgctgccgcgggaatagcaaaatcctcgcctatgaaaacaggatggctttctgtgggaattgcgcttccggcgtttatcatcccgtacgtagccattttcaaccccgcactcattctggaggggtctattccggaaatcgcgtgggtgatttttgaatgcctggtggccattgttggtatggcaggcggtgtgattggctgtgcgtttaaaccctttgctctttggcagcggattcttctgctgatcgcatctgttacgtttgtggtaacgcccaatatggtggttaccctcgtttgctttacaattaccgtgctgctgctggctgttaacaagatccagtctaaaaagtggacgtgcgccgtaaatggagaggtgcaaaatgctgattgaaaagattgagattttcccggtaaggatcaaaaaagaacatgtgtatctgggaaacagctcgggcctgagcagcaagtatgattactaccttcggccggagtaccggtgcccgtattccaagaacatggagacgctgtacgtcaagatcaccacggattcggggatcgtggggtggggagaagcgcttgctcccgtgcttccggatgtcggcggaaagattattcaggaattgtttgctccggttctgctgggaaggaatccgctggatattaaggtgatctggaatcagctgtacgatttgatgcgtgacagggggtactattccggatttatggtggatgccattactgcggtagactgcgcactgtgggatatcgcaggaaagcatatggggctgcctgtgtaccagctgctgggcggtgcccatcgtacggaaatcccggcatatatatcggggcttcctgttgaggggctggaagaaaaggtgaatcttgccctgagctggaaggaacagggcttccgggcgattaagctccacattggctacggaatggatgaagacatccggattatggcggctctgcgcaaagcgctggggagtgacttcactctgatgatggatgcgcattggaattatgacgtatcacaagcggtaaagcttgcccgcagattggaggatttgggggtagaatttttagaatgtcccctgaatccggaggattacaacgggtatgcggagttgtccgcggcggttgatattcccattgcgttgggagagtctgacagaacccactggcagtataaggagatcctcgataagcgcagctgcgatatcctgcagccggatgtgggacgctgcggcattacggagctgatgcggattgccgaactggctgagctgtatggaaggccggtagcaccccatctgagtgttggtcagggggcctgcattgcagcgactctgcaatgtgatgcggcattgtacaatttttatggcatgcaggagtatcaacccagtattctcccggtggccaatgaatgtttggttaagcccattgtttgtgaaagcggctgcctgaaactccccgatggtcctggactgggcatcgaaccggatgaggataagcttcaatattacagtatgggggaaaagcaatgatgcacagtgaaagtttgaagggtgtttgccccattttgcctacgccgtttgatgaacagaatcatgtggatgaggagagcctcagacgggttgtacggttcatgctggaggcgaaggtgaccggtattgctctgtttggaaatgccagtgaagcatttgctttaacgcaggaagagaaggagcagattgcgggcgttgttgcagaggagactgccggagcagttccgctggtgtttggtgcgggcggcaccagcacggaaaccgcgatcagcagttgtcactgggcggaatctgccggagcggatgtattgatgattatgccgccctatatgattaaaccggacgggaagcgcatttacgagtactatgcaggtatcgcacagaatgtgcagacgcccattatgattcaggatgcacctggtgcatgcggcgtttccatcgatgtccagacgattgtaaagctggcaacagagttcgagatgatccagtacgtcaagtcggaggctccgcccacgtttcaaaaggccaaagccgtaattgacgcagctgaggggcggtttgcggtttttggcggtatgaatggagcgtttttctacgaggaactgtgtgccggagttgtcggtacaatgccggcaggcgagtttcctgatgtgctggtaaaggtgtatgacttgtttaccgccgggaagcgggaagaggccaaggcggtattttatcagtatctgccctttattcggcttggcaatattcccggaggatcggcgatggctgtccataaggaagtgctgaaaatgggcggaattttcagcacggcacgtgtcaggggaccctatattccggcaagtgattttttgaaagaactgatttatgactgcgtggagggaatggacctgaaagcccttcactggaaccgtgcggagcggtcttgacagaagtagcgccgctgtgcagtgaatagaacaagaaacgagcagagagattgccgatctctctgctcgtttcttttttgtgcgattatacggaacacggtatgttttgatttcactcgaagttttctcaatgctatcagcaacagatggtttgcatggatgcagcctgtatgaatccgcgctttcttgggcacaggcagaggagacggcgcatagaagttcctgcgatcaagtaaacgttcttgctttgaaaaaacaggatcaggacagcagctctacaaaacctgcaagcatattggctttggcgtgcttaatatgcgtgctcagaatctcgacggattttccgagatttcctgctttgatggcgtccaacagctgtgtatgatcctcggttgcataggaaaataccgtttgaattcccttggaacagtatttgttcttctcgcggacagaatggtacagggaagagaggtatgggtttccgtaccgagtaaaaatgacttcatgaaatgcaatgtcgtgatcaatgaaactgcttaatgaaccttcccggatggcagccgttcccgcatctaaatgctcctgcattaactgaatatcgtcggcggtcagcaggtgaaatacattttgcagtacaaagggttccaggcattcgcgcacctgatagcaatgcgcaatggcaggcatgtcgtatccctgtacaaaaaagccgacatgcggaacttgccggagaaccccttcctgttccagacgcaaaaaagcttcgcgaacgggggtgtagctcataccaatttcgcttgcaaagttccggatgctcaaatggctgccgctatccatgttggcaatcttttttttcaaagccagatacgcttcgtcacttctcgaaatctttttcataacatcagcaattcctttcctgcccgcgtgatggttggcagtatttaggaaatatatcataaaaatgttaataactcaagcatgcgcagggtataaaaatagattgaaaattataatatacaaatttttcttgcttgttttgtaaagaaatacaaatttcttcctgtggtggaaaaagtagttgtgattggcgaacaagtgtggtatatatttagatacatcggtgatatatcaccgcgataatcacaaaattggaggcatagatatgggaagctggaatctgccgcccaaaggtggctacatggaagcagcaaagaaaatgtattatcagaccatgaccaagctggacgttgaggagcggctcaagcaggatgacgtcattattattcccgttggctctactgaaaatcatggtgcggcgggtcccatcggtgaggatacttttgtggtaacccgcattgctgagatggtggcggaaaaaaccggctgcactgtggcagagcctgtgtggtatggatcccatccgttccatcatatcggccagccctgcacgatcccgctgcccgataatgtatttatcgatttcctccgtgcaattattacgggattctggaatacgggtttccgcaagcagatttttatcagtctgcatggacaggagtatt

SEQ ID NO: 1383 - DNA, 1990 bp, Unknown
  16S sequences of unknown bacteria
ccttgccgatgaacctaccggcgcgctcgacagccgcaacagcgccgtcatgatggagacgcttgccacgatgaacgcccagatgggcgcgacgatcctcatggtcacgcacgacccgtttgccgcctcgcattcctcgcgcgtgctctttgtcagggacggcgcgctgttcacggagctcgtgcgcggcgcagatgacgacaaggcgtttctgacgcgcatcctcgaggtccaggccctgctgggaggggaggcgccccatgctcgctaggctcgccgtgcgcaacgtgcgccgcagcgcgcgcgattacgccgtctacttcgtgacgctgctgttcggcgtcgccgtgttctacgcgttcaactccatcgactcgcaggccgtgctgttcgacatcgagaagaacgcggtcggcagcactctcgagatgatcaactacttcatcggcatgttttccgtggcggtcgccgtcgtgctcgcctttctcgtgacctatgccaaccgcttcatcatcaagcgccgcaagcgcgagttcgggacctatctgctgctcggcatgagcgcctcgcgggtcgcctgcgtgctctcgatagagatgctcgtggtgggggcggtgtcgctcgtcgtcggtctggtggtgggtctcgtgctctcgcaggcgctcgcgtttgccactgccgcgctcatgggcaccacgatgacgcactacacgttcgtcgtgagcacgagcgcgctcgtgaagaccctcatctgctttgcgatcctgtttgccgcggcgctcgtcatgaacgtcgtgttcgtgtcgcgccgcaaggtgggcgacctgctcgcggagcacgccgaggccaaggtcacgtcgcggatcccgctgtgggcgcgcatcgtcggcttcgtgctcgccctggccgtgctggcggtggcgtactggcttttgtgggacaaccagttcaaggagttcgacaacgagttcggcgccgccacgctcctcatggttatcggcaccttcctgctgttctggtcgggctccaccatcgtgctttccctggtcaagcgcgcgcacgggttctacttccgcggcctgcacgctttcacggcccgacagctgtcgagtaaggtcggcacggcgttcgcgtcgctttcggtcgtctgcatcatgctgttcttcgccctcacgacggtctcggtcggctttggcgtgcgggcgctgttcgtggattccatcgagcagaccacgcgctacgatgtcacgttcacggacgtgttctgcgcgccgggactctacggctacgccgcgatgaacggccaggacagctacgagagccggctcgcgtacatgcaggaaaactacccggagcgtctcgaggcggcgcatgcgtcggagttcgacatggcgcgcgacatcgccgcgcataattccggctggaatgacctggtcaaggactccgtgcagctcgattactacagcgagccgcagatggagtggaagtccgtgctcgacgcggcgggtatcgacatgagctccctcgacaattccgggacgtttgcgaccagctccccgctcatcgtcagcgaaagccagttcaatgctgcctgccgccttgcgggcgagaagacctgccagctggtagacgacgagtacctggtcaacaacaccttcaaggcgaccgaggacatcgcaggccaggtgcgtgcgaaagcgatgccgcttgctatcgcaggcgtggatctgcacgcttcgggcgagaaggcttcggtcgagatgcgcacgggcgccgtcgccgatgtcatgctcgagattgtcgtgcccgaccgcgtggtcgagcgcatgaaggcgcgaggtgccctgcccacgtactgctatctggactgcatgtacagctgcgacagggcagagggggatgcgcgcctggtcaagctcctgcaagacggctatcccagcaacgagatcatcgcctccagcggggtacccctgagcagtaccggctgggc

SEQ ID NO: 1384 - DNA, 19879 bp, Unknown
  16S sequences of unknown bacteria
tctgttgcgggcgcggacgcgccgcgaacgggggcggccgatacgggcgctctctgcacctttacttcggtgagatttgccgtcttgatgtattccgtatattcgtaagtcgaagccttgctcctctccaccatggcgttatagacaagctctctgaggcgcttttgattttctttcggggtgagattcttatcggggaagaaaggaccgtccacataaatcgtttctttgggacgtttgaaaaactttctcttttggaaggtggtggtgaaacaaaagacgggtttatccgcttccgcgggatagcggaaggaaacgtctttaaaggggcgtatcttcgtatagtaaggccagatatgcgcttcgggataaatgacgatacagtgtcttttttgcgcatgactgagcacggcgtcgtgaaaatttttcatgccgcggcggtgcgtggggagcggaacgccgcccagcatttccaccgctttgcctaccacgggaatggaaacgccgtccggattgatgagaatatacgcctttttggggaaggtgaccaaggtcggcgtaaaagcgtcgctgacggcggacgtgtgattggcatagataaaatagccgtttttacggtattttttcaacacctttttatttttgaatttctcgcggaagacaatcttttgaaagaggaaaataaggggcgtgacgatcagccgatagaggataaattcaaaaaatttcctcacgggattgctcgaaaaatagggatagtccgcaggcagttccttgcgcttgatattcgtgcccgcaaagtcgtcgttgatttcgtcgctgtaataatatgtctttttcatgatactttcttatgctcctcgattgcgtttaaaagcatctgttccatttgttccatgcacaccttttgcgaaaaggaatcgcgtagggctcgatatttttgcgtatactcgtttctcaaagattcgttatcgtaccaaaaatcgattttcgcggcgagatcttgcgcgtcgttctttttaaagagattgcgctcgtccaaggcaaagtatctcgtcgcgctgcgctcggagttgcagatgacgggcaccagacctcccgcaatcgcttccatacaggctatcgcctctatctccaccaatgccgtatgcacgtaaagatccgcgccgtgtagaacttccaaaagctcttgacgggaaaagagcttgaactcacagtccacgcctgccttctgcgcgctctttttcaaccgttttttatagggaccgtcccccgcgaagatgagctttatgtcctctttatgagcggattttgccgccgctttgatgagtatgtgctgcgccttctccctgctgtaacgccccgtgcaaagaatggtgaatttttcggaaactctcttatgagggcgcgtttcgaaaaatgcgtcgttgacgccgttggaaatcacttcgcccgccgtgggggcggtttctcgttcgaatacatccttgataaaggcggtgggatagtggattttgtcgcagtagcgaaaaacgtttcgataaaagactttataagtaaggcgattggcaaaggggacgttcatcattccgatatgggaagttacgttttccgcctggcaatggaagctcgccgtcacgggtttgttcatacgtttggctaactttgcgcccgcggcgcccaaagaaaagggaaattggatatggacgacgtccgcgtcctctatcgcttgcgtcaaaatttttttgtccgactttgccaggcgcacgccgttccttttgagcgcggcgttaaaaggaccgagattgagcgcgggaaccgtataataattttctttgcctgtcgtatcggcgtcggcggatacgatttttacgcgatgtcccttatccgtcaggtaatggataagattaagcgtggctatcgtcgttccgttgttcggttcgccgagcacgtcgcagattatggtgacattcatagcagttctccgtttctttcgtggattgcaattccccgtattccctttaaaaagagaagatgtaacaatttgtcatgacaaaaagcgaaaaaataacattctgtcatctatttctattatacccgctgcctctttaaaaggcaacggcgagttcggataatgtttttctaccgctatataattatgagagataggcgctctcgctttaatcgacctcattttttgactctactcacagtagaattttataaaaaggcggcttgtggagttgattttttgttgaaaatatgatatagtaacgatatggacaatacgattaaaaatattgtggcaaaaaatttaatcgaactgagaaagagccgcaatctcacgcaaagcgagctggcagaaatgctcaactattcggacaagacgatttccaaatgggaaaacggggattcgctgccggatatttccgtgttggcggcgttggcggaggtttatggaattacgctcgacgatctcgttcacgaaaaggctgcggagaaaattgcgggcaaagcggaggaaaaaaaactgcgtgcgggacataaccgtttgattatcctctgtttgtccgtttccgtcgtattcctgatcgctacgctcgtattcgtctatttaaaactcaaagcgaatatggattactggcaggcttttgtgtgggcggttcccgcctcctgcgtcgctatgctctatttgaatcgaagaacggagaaagaaaaggaggcgccgggcggaaaagtatacaggacagtggttctttccgtcctttgctggtcgcttttggctgccgtttatctgcaatttttatattatcagctttggcttatctttattttagggcttcccatcgaaatgatcatctggctcggctcgaaactcaaccgataaaaccggaagacggcaaaggagaaatcaaagtctgtcaagcgttgaaaaaatgcggctttttttcgggacgctgcatctgacggtataggacaagagttttcctgcgcctacgtgtgatcggacgaggatattgcgacaagggaaaatgtggttttttagaaacggaacgataaaaaggctcccgcttgcaaggcgggggcctttttattagaaaatagaaatcgacggcacaatatgagtatgctcgcacgctgattttccactgtaccggggcgtaaacgatgacgcgcaacaaaaaagaggcgcattgaaaccgaacttcgggcgcccgtttaagtttttcttccgagttttgaacttgcgacgattacttttcccataaaagcggtgcgacaccgaagatcaacaggaacaaaagcaaaaacatttacgaataaagcaaaacggaaaacataaacgataaacaaaactccgtttcaattgattcgggttcaaaacgacggaagcggaaaggtcggcagggtgaaaaataaaaaacaggcggttaaacttccgtttcgtagatgagattcgtcttgtctatcgccatttgcagtcgggagatttcctcccgaagcgcggaaatgtcctttttaacctccgctgtgtcgcacagggtgtccgtatattcgatgacgccgttgaaggtgactcttcgcatggattgcacggtaggcagcgcttccagctgagcgcgttttgcggacaattgcgccagacggatcagcgcttcgctgacggtatagggataatcgcacacgacaagcttggcgtttatttttgcaaggatggatttcagacgcaaggtttctttgtcgagcgcgtcgagcgcctccctcgtggcgcgatagtcgtaacccgtattgactttgtccttttccgaaacgtaggaaacgcggcagttctcgttttcctcctcgataagcgcgtgtttttgttcgtcgagttccttgacttttttcatgattgcggtcaggctcattttcatatccgcttcctccttctttgctatggtatagattccgtctacattatagcaggaatgtcgcgctctgtcaatggcttgcggatatttaaataagaggcaaaaattataatgataatatgataaagcgaaaagagatttctgcctttctccgcatagctgcttttttaggcgccgagaaaaacggcgggcgtattaaaggggcgcagaggacgtttggaaaaactcggcgtattcggaggggcggagattaaaaaacgcgttcgccttccttgacgaaaacgtttgcgtgtgctataatagaagtgaaaatgcgtaagccccaagcatttgcaagcattttcactccctattcaaacataacgcaattatgttataatagaaacaaaacgagaaaatcgcggagtaattacggacactttcgcgccccgctccgaacgggacttcggctgcgttctgataaaaatagaagcgcaaatcgctcgtaaacgggggcgcgcggtgctgtaaagaagtttggcttttgatgatagataaggaaattaatcgaggaatataaagggcaatcagtgttgtaacagcacttatgctgttgtgataagataaaaataaaacaaaggaagtgcggtatgagcagagcggataaaatttttgtggaaaatatgacggagattatggaacacggtttttgggataccgatttaaacgtgcgtccgcgctgggaggacgggacccccgcgcatacggtaaaaaaattcgggattgtcaatcgttacgatttaagagaggaacttcccattctcaccatccgacgcacggcattcaaatcctgtatcgacgaactcttatggatatggcagaaaaagagcaataacatccgcgatttaaaatctcatatctgggacagctgggcggacgaaaacggctccatcggcaaggcttacgggtatcaactggctcagaaatcaaaatataaagaaggggagttcgatcaagtggacagggttttgttcgatcttaaaaataatccttccagccgccgtatcatgacgaatatttacaactttgccgatctgcacgagatgaatctatatccctgcgcctattcgatgacgttcaacgtatcgggggataccctcaacggtatcctcaatcagcgctctaacgatatgctgacggcgaataattggaacgtaatgcagtattccgttctgctcatcatgctcgcgcaggtgtcgggcttaaaggcgggcgaacttgtccacgtcattgccgacgcgcatatttacgaccgacatatccccatcgtcaaagagattttggacaagcctcaacatcctgcgcccaagctcgtcgtcgatccggacgttaaaaatttttacgacttcacggtggacagcttccgtcttgaaaattacgaatacgagaagctcgacagcaagatcccggtggcgatatgatccgcgcgatcctgcacgccgacaaacattggggaatcggcaaaaataattctctcatgttctctatcccccgggatatgaagttttttcgcgaaacgacgagcgggaagacggtggtgatgggaggaaatacccttcgctcttttcccggcggcaagccgcttaaaaatcgcgtcaatatcgtactttccaggggacaggtaagggacgactgtatcatcgtaagggattttgacgctctgaaagaggagatgaaaaagcgcggaaacgagaatatttacgtcatcggcggagagagcgtctatcgggcgcttttgccctactgcgaagaagtgctcgtcacgaaagtgaatgccgacggcggcgcggatacctttttccccgacctcgacgcggacgaaaatttcgagcgcgcggaagagagcgaagagatagaggataacggctttgagatccgttttatgcgatacaggaataaaaaggccgaacgcctgtgaaagatatttcaggcaaagggctttccgcggaaccggaaaaaggggtttcgcggaaattttttgatgattttgcaagaaaaattccgcaaacccatgcgaatttgttgtcataatcgtaaaaaagtattaaaatagtaaagttaaaaagtttttatgaatttatgaaggagaaattgttttgattagaaacgatttgagaaacgtcgcaatcatagcccacgtcgaccacggcaagaccacgctggtcaatcagatgctggtgcagggcggtatgttccgcgacaaccaacaggtccaagacagggtgatggattccaatgacctcgaaagagagcgcgggatcacgatcctcgctaaaaatacttccgcacattataagggcgtaaaaatcaatatcgtcgatacgccgggacacgccgatttctcgggcgaagtggaaagagttttgaaaatggtgaacggcgccctcattctcgtggacgcggcggaaggtcctctcccgcagactcgtttcgtcatgcaaaaggcgctggaattaaaactcaaactcatcctcgtcatcaacaaggtggacagaccggacgcccgcatttccgaggtggtggacgaggttttggaactgatgatggatctcgacgccacggacgaacagctggaaagccctatcgtttactgctgcggacgttcaggcacctcttcgcttacgcccgacgcgcagaagcccaatttgaatgcgctctttgataccattttaacgcatattccgcccatggatatggacgtggagggagcgggacaactcctcgtttcctgtatcgattataacgagtttgtcgggcgcatcgggatcggtcgcatcgaacggggcgtcattcgcgccaacgagcccgtgtccatctgcaattatacggacaataaggtgcgcactaactgcaagatagccaatctctatcagatcgaaggtctggaaagggtgtccgttcccaccgcgcaggcgggcgacatcgtcgtgttttcggggatcgacggactgaatatcggggacaccgtgtgcgagccgaccaaggtggaacccgtccaattcgtcaagatagaggaacccacggtggagatgaccttttcggtcaacgatagcccgttcgcggggaaagagggaaaattcgtcacgacgaggcagctgcgcgagaggctgtacaaggagcttttgcgggatgtgtctttgcgcgtcagcgacacggacagttccgattctttccgcgtctgcggcagaggagaaatgcacctttccatcctcatcgaaacgatgagaagggagggatacgaatttcaggtttccacgcccaaagttttgtataaggaaatcgacggggaactttacgagccgatcgaacggctcgtcgtggacgtccccgaggaaaagacggggccccttttctccgccatgggcaaccgcaagggcacccttgcgcacatgagcgccatcggctctcgtatgcgcctcgaatttaccgtccccgcccgcggattgttcggctacaagagcgaatttttgacggacaccaaaggcctgggaatcatgaactcgattttctttgagtacgagccgtataagggagatatgcaacggcgcagcacgggttcgctcgtggcgttcgaaacgggcgacgccgtcgcttacggactcttcaacgcgcaggggcgcggcacgctgttcgttacgccgggaacgcccgtttacgaggggatggtgatcggatacaccaatctttccgacgatatcaacgtcaacgtctgcaagaccaagcatctcaccaatacccgctcttcgagcagcgacgacgctctgacgctgattcccgtcagcagaatgagcctcgaagaatgcctcgaatttattgccgacgacgagcttttggaagtcacgcccaagtcgctgcgcattcgtaagcgcattctcgacagcgaacttcgcgccaaggcgagatttcgcgaaaagaacatgaaataaaagcggaaaagatggcttcttttcgccgtttttccaagtgtctataaaatgaggaatttgaaagggtttgccggcttccgcaaaagaaaaaatagaaaacagtcataaaaaataagcgttcctgcatatcatacggtatgcaggaaattttacattctttggatatcgaacaacagaaaagcgtcaccgtcacggggatagaaagcgtggcttccttttccgaaagccaaatcgtgctttccctgtgcggcagcaataccaagctctatatcacgggtaccggactgaaaattacgggcttttccaaaacgagcggcactttcacggcgacggggagcgtcaacggagtgcgttacggcggaaagagcatcagatccaaactgtttaaatagggcagggcggacgatggatgcggcggatcagatttttattttcctcgtctgcgttctcgtcggcgtagcgagcggacctttatacgaactttgcttcgtgttccgtaaaatcgcgggagacagattgatcgccgcgatcattttcgacgcgctgtattttttgctgttcgcggcgatatgcatttttacggcggtcttgttttcctttcccgattttcgggtatatatgtacctcggaaatctttttggattggtattatatttaaaaagtattcatagaatagttgcttttttgtggaaactatgctataataaagctataaaagtaataaaaaggcgaaaaagcacgaaaaacacaaagaaaaaagaggtgcattccatatgacgcaggaaaaattaaaacgggtagttaccgcggctgcggtagcggggacgttgattgtcgtctgcctgcttgccgttattgtgtaccaaatcgttcatatgatcgtgttagataacagaataaaaaaggtggaagccgaaacctcctattacgaggagcaaatcagtaaaggcgagaacgatttgaattattatctcagcgacttgtatttggagcaagccgcgcgtgaacatcactttatcaaacccgaagatattgtagggggcaatccatgaataagtttgccgtaatagacatcggatccaattccgttcgcctcatgctcgtggcggacggaaaagttttatataagacgctcaataccacccgtctcggagaagggctcgcctcctcttcccgtttaaagagcgaagccgtcgcacgcactgcggctgccgttacggaattttttcatagggcaaaatccgagggcgcctctttggtatatgctttcgctacggcggcggtgcgcaccgccgaaaacggcgcggaatttgtaagcctcgtcaaggagtcttgcggcttgacggtggatgtcatttccggcggagaagaggctgagatcggcattttgggcgctctgggaaacgacgacgggggaatcatcgacgcgggcggcgccagcacggaggtcatcgtcagaaagggggggaccgttctctataaaaaaagcgtgaatataggagtcgtgcgcctcaaagatatgtgcggcacagataaaaaaatgctggaagaatcggcaaaaagcgcggcgaaaagctatggaaagcttccctgcgacgtacccatgtacgcaatcggcggcacggcaaccactttggcggcggtgctcctcgaaatgaaagagtacgatccttcgcgcattacgggtactgtcatcactgcggagaagatgcattttctgtcggagaagctgaccgcgatgagcgcagaggaaatcgctgcccttccgggtgttcccgcaaagcgggcagacgttttgggcggaggcgcggtgctttactccgtgttgatggacacgctcggactttctcgaatcatagtcagcgacagcgacaatctggaaggctatgcgaaaaagcacggactcatgtgagttttttaacaaggagaaagcgatgaggcgcgttttcggaaaagtatatgcggcgctgctgctgattctgatggcggcaggcgaaagcttcgtgattttttatttcgcatggtttaaggggacgaaccgcgttgccgccgtttctctggggcttgcggggtggcttctttcctgcgtactcgcgccgacaattcacgaactcgggcatatcgtcgccgcaaaaaagcaggggatgcgcctgaaaatgagcaaattttcttttttccgtttgtcggagagtgccggaaaactgcgtttttctttcgcctcgccgtttgccgcggaggaaacccaatgcgtccctttaatgggcggcggcatgaaaaagcgggcgatcctctatacggcgggcggactgataggaggcggcgtctacttgcttatcgtattgcttgcggcgcttcttacggggctgttttctaaaaacgcttcctttcttttttggggcggcgtaccctatgcggcatacctgctcctgctcaacgccctgcctttcgtctacggcgagggcaagacggacgcggctgtcctgaaaggaatcgtaaaagaggcgggcgccgaaaaagcgatggtatacgcgatggaaatttacggggaattgtccgaaggcaaaagtttttccgaaatagacgaaaaatactatttcgatctgcctcagctgcccgaggacgaacccatgtatgcgatgaccttggacctgcgctatcggtattacgtagaaaaaggggatatgaagaacgccgcggactgtcttaaccgcctggcggcgtccgcgcaatatcttccgcaggcgcagtttgacgaagtggctgcggagctcgtctatatgcacagcctgaacaaagatacggaacgcgcggaagagagcggaaagctgtgcaaagagtatctcggaaaagatacggcgcaggcgaaacggatcctcgcggcgtactgcgcgatgctgggcaaaacggaggagatgaaggctctcaaagcacaggcggaaaactgtctttcccgcgaggatacggagggtataaaaaagtttgaaaaaatactgctttctcgaatctgcgaagcctaaaagaatataaaagcgggaagccgtttggtgaacatctcgttcgtgaataaagtgtgaaaaaatccgatctctgttgattttccgttcctatcgggtataatatatatggtaggaaaaagttggggaggaaaggatgctgaaaaaggacttttacgggaacgtcacatttgaggcggggaaggggcccgacgcgccttttatcaaggaatatatgcgtttaaagcccctatattcgggggcgctgaaaacggcgtgcgccaagtttgaaatactcgacgacgagttcagcatgatccaggggcacgatcctatacataacatcgaaagccgcttaaagactgcggagagcgcttatgaaaagctgagaaggcggggctatgaacagactccgcagaatctttccaaattgacggatatcgcgggcgtgcgcgtcgtttgcggctacatcgaagatatttataagatcgcccgcgttttcctcaatcagacgggcgttcgccttttaaaggaaaaggattatattaaaactccaaagtcaaacggttacagaagtctgcatctgatcgtggaaattcccgtttcgctttcgacgattcagatgggcgtacccgtcgagatacagctgaggacgatttccatgaatatgtgggcaagtcttgaacacgaggtttcctataaagtcaactctgacctggtggactcctacaagaaagaattaaaagcctgcgcggacgatctatacgcggtggaggaaaggatgcagaaaatatgccacagcatccgcgaatgcccgtgtaaaacggaaaactaaaaaatgagttacgcgaaagaaaaagaaaaaatccggcgaaaacatcggaaaatcaagtatgccgtcgttacgattcttatgattgccgtcgcgggagtgtgtatattttcctggttcgttcctccgtcttcgtggaaatattacgtaagtcttcccgatgtttcaaaacggagagaaggggaacttcggatccattttctcgacgtgggacagggcgactgcacgctgttggaatttcccgacggtcagacgatgctgatagacggcggcgacgggcaagagcgaaacaccgccgccgttttgcgctatctcaacgctttgaagataaaacggccggattttctgttgcttacgcattccgattccgatcattgcggcggtttggccaaaattttaaagatgaagggtgcgggcacgatttaccttcccgcgataaacaattattatatcaacgacgaatacgccgcgtttcgagaagtgattttgacggagaagtatcattctgtcgattctcggcggtacttgcagatagtgtcgaattcggccgcctatccgtacacccttactttcctttggccatatcgcgcaggaaatcccggaagtccgtacgataaggtaaacggcggcgagtatacggaggacgatctcaacgattgttccgccgtggtctggctggattatttcgggacgagcgcactgttttgcggggacgccacttccagggtggaaaaaatactgatgcaggattacgaaggagatttttttaaaggatacggagtggaattagacaacacggaaattctcaaagtttctcatcacggcagcgcttcgggcacgagtcgggagttcatggaatttctcggcgtggaaaccgcggccatctcctgcggaaaaaacaatccttacgggcatccttccgccgaggcgtgcggcgctttggaatccgtgggcgcggagatttaccgcacggatcgtcagggaaatatcgtcgtcaccatttcctcgggcgggaaatatcgcacacacgcgcagtacgcggcttaaacgcggaaagggaaagaaacttcttccttgggaaaagcaagagaaaagatatggaaaaaacgaatgcaatgcgccttttggacgccaaaaagatcgggtatacggcgcgggaatattccgcggaactcaccgacggcgaagaagtggcggcggcgctgaaagaggaaaaggagagggtttttaaaacgctggtgacggcggggagcgataaaaattattacgtattcgtcattcccgtttcggaaactttggatcttaaaaaagcggcgcgggcggcgggagtcaagagcattgccatgcttcccgcaaagcggctttttccgctgacgggatatgtccacggcggctgttcgcccgtcggtatgaaaaagcagttcagaacttttatcgaagaaacggcgcagttgttcgatacgatcttttgcagcgggggacgactcggctgcaatatcgaaatttctcccgattctcttctcgacgcggtcggaggaacttatgccggattgaccgtttgaacaaaggacgaaaaaagcgcagcctgagaaaagcaatataaaataaagaacaagcccctccaaacgtagtttcgtttcgaggggcttttgtctaagattgtatcccgttttatgtagcaaagtcgtcgtttgggtatggtccgccttatacgcgtttatcgcgcgggggagttccgaaatatttttgataaaattccacgattttccgccgcgcggcgtcgggcacgagagggggatttttcgcgggcttggcgatataatatccctgcacgaaatcgcaccccagacgaataaccgtttccagctcctcctgcgtttccacgccttccgcgatacacagcatcttgcgctctttggcgaagctcacgagattggaaatgattttctggcgctcgttgtccttgttgacgtttctcaccaaaagcatatcgatctttataaaatcggggaaaaattccagcagtaccgcctcgccgttgtatcccgtaccgtaatcgtccaaggcgatgcgggcgccgcagtcgcggatatggttgagcttatgctgcatggcattataggaggcccgctcatattccgtaaattcgacgacgatatgctggaaatcgcggctgtatttgtctttgagttcccgccattcttcgtcctttaaatcctgactgggaacggaattgataaacaaacggacggaagggggcatacggagcgcttcaaagtcccggatccccttaaagaaggtcagtttttccagctgtcccaaacggtagtggaactgcgctacgttgaaaatatcctgcggggatttgaagatgggcaaaagagaacgcatcagcgtttcatagccgtaaatttcccccgtttgcagactgacgatcggctgatagtgaaactccaccagctcgttttcgagcaaattgaacaggtcttctttgctgccgagcaggaaggagtttttaaggtaagtattgctgtcgtaataagccagctctcccttggcggtggtcttgatctcgtacatggcgaaatccgcaaagcgcatcagctgttcgtggctctggctgtcctgaggaaacaaactgaccccgcccgagatgcggacgcggatattatcgccgcccggcaccgtgacaaacccgtttttaaaggcgagataaatttgtttcacgtctttttttacggcttccacgctgtcgtagccgtaaataaacgcataaaattcgtcgcccgaacgtctgccgtaaattttgcgcggcagttttttacattccgccacgaggcactgcgcggcgctttggatataccgatctccgaagtcgtggccgtaattgtcgttgatgtatttgagattgtcgatgtcgaacatcataaaggcgccgatgcccagattgcctctttcaaacagtttttcgatgttttcggaaaaagctcttcgattgtaaatgccgcacaaaacgtcgaagttgcgttcgaaaatgagcgtttccttttcccgataggaggaagtgacgttgttgacgatgccgagcacccgccttccgtcgtcctgtttcactcggcgcatttccacccagcgggtattgccgtcatcgtcctcgaatttatagacgatcagggattgttcgtcgtcgggcagttcctgagtttgaatgacgcggggttccattttgtcgagaaaatcggaaaaatccgcgagggaaaactctttgaagggagggtgctgggcaatcccgaacacatctccgaaattttccgtcataaaaaggtagccgctctcgacgtcgtattcgaaagacgccacgggcatccccgtaagggcaatcgttttttcgagcttcatattcgcttcgaaaacacggctgctgagctgctcgatagcgcctgtcaggttgtctatttccttgatggcggtaggcgtgaatttcaatacgggcacggcggcggtgtctttgatctttttggtgagcgccgtaatggggcgggaaatgagataggaaacgagcgccgcgatcaggatggcgaccaaaaaggcgagaacgagaaaacggatgatggtggaaaaaatcgaaccgatttcttcaaagagaatatcctcgtcgatcaccgcaaagagcacccattgttcgtcggaaaagggcaggccgttttcgtaaagacggatttgtttgactgccaaacaatatttttcttgcccggtctgtatcgtatagacgttttcggcgtctgtggcggaataggtcatgtccgagcgcttggcttgggtgaaaaattcatcgccgccgaagcccgcgatgatggcgttgggttcggaaaaatatcccgttgtgttcgccagcgacagaagataagtgccttcgttctggtcgttcaattcgtagaacggcagcagctttttgaacagcgtttccgcgatgtctatgccgtacacgccgaacaccgtcccgtctttggcgatcaggggaacgctgtaagaggacaccttgacggattgattgataaaggtccttagaggcgaccaccagccgcactgcgcataggaaatatccgattgatccttagatagttcggtataagtgaaaagcggccgcgtaaaaaattccgaccacgtttcgttttccgattgaaaggaaaatttgaattttcggtagctgctgctgatcatcggaccagattcaaattccataggcgccacttcgatcgtgaggtcggaattgtccgccgtgtttgtatcgggatcgttgtcccgcaaatacaatccgtaacgatttgcgagagcattctctccgaaaaccacgaaagaccccgtcgaataggaaatgcgcatagagtccgcgacggttacggccacgtcgttgatgaggcgcgtgcttagctctttaagcgcgtcgtcttctaattccataaattcttttgccgtcaaattttgttccgcaaagagcgtttccgcggcggttatgattttgtcataggtatattcgacgttcatccatcgattggcggcggtactttcgatactggaaattctcaaattggtttggttgtaaaaagcagtccgtttgttatatcgcattttgtcgaaagtgccgctcaaaaacaccgcggaaagaaatatcgcggtttgcatcatgaacacgagggtcatgggaatgagtattttcgtcattatcgaacgattctttttcggacggctgcctttctttgccatagagtgacctttatcgaagaatgaataaaaaacggaaaacgcgggttaagaattataaagtctgacgcgggtcatccaagcgcggcgacgattccggaaagttcgttgaaccagttttcgaaaggataggcggcaagctccgcctcggccgcttgtgaacgggtttcgccatttttcacgcgctgttcgacgagcgccaaaagatccgaggcgttttttaaattttccatgccgagtccggagggttttgtgcccgtcagggcgtattcgaaaatcttgcggattttcgcgctgttttcataggggaaggaggcccagacctcgtaactcgtcatggtttcgtaggtggctttataggtatcgagtaaaattttgttggatgctttcaaatcggatttgatctgcgcgatctcttgcgccgtgaaatcgctttctcccttttcttccttttccagataatttctccattcgttgtttatgacggcggtctggattttatcgagtccgtcgctcgcgtaagcggattgaaggacgggaacatagttcatggaagcggcaaagtcctcgttttccgaaagatatttgatgaatacggcggaggcgtattccgtcaccgtatccgatttgctcacggcaagtcccgcgccctgctggatggcgacggccttagcgtctttgaatacggggatgggcgccacgtacgtttcgatgtcgtaagaatgatcgtcgtctatctgcaccgccttgggaaaataggtggcgctggacgtggagcctacgtaggagaggatgttccccgtctgcacatctcctgaacgataacgttccttgctgtaaaaatatccttttacataagggacataaaaattatcgtaaatacggcggaacgtttctttgtcgagaattacttgtacggaatcttcgctcggctgaatgaccgttttgccgagggaatgcgcggaggtaaggatataattcgccaaggcgtcgcgtccgaaaaaggcttttccctccgaccattgataatatttctccgcggtgtctgtgacgccctcgatcgtttttaaatcgtcgaggctcactttgtccttttccgcggccttcgcgttataagccgtttcgaaattatcccaatctgttttattcagcatgaatacttccgtagactttgccgtgggaataagcttcaaaccgtcgtttatgtagccttcttcgaaaaagttttccacgtaattttccgtttcgctctttgtgaaatagttgtcgagggaagcgatattatgataggtgtcatccagggatttcaggtcgtcggagtagacttggaagatctgaggcatatcgggctttccgggcgtctttttggaagaggcttcaagcgcttccgtcagcttggtaacgctgtcgtagctggtatgctcgacataaatattttttgatttgccgcgggtcttgttgaattcgtttatcgttttgccgaaagcgatggattgctcgttattgtaataggtccacacggaaaggttgattttttccttgtggccttgaaggagcttttcatatgcttcgaggccggcggcggcatcggaagaactgtttgagccttcgtcattgtttccgcaggcggcagccccgaaaaacgagcagagcagcgtaagaacgagggctgaggtaagaagtttttttaatttattcataaatgttcctcaaataatttatctcggcaaatgatttcgtacttcgaaaaaattagtctgcattcattatactacatatttttgcaaaatgcaagcccaagcggaaaatattatcgttttacggaaaataagcgcaataagggcagaagggaaaagatgagaagaacagaggacttgcgaaagaaaaaaatggttccgaaaggacttttcatataaaaaatccttcggaaccgcaaacgattttataaatagtcgaagatttattgatagtggttgaaaatttttttaagagccaaaagaggaagagaaaaaaacggcgtttcgattttatttctttttcctaaattgaaaggggcagggatgggatgaatgagaagatactattttttattcgttttatccgaaagaatttcaaaaggattttttctcggatgattgtcgaattttccgtaaacttcattgacgcggcaggaataagagaaagacgtgctgtattttttgaggatttttaaaaattctcccacttgacgtttgcggacaatacagatgagcagcgctttattgctgtgcgtatacattccttccgcattcagggtagtcacgcctctgcccagcttttccatgagttcggcggaaagttcctccgctttatccgtaataatttcaaacttatagccgctcttcaagccttgcagcatgaaatccaccacaatgtcggaaataaagatattggaaagggtggaaatcacggaattggtccccgaacgatagacaaaaaatgccagaacgacgacggacgcatccatggcgaaggcaagccaggcgatattcttttcgggatgaaaacgcttgatgagggcggaaatcgcgtaagtgccgccggaagcgccgaaacggcggatcattagagaaaagccgaagcccgaaatgaccccgactccgatagaggcaaagacgagattgttcccctcctgaaaacagccgcctccgcggattgccccataatagggaagtccgtaacgggtatggagggatttgaagagcattaaaagcagggactgaaataccagatagacgatcagcatgatgcccgttttgcggctcacgaaaatgacggcgagaataaaaatcggaacgttgagaaggagcataaaaatgctcatgttcagcgtcacttcgccgaaataatcggcggtcagagagccgagaatagaggcgatgccggtaatgccgccgggagcgaaacggttgtaattggaaaaataatagagagaagcggaaacgagcagcgccgaaataaagcaaataaaaacgtcgaaaacaagagtgccggggcgaaggtcgtctttctccggggcaggcaggtcgggacgctttttttcgttctcttcggacggaagatgggtagattccgcttcattggtagtatccatattaaaattcctcagtgggatgatttactctctaataatatagtacattttgttgaataaaacaagtgattttatgtgctttcacaagaaattttctttgaaaaaaaggatgctcgggcagttgtacgggaatttttgaaaaagaagaaaattttttccgtaaaaagattgacaagaaagaaaaaaagtgatatactgacaacgttctattcggatagttgtataaaatggtctcgtagctcagttggttagagcgcatgcttcacatgcatgaggtcgaaggt

SEQ ID NO: 1385 - DNA, 5603 bp, Unknown
  16S sequences of unknown bacteria
gggtatttttccaccaattcatcaaaccaggcgatcatctcgtcggtggtcttgttgccctggccggattttttcaattcatacatgccggtttccgcattgtagaattcgctggcggccacgtccatggcgatgcagatttcttcgcccggcttgtagcctgccgcctcaatggcttccatgatgcatttgagcggcgcttcgttgtcttccaggttgggggcaaagccgccctcgtcacccacagcggtaacctggccttttttcttcaaaacgctcttcaaggcatggaaggtctccgcgcccatgcggatggcttccttcacactcttggcgccgaccggcataatcatgaattcctggaagtccacagaggaatccgcatggctgccgccattcaatacgttcatcatcggcaccggcagggtcttggcattgatgccgcccagatagcggtacagcggcaggccgtatacgtccgcagccgcatgagccacagccagagaaatgcccaggatggcgtttgcgccgtacttggacttgtccttggtgccgtccgcttcgatcaaagctttgtcgatggcggcctggcttgttacatccatgccctttacgacgtctgccagcacgttgtttacgttgtccacagccttttgcacgcccttgccgaggtaacgggatttatcgccgtcacgcagctccagcgcttcgcgttcgccggtggaggcgccgctgggcaccatggcgcggccaaagtaaccgctggcagtggtaacctctacttcgatggtggggttgcccctggagtctaaaatttctcttgcatgtacatcaacgatctgtgacatatgaaaagtcctccttatttaatgtctcaattttaccaatgtaaagtataccacatattgcaaaaaagaaaagttacaaagcatagaaaaatcgcaaaaattcctgaaaaaaccggcctgcttggcgccggcgcagcgcaagagaggctgttttatgttatgatgaaatcccaaacctggcttttgggccgggatggtataaatagcatacatgcggaggtgtttatatgaacggcaacgcccggatcaggctggagcagccatccgatcatcaacaggtagaaaatctgacgcgcgaggcattttacaatgtctatcggccgggctgcgtagagcactatttggtacgcatcatgcgggatcatccggattttctccgcgagcttgcctttgttctggagctggatgggcgcatcatcggcaatatcatgtataccagagccacgctgaccgggcaagacggcggccaaaaacacatcgtgacctttgggcccgtcagcattgcgccggcctatcaacggcaggggtacggcgccaagctgatccgccattcgctgctgcaggcaaaggccctgggctatgaagcggtggtgattatcggcagccctgccaactatgtggggcttgggttcaaaagctgcaaaaaatacaacgtatgcaccgaggacgggcgccatcctgccgccatgctggtctgtgagcttgcgccccaggcgctgggcgggcaaacctgggtataccgcgacagccccgtgatggcgatttcggaggacgaggcgcaacggtacgacgataccctgccgcccatggagaaagcgcatacgcccagccaagaagaattttatatccttagccaggcaactctggattgagccgcgcccagccaaacaggaggaaatacaatgccgatacaaatacaaacggataggcttttgctgcgggagatgacgcaggccgattttccggcgctgtgccaaatgctgtacgaccccgtcgtgatgaaggcctatgagggcgcgtttacccaagcggaggcccaggcctggctggatcgccaaatttcacgctaccgtaaggacgggctggggctttgggccgtggtgctgcgcgaaaccggccggatgatcggccaatgcgggctgacctggcaggaggcggacggccgcaccgtgctggaggtgggctatctattcagccaggcctactggcaccggggctatgccaccgaggcagcccgcgcatgccgcgattttgcctttgacacccttggcgccaaaacggtgtattccatcatccgcgataccaacgccgccagccgcgctgtggcgctgcgcaacggcatgcaccgcgtcggcggctttgtaaagcattaccgaggcgtagagatgccgcatgacgtttttgcggtaagcgcaccggaacgctgaggcccgctatagcgtctggatatccatgcaaagaaaggaaagagacattcatgaaaaagcaagagtttaagcaatcattatttcagctatttgatgcagacatagattctatggcctatgaagaaaaggtgcagtatatagaaaagctggtctatgattatatcaacgggatcgtgattctttgcggcaaaaacccaacaaccgaaagccttggcgggatgaggagctgatgctgatcctcaacgacgcccccaccgtggcaaactgcgtgaaatatgccaaagcatttggccgtgggtatggaagcatcgagcagatataccgctgggccgccacgccccaaaaagacatacagggccggcgggaaaccgacgcgttcatagagcagatcaaacgggtgtccaggctgctggggcgcagggcctaacgcccatccgtttggaggatacaggcatggaaacgtcgccggaggaaatcagattttttgacgaaaagccgcagcttatagggctgtatgccgcgctgcgcgcgcagctggcgcgggcgtatcctgaaatgggcgtgcgcgttggcaagacacagatctctttcctgagcccccgggtgtttgccatggcctccctgccccagcgcagaggcaaaagctggcccaaggaatttcttctggtttcctttggccttggctatgaaaaacagcacccccgcatcgcacaggccacagaaccctaccccggccgctggacgcaccatgtgccggtgcaagccatagaagagatcgaccaaaccctgatgggctggctggccgaagcatatgcgttttcccgggcaaaataaaaaaggacaacaaaaaagcagaggcctaatgcctctgctttttctctgcgtttttaccgctgtgcttttttcttctgtgctaccatcagcaccacagcgccgcccaacgctgcaacgagcatcaggcctacccacggcaacatattggtgctgtcgccggtttccggggaagcctcgttcgtggccgccggggtctgtgtcggctgagccgtttcaccggtagccgctacgatggtgtctttcttggcaatttctttggtcagcgcttcatcggcaaagcatttgccgcaagcttcgcaataccagtattcaatgttgccttcttcggtagcggtaggcgctttggcctccaccttctgcgccttatgggccgctttgataacggtttcttccagcgtaatctctttggtcagctctttgtcggcaaagattttgccacagtcgctggctttgcactgccagtaggcaatgttgccatcctccgtgcaggtagccgctttggcgggcactgcattggtgaatgcatgatcgcaaggatagccgccgtcatacgaagcctctttgtagtaggttttgtctgcggtttttacctccacatagaacgtggcgggctgccatttctcaaacgcttcgcccttgttcaccgtccagtccagatccctgccatccggcaacggcgtaccgttattttccttgtagaacggcgcgctgctcagatttccaccgaccaaatagccattgtccttctgccaagcaacctgcgtagcatcggcggtatactccacgatgctgcggccccatttgtccttcatgccaacgcggatagcagtaatgccgtcggtttcaaacccgtcgctatacttccagcctacgttgaaccagccgggatgtgcttcgccccatgcgccgcagtccgtgatggtaatgtccgcttcgggcgctgcaaacgcagccgccggcagcattgccattgccagaacgcaacacagcagagctttccaaacccttttcttcatgaaaaatgcctcctttgaaatgattcgttcactcaagggaggcttgcaatcagattgatttaggcccctctgagtttacgccgctaaatctcatgaggcctgtttcctttataaaaaatatcatttacagggatgcttgtcaacaatttcgccacaaacttaactggaaaataaagtttttttcttggctttttttggggctgcatcggcccgcccctcggccttgcggcagcctgcccgccccgggtgccaacacgcaaaaagggagggccaaaaggcctccctttgctggttaggaaaggtattttaggcggtttttcaaataaaagtaatggagcacggccagcccggcaatgatgagaatgagcaccgcccacagcaccgcaaagtctgaatcgccgaacatcaagccaaacaggcattccagcagctggaggccgaaattggccagcaccatcggaaacaggcgctttttgaaattcatattgtcgtaaatgcccagcaccgaaacagcgcccatgccagtgccgcaaagcatggtaagcacggcaaaggtaacgtcgtagctatccaatccctggatgccgatggccagggccgtaagccccatcaggccagtaaagcccaggtaggcaatcagcccgatataccacatcatgccgatttcgcagctgcgcacgcgtgcccagtaggggtcgttgcgcaggccgtcaaaatagcttggctttttggcctgcggctgtgggggcgttggctgcggcgccgtacccggggccgtctctgcccgctgcgctgcgccgcaggaggggcagaaccgcgcgttttccggcaggcgctgcccgcaatggatacagtacatcttccctcttcctttctgtggaaaaaggcggcccggccgccttttccgctgttatatcaagaaaacatgtgcttgcgtttgccaaaatatacgacattgaccgccagcatcaccgcgccgatgaggatcgaaaggatgatggaaaggacatccatcccaaaatccagatacgcaaacaggacgacgatattggccaacacctgaacggcatacagcgcatatacgcagaaacagcctgcctttttgcggcgcaccaacaggatgatggtgaccacggccagcacgatgagcgcgatggtggagaaaaacgcaatcgcaaacgccggcccgatggtgggcagcgaaaaggcaaagcttagcgggatgccgtccagatcatccagcaagctgatgatggaaatcagattgagcacggcgcccaggcccaaaagaatgggcagcacggtcagccatttggtgccaagctgcatgggctgcggcgaaggcaccgtctggtacgtcggcgctgcctgcggcgaaggctgcgtctgtgcataggaaaccccgctctgcggcggcgccggctgctgtgccggctctgcttgcggctctgccttgggcgcttccgcctgcacgggct

SEQ ID NO: 1386 - DNA, 1815 bp, Unknown
  16S sequences of unknown bacteria
gtgcataacgcaccggccccgggggcgctttcccatactgtcaagccttcagcatatccgagtggttgtacaccgacgggctgtacaaaaacaatacgtcctgcccatgaaaatcaataaactgctccagaatctgggcagatacatagcgcaaatcgatcagggtcacgctctgataatcttgcaccagcagcggcgccagggacgagccgaatgaatcccggaacaccagcaattcccggtccgttttcgcattggggttggtaatggtctccaacgcatccgcaccaccgaggaagacgtcatagggatctttgccggtcagtttttccgtctcatacaccccggtatcggcaccagtttcataatgatggaccgtacacgcctccagcgcctcactcgtcagataatgcagcggctctgccttcagcggcagggcagactggccataatacgcgccgcggaaatcctgatacgtttcctgtgtataatcggaaaagggcgcaatcgaaacacccagcgcctgggccacgcgtccggccgccttttccagctcttcctgccgccagtggggatcggttttataatagtcctccgcgctcaggcagtcatataaatcaatacgctccatatgaggcaggccttcggccaggatggcatccatgcgctcataatccagatgtggatatccgttttcttccgcaagataataatttttatcgggcaccacaccgtaaaacacccgactgtctgtcagataggtttcctgcagacggttgagcttttcagccgccgcccgcacgctgctttcgcttaaaaccgcctcgattttggacaggcttccgtccacctgatacacaccattattgtctttctggcgcagcagataatactgaacctgggctttcagctggcgcatcgcttcccgcagcgggaactgatccagcgcatacgtttcaaactccgacatatagtttccgcttgcaagcgcctgcaccgaaacctcgggccgctgcgccagcgggcggcgctcgctcaaggaaagcggctgatctgtatgcagcacgcaggcaaggaaaccagcgcccaacgcacacaagaccgccgctgcagtgatcgtttcttttttcatagggattcctccttaaaagcggaaatacagaaaggggttaaacgagccgtccaccagataagcggtgcaaaccagcagcagcgccaaaagcaccgccggctgtataatggtcataccacggcattgcgcgcagcgcgcggcaatgcgtcccggcagcggcgttgcgccgaccaccgccagaagcagcagcaatccatagctggaaaggtaatacagcgtctgggcaccggcaaaaggcacgccggaaaagccaaacatacaggaaagatccgccgccgcgccggaaagcccgtcggcattgaacacagcaaagccgattaccgccgccaaaagcaggtatccatgccccgctgcccggggcagatgctccagcacacgcagcaaaaagagtttttccaacaccaaaagcgccgcaaaaaagagtccccacagcacaaaattccaggctgcgccgtgccaaagtcccgtcagcagccacacgataaggatattgagcagctgccgggcgcgtcctttccggctgccgcccaagggaatgtatacatagtcccggaaccaggaaccgagggagatgtgccagcgccgccaaaactccgtggcgctgcgggcgatcagcggataattaaagttttccagaaaacggaatcccagcacccgccccaatccgatggccatatccgaat

SEQ ID NO: 1387 - DNA, 16007 bp, Unknown
  16S sequences of unknown bacteria
aaaggccttttcgtctcccacggccacgccggattttcccgaaatgactatgacgcaggttccggcggcacgaataccctcgcacatacctcccgcaaagtcaaacataccgggagtgtcgattatgttaagcttgcagtccttccattcgagaggagcgacggcggccgaaaccgacgcggcgcgttttttctcctcggggtcgaaatccataacggtattcccgtccgaaacctttccgagacggtcggtggctccgctgacatagagcattgcctcgcaaagagaagtcttaccctttccgccatggccgacgatggcaatatttttaattctgtttgcagaatactgtttcaatttaaacaccctttcaaacttgctattaaaaacaaaaagcataataaaatggcataattattatgcagtatgctcattatatcacggcttcaaaatatatgcaagtgtttttttaaaatattacacatagcaggaaaaaattcgcggttctttttatgtaaaatgttataaaatcccgttgacagaggttttgcggggtgatataatatgtaagcaacaccgaaacgcaaatttatccattaggaggcaataaaatgaagttaaaacaatgtatatcgattcttctgtcggttttgcttctgacaaccgtgctcgttccgaccaccgtgtcggccgagagtcagggcattatggtcagcgattgcgacagcacaagcggctggtcaaactatcccggcgacggaattgcacttgacacgtcggaaaaaagccagggaaccggctccataaagctgtggcagaccggcggcttttgcgccctctataaattgagcgacgcaatggacatttcggacatgaagtattttacctttgacatgaaaccccaggcggccgattggtttgaaaaggccggttacgcctatctcgtcgtttcctcccgtcaggacggcggcggatatgacgagcccgacaatcccgcatggaacgaaaacgccctgcttattcctctttcgggagttaagcttcacgagggctggaacacggtcaacgtggctcttgatttttccaaggcaaacgagggcttcaatcccgaaaaggtgaccaaggtgggaattttcggcctgcgctattatgagcgtgacggcgaaaatgtcaattatatcgacaatgtgcgtttcggaacggtcgaaggagccgaggcagaggttgtggaccccctcgtttcctccaccaaaaagctgattgacaaggctgccggcatttatgaggccggaaacaccgcctacactcagggctcttttgacaaatttgcatcggcctatgaagccgttaaggacgttgaccttgcttcggtgaccaaggatgagctcatttcggcaagaaagactcttcagtcgggacttaacaccttgaccgccaaaacaaacgtaaacgcccttgaggaaaattataagagggtcattgtggtcggcattgacggtctcggcgcctttgacgccgatgtggacactccgaacctcgaccgcatcaggtcgggcgacgatgtgctttatacccacaccgccacgtcggtcgttccgtccatcagcgctcagaactggtcggcaatgctgctcggcgtcagcccgcagagacacggaaataccaacgaaagcattgaggccaacgagacccccgattatcagacctatccttcgatattcaagtatatccgcaacacctatcccgaggcaaccatgggttccattgtcaactggtcgcccattaactacggcgttatcgaacacaacatcggcgtcgatcttcagaccaacagcagcgacgacgaaatcgcaaataccgccgttaaatattggaccgaaaacgacccgataatgaccttcctccatttcgacagcgtcgatcacgagggtcattccaccggctatcaaaaagaaaaatattatgaggcgctcaaaaacgtcgacagagacgtgggagtggtttatgacgctctcgagtcgctgggctatcttgacgacacgcttttcgtaatactgaccgaccacggcggagtgggaaccaatcacggcggaacctcggccaaagaaatgaactgcacatacattgccaagggcaagagcgttgtgcccggcgaatacaccaacgaggccacaaacaatgtgctgaccaccgcaagcatttcttcggttactgcggcggctctcggaattgctcagagcggcgactacgactacaccgtgcctgacaattattttaagggctatacctattcggctcccgaaaacaacgaatggcaggttgaaactcccggtaaggattaccgcaatcacaagaccttcgacaactccgatgacaaggtcaagctgtcggattatatcgacgcgggcgagctcggacttaaggcctatttcaaatttgacggcgatctgaaaaattcccgcccgacggtaattaccgccaaggaaaagggcagcgtcacctttgacgacaacggatattacggcggcgccgccgacctttcggacggctatctcacggtggacggactcaaaaatctcggaaccgacagctttaccctttccttctgggtcaaagatctggacgcctcctccggcgaccccgcacttgtgagcaacaaggactgggagagtggaatgaatcccggtatgaccattgcgagcgaaaacggaaaattccgtctgaatcttgccgacggaagcagccgttccgacactccctacacctcggcaaacggctataccacctcgggcagcggcggatttgtcaatattatcgctgtggtcgaccgcgtgaacagcattgcaaatctctatgccgatttcagacttatcggaaccaccggaattgacgtcggttctcttgattcggccgtcggcaccacctttgtcatcggaagtgacggcaagggcgagggacttaaggcaaaattcaaaatcgacgagcttatgtattttgcttcggctctcggcagcgacgatgtggcaaagcttaaggcttactatgacgccggcaacgaaactcccgacgccgacaccgccgcaaaggctcttgaaaaggtcaacgaggcctataatcttataaagagcataggcgaggtcaccgccgacaactgggctcagaaaaccgctcccatcgaggctgcggcaaaggctcttgccgagcttaaggaagaatgcggcaaccgtcgggtcgataacatcgcgctttacaacaaagcggtggaggattatgaaaagtataaggtcgacattctcttcggggacgttaacatgaacggctcggtcgaagtgtccgacgccctgctgactcttcagcacgcagtaggcaagatcgttcttgaaggaaacgctcttaccgccgccaaggtttccgacgacggaaatgccgtttcggtaaccgacgccctgcttattcttcagaaatcggtcggtaagatagacaaattccccattgaaaagtaaataaagcaacacaacacaaagcccctccgtgagagctctcacggaggggcttattataattgtttgtgtcgggttatattatgcactttctggggcagctttccttgcaaagaccgcagttaatacatttatcgttatcgatataggcaaggaagttttccaccgttatggcgccctcggggcactttttggcacacagcccgcagccgatacagcccgcctcgcaaaccttgcgtgcttcggcgcccttgtcggtgtttttacagctgaccgtgggttttgcaagggctcttacctcgatgaccgaattgggacattccttggcgcaaagaccgcagccgacgcatttttcgtcggatacacaggcaattccgtttgatatttcaatggcgttttcggggcacaccgccgcacagtcgccgtagccgatgcagccgaaggaacaggctccgccgcctgcaagtatctgttttgcggcgcggcagtttcttatgcccttataattgacctgcttttgggtcttgtcacaggtgccgagacatttgacctttgcaacccttttctcggccactccgcccgaaacgcccatgatttcggcgattttgtcggcggcagcctgaccgccgggggcgcaaagattggttttgtcggttttgccttcgcttaaagcttttgcatatccgtcacagccggaaaatccgcaggctccgcagtttgccccgggaagggcttctcttatctgctgtgccttttcgtccacgggaaccttcatgatgaccgaggccaccgaaagacccacgcctgcgattatgccgatgatcgtaacgattactaccgaaagaataacagttgtcatggcttaacctccaattcccagcagtccgtttgccatgcccgaaaatcccataaaggacagggaggttatggcggcggcaacaagcgttatgggcagacccttaagaaaatcgggaatgtcgcaggtttcgagacgttctctcactcccgcaaagagcaccatggcaacgagaaatccaagtcccgagccgaaggcgttgacaagcgcctgaggataggaatagcctttggtgaagtgaagcacgcacacgccgagcacggcgcagtttgtggttatgaggggaaggtatatgccgagggcgttatagagggagggcatatattttttaagggttatttccacaagctgaacaagggccgcaatgaccaaaataaagactatggtctgaagataggccatgttgttgggaagcagaatccattgataaatgggataggtgacggcggtggcgagcaccattacgaatataacggcaaggctcattcccaccgcagtgttgagctttttggaaactccgaggaaggggcaaattccgaggaactgagcaagaacgaagttttcaaccagcaccgaaagcacaagtattccgagataatatgtcattgttcatcggctcctttctcattgtttgcggtttcgcagctctctcttgcggggcagttttcgcagccgaccttttcaatgggctttttgccacgctttttggaaatcgcgttgacaagggcgaccatcataccgaaaacgaaaaatcctccgggagccataacaaagacaagcatgggagggttgccgacggcgtgtccgaggacggttccgctgccgagaagctctcttataaagcccattatggatattgaaattgtaaatcctatgcccattcccagtccgtcgagagccgaaagcagcacaggatttttgccggcaaaggcctcggcgcgtccgagaattatgcagttgacgacgataagaggaagatatattccgagggtggcgttaagggcgggcataaaggcctgaacaagcatttgcactatggtgacaaagcccgcaataacggttatgtaggccggaattcttattttgtcgggaataaccttgcgaagaagggagataacggtgtttgaacatataagaacaagcgttgccgcaagtcccattccgatgctgcccgaaagggtggtggaaatggcaagggtggggcaggtgcccagacacagacggaaaacggggttttccttaacaatacccttggaaaattcctttaaatattttcccatgtcagttgccctcctttatttcggaaaattcggcaagcgcgtcgtttactgcctttgtgaccgccttggaggagaatgtcgctcccgttatggcgtcggcctgcgcggttcccgattggccgctgaattggtcggtaaagctttggtcgcttcccaccttctgaccgattccggggctttcgtcggcacatccggtaacggtaacgccgattatggtgccgtcggcggcgttcacggcggtcatgacctcaattttgcttttatatcccatttcttcggttatgaaaacataagccgagatctgtccgttttcggtggccgaataggaattttcctttatttcggaaaattcggcgccgggcacgagactttccattgcctcggcgatggaatcggccttggccttggctattttgtcggcggttatataatttgtcagggcgagcagacccgcaacgacaaagcatatcaccgtcagaatgacggcgggttttataatttcctttttgttcattcggtctcacccgctttcttttgaagcttgacaaagccgaagggcttcggagcggtcagccgctctatgtgggggacgagaatgttcatgagcacgattgccatggaaacgccctcgggcatgttgccgaaaagacggatgagagaggtgagcagaccgcagcccacggcataaaccaccttgcccttcatgtttatggggcaggttgtgtaatcggtggccatgaaaatgcttccgagcacaagtccgcccgacatgaggttataaagaacgttttgaccgcaaagaccggtgacggcggcgacggttcccatgaaaaccaagggaatgaccggggaaatgacccgtctcacgcaaagatatactccgccgagcagcagcgccgcgatacatacctctccgagcgagccggggcggagaccgaagaacatatcccgaagggaaaagggcatttgctctccgcttgcaagataggtgaggggggtcgcggaagtggcggcgtcggccgatttaaaggccagcggcattatccattcctttgaggtcatgcttgcagggaaggagatcataagcacgattcttcccacaagggcgggattgacgaaattctgtccgattccgccgaaaaactgtttgacgatcactatggcgacaaagtctccgatgatcaccatccatatgggaatcgtggcgggaaggttaaaggcgagaagaataccggtcacgacggccgaaaggtcgcccaccgtgttgtctcgtccgatgatttttctgaagccgtattcaaaaagtatacaggcggcaaccgaaacgccggtaatgagcagcgttctcggcccgaaaagcaccaccgacatgacaagggcgggaacgagagcgatgataacgtcaagcattatgcctccggtcgtttctccgcaatgaaggtggggagaggagtttacattaagcttttgtccctgaaacatttatttggcctcccttttgtaaatttctttggccagtctcatatactggacgaggggtcggtgagcgggacatgaaaaggcgcagcttccgcattccatacaggtcagcacgccggccttttcgagcgccgttttgtccttaaggcgggagtgtttttcaattgccgtgggaacaagcgacatgggacatacctcgccgcagcggccgcagcggatgcaggccgtctccttatagcgcagagaggagtccttgttggccgcaaatagaattatggcgttgttttgcttgagcacggggatttgaccgtcggcaatgcaaaggcccatcatgggtccgcccatgaggacctttgtgatttccctttcgggctgtcccacaaagtttatgacgtcgtcaaccgatgttcctatgggaacaatgacgttttcggcgctctttttgagggcggcgctgtccaccgtcagacgtttgctcacaaggggcatacccgttgtgatatattcataaagtttggaaacgcttgtgatgttcatgacgatacatccgacgtctgcgggcagccccccttggggaaccttgcggccggtggcggtgtatacaagaaccttctcggcgccctgaggatagcgggagcggagcttcatgatcttgacctgatgctttttgtcccgtccgtcgcctgcgattttttccatcttttctatggctgcgggcttgttgtcctcaacagcgatgatgatctgttcgggctttaaaacatcaagcagcaaaaagacgccttccataagattttcgctgttttcgatagcctcgcggtagtcggcggttataaagggctcgcattcggcggcgttgattatgaccgtgtcgataggcttgtccttgttcggtgtgagctttatgtaggtgggaaagcctgctccgccgagtcccacaagacccgagtctcttgccgccttaatgaggtcgtcaaccgtttttacggggtggggcttaagctcggggtcgggggtcatcagcccgtcagatttgattacaacggcgtcggccttttgaccggaaggaagctgaatccttgtcatgccctcaaccgttcccgaaacgctggaatgaacgggcgccgaaacaaacttgtcgctgtttccgaccaccgttcccacaaatacggcgtctccttttttgacggtgggaatgcagggtgcgcctatgtgctgctgcatggaaatgcagaccttttcgggaggcggcattctgaccgagtccttttcggccgtgaattttttgtgaggagccctcactcctccgtgagcccgtttgacaggctttgccgtgtcgtataacttctctctcacgaaatccctcttttctccaatttttttggtaaaaccgcagctgccgcaaaggtttggcgggcgaataagctcgctgcggttcgatgaacataacgctttctgtaaaaggcagtcccaaaactacccattctattatacttcaaaagcgcatggctgtcaaataaaaaggcacaaacgccctgaggtttcctctcacagacgcctatgccttacatttcaaattatattactcggtgtcaacattgtcaacaggcaaattattcaatttgtccagttttttgaactctccgcggacaaaaacaaaggttagtatgccggtcagtatgtcggtgacggccgccgcccacagcatatattttaccgagccggtgcaaagacccagaaccgttatggccggcacgaaaaagacaacgtcccttgcaaccgaaattgccatggatttaaaggacgcgcccatggactgaagaaaaatcgagcttgccttgataagacaggtcagcagcaccgtcacaagataaattctcaggcaaaggcgggcatattcgatgtatatttcgctgttgcccctgccgacaaggtcaactatgagatcgggcaggagctgaaagactgcggttgcggcaagtccaaccgcactgcaggcgagcatgatttttttataggtttccttaacccttccgaaatttcccgcgccgcagttaaatcccacaatgggctgccctccgagggctattccgacgcagaccgaaataactattccgaaaaccttcatgacgataccgatgacggcaaggggaatgtcggtgccgtaaacggggtcgttgattttaccgataagattgttgcacacggttatgataatgacaatggaaagctgggttatgagcgaggatattccaagcgccgcgatttttccgaaaagacgcagatcgggctttaccgaatgtcttgacaggcggaaattttttgaacggaaaaggtagataacggtcagcgcaagggtgacatattggccgataacggtggcaatcgccgcaccttttatgcccatgccgaaggtgaagataaaaatcgggtcgagaatgatgtttaaaaccgcccccgagcttgtggcgatcatggcgtatttcgggctgccgtcggctcggattgccgaattcatcccttgagagaacatataggcgggaaatccgagaatgatgacgtcgaaatatatttcggcatattttcgtccggcgggggtggttccgaaaagggtgagaataccgtccctgaatacaattccgaataccgttagcagcacaagcagaattatctgcatcataaagccgtttccgatgcttttttcggccgtttcgtaatccctttttccgcggcaaagactgaacagagcggccgaaccgtctcccacaagaaggcagagggcaagggcgataagggtgaaggggtagaccacgtttgtggcgccgttgcagagaatgtttatgccctggccgcttgcggcgtcgacgcccgaaatgtgaccgatgtaaatttggtcgacaatgttgtaaagggcggccacaagcatggaaatgacgcatggcacagaaaaaccgcggagcagttttccgattttttcgtttgcaagatcaagttgtttcataagttttcctccgataataaaaaaccgcaagcccgacaaagacgtccggacttacggtttaattaaaaattaaattgctcgactttttgcgaatattattttatcacaaacaaaatgaaaatgtaagcaatttttttgcgaaattttttatccgcaaatcattccgaaaaccttggaaagcaccacgatgataaccagagcgatggggtaggttgcggcgtatgccgaggtgacatcgtcggttcccgcaaccgaaacgagggtgccgagagcgggggtggaggtcattccgccggttatggaaccgaggttgttgaaaatgctgagcttgaaaacatatttggcgaatataaagccgattatcatggggagagtggtcattataatgccgtatacgaaatagatgggtttgaagtgggtgatgaagttgactcctccgggcacgcctgcgccgatgaggaagagcataagaccgagctcacggaaaacgttcagagtgtttttggtcatacgcatgtcaatgggcccgatgtggccgaaatggccgattatgaggccgacgataagggtgccgcccgaagagccgagggagaaattgattccgggaattttgattgttccgagaatgattcccagcgcaacggtggtcataaaggggaagaaatccagcgagtcaagctttttaagcttctttttcggctcggggatggcaacggcgttggctgccttgaatttttctctttcctcggggatgttgaccttgagaatacggggaacgagctgaacaaagaaaaccacgccaagcacaccgaagatgtaggcaataccgtagccggaggttacctgttcctcggcatgggcaaaggcctcttttgccgaagcgaggccgggggtggaggtaagcgctcccgtgagaagacccatggccatggcgggctcgacgccgagggcaatgcaaacgcccatcgccaaaaatccggcaagaattatgataatgcccataagaagataggacattgtactcttgttaaagctgcggaagaatttggggccggcgataagtccgacgcccgaaacgaacagagcggtgccgatgttggacacgagaccgaacatctttttgacgttgtcgctccaaagagtgatgtcggtttcaccgacggtaaatgtgccgaccttgcttgccagaattccgaaaagcagggcgacgagaagcacaccggcggtgccgagggagataccctttatttcaattccgccgataagatagccgattgtggcaataatgaaaataaaaaacagggtcgagagcaggctgcccaggaccgaaccgagataaaccatattttttctcctctgataatgataagtggtgtcggcgtctcacatcgccgacaaatgccgaaaccgaagcgggagagtatcccgcttcggaaaaatgtaaagattattgttttcttgcgtaatcgggaagaatcttgggggacttgacatcggtgtcgataccggccgactcaagctccttctcgaacttgtcaacatgatcaagggtgagagcgcctacggttacgctcttggccttctcggaagcgtgctgaccggcgttgcggccgaaaacgataacgtcaagcagagagttacccataagacggttgcgtccgtgaattcctccgactgcctcaccggcaacatagaggttttccacgccgctctgtccgtcggccgaaatgtcgataccgccgttctgatagtgaagggtgggatagacaagaatgggctccttgcggatgtcgatgccgtatttgccgaacattctcatcatggcggggattctcttttcgatggttccctcgccgttcttgagctcgatcatgggggtgtcaagccaaacggccttgccctgaggagtgacaacgccgttgccgcggtcggagcactcgcgaatgatggaggcggccgaaacgtcacgggtctcgagggggtgcataaagacctcgccgtttacgttaacaagctttgcgccgagggatcttaccttttcggtaacaagtgcgccgaaaatctgctcggggaaggctgcgccggtgggatgatactgaagggtgtcggcatagagcagctttgcgcccacgcggtatgcaagcacaagtccgtcggcggttgcgccgtagtggttggaggtggggaagccctgatagtggagacgtcctgcaccgccggtggcaatgatgacggtctttgccttggcaacaaggatctccttggtttccatgttcatgaggacggcgcctgcggccttaccctcatcgtcaagaatgatctcgatggcgacggtaaagtcgacaacgggaatttcgcggttaagaacctcgtcgcggagggttctcatgatttcggcaccggaatagtcctttgcggcgtgcatacgctttctggaggttccgccgccgtgggtggtgatcatggttccgtcgggagccttgtcgaattccacgccgagatcgttgagccactgaatggcctcaggagcctcgttaacaagcttgtagagaagctcgggcttggcggcaaagtgtccgccgccgaaggcgtcgagataatgctgagcgggggaatcgttgggtttgtcggcagcctgaattccgccctctgccatcatggtgttggcgtcgccgatgcggagcttggtgacgatcatgacgttggcgccgtttttatgagcctcgattgcggccgaagaaccggctccgccgccgccgatgaccagcacgtccacgtcatagtcgggattcgacagatcggggcggttgtccttgatgcggctgtggccctggagcagagcgcaaagctcggtgggaaccttttcacccttgttggggccgaccttaagctcacggaattcttcctttttatagtcgggatgataggtggcaaggagggtatccttttcctcggctgtcattcttctgggttcaagcttggtgttttcttcacgggcagcctcaaccttttttatggatgcttcaaaatcgctgggatacatagttttacctccttatttctctatctcgcggttgttatagagctctttcatttcctcgacgggcttctgcatgaggctctcgagaagctccttaaagtcgccgtttttgatttcctttacgcggtcttcaaggtgctgtgtatgaggagcgaggtatttaccgttgatacggcgggcaagcatggccacctgagggtgggaaatgcctgcggggcagcgggaggagcaaacgccgcacatgacgcagtcgaaggactcttcggcgcatttgtcgaattcgccgcgctgggcataagcgatgtactgcatgacgttaagtccctgagtacagctcttggtgcaggcgttgcagccgatacagctgtagatttcgggataaagctgcatcatgattgcctgggtgggggaaaccttctcgatgtcatagacctgcttaatgagggggaagaagggcagagtcgcaacatacatattgtcctcgacctgggttgagcaggcgagacatactttaagctctctgtctccctttatacgatagatggtggcgcaggcgccgcagaagccgtttcggcagccgcagccgcgaaccagctgatagccggcatattccatagcgcccataattgtaagtgatgacgggacttcatattttttgcccatcaggaaaacgtttaccattttttccatgtaagttaaacctcccttaatactcgtcgggcagctcgtcaagctggtcgcagcggaaaacaggaccgtccttgcagacatatttgctgccgatgttgcagcgtccgcatttaccgacgccgcatttcattctaagttccatggtggtgaagacctgggttttgttgaagccgagctccataagtccggcaagagtgaatttaatcatgatgggaggtccgcagatgataacggttttgttggtgtcaaagccgagttccttgacgtaattgggaacaaagcccacatggccgtcccagccctcctgctcacggtcgattgtgagccaaacgttaaagtcgggctcgttcatccattcgtcgattatctccttgtaatccacaaggtcgtcggcgcttctcgaaccgtagacaatgtcgaccttgccgtagttctctctgtgcgcgcggacatagttgatgaccgagcgaagaggggcaagaccgataccgccggccacgaagagcagatccttgcccttaaaggccgactcaacggggaatccgttgccgtagggtccgcggatggtgatttcctggccaacctccatctggtggagccaggaggtcaggcagccgcattttttaatgctgaattccatatattcctcattcgtgggggaggaggttatggagaacatggcctcgcccacaccgggaatggaaagcatggcgcactgtccggggatgtgctcaaagcactttcctccttcaagagcgttgactctgaaggtcttgacgtcgggagtgtctattctcacgtcggtaaccacgccgatatggggaataagagtttcgttaactgacattagtttttaccccctaatcttttgatgacttttgcgatgttcatggaaatggggcattttgcaacgcagcggccgcatcccacgcaggaataaagtccgtcgttgttggcaggatagtaaacaagcttgtgcatgaatctctgacggaagcgctcgagctgagtctttctcggctgaccgccggcggttttggtgaagtcggagtacatgcaggaatcccagcagcggaatctctgaataccgtggccggtgtcaaagtcgcgtatgtcatagcactggcaggtggggcagacgaaggtgcaggttccgcagccgaggcaggcttccgaaagagaggcccattcgggtgaattgaatttgtcaaggagcacgtcctcgctgccgaagccgtcaagagaaagaccgttcaggggaagtttttcgcaaatttccttggtggcggccttttgcgcctctacctcggcggtgtcggcgtcctcaaagagcgccgagatcttgccttcaagagccttgcccttttcggttttgccctcgaagaaaagtccgtcctcggtgagataggtcacggcgtcgccgcaaggctcggtggggtcgattccgaacacgccgcagaagcaggtctcctcgggagccgagcaggccatggtgacgacggtgcccttgtctctgcgggatttatagtagctgtcgaccgggtcgctcaaaaagacgcggtcaagaacctcaaagctcttggcgtcgcaggcgcgcacgccgaaaacaacaaagtcctttgtgtcgtcgcgaagatcgacgatttcgattttctttccgtccatcttaaagcccatgaggttttcggtctgggggaagaaaaggtccttgggggaacggttggtgtgaagctcgtcgagacgaacctctgcgccctcgctccatttaaagaagtcgatttttccgtttctctcgatggggagatagagctcgtcgctctcggaaatcttggcaaaaagctcgggaagcttttctctgtttattttaagcatcagttgtcccctcctttatccgaaacgacggtgggctcgacatcctctttggtgaagttggtgagaggagtgcggggttcgtcggcggtttcgccggcctggaactcgccgtagaaggagtcgatgtccttaatgaatttgcggtttaaaaggtggagaggaatgttctgggggcagaccctcgaacattctccgcagtcggtgcagcgtccggccacatggaatgcgcggatgatgtggaacatattttcctcgaaggagtcgtatgccgccttctgggaaacgcccg

SEQ ID NO: 1388 - DNA, 10439 bp, Unknown
  16S sequences of unknown bacteria
cttttctctcaaggtcacatcggcgtacatgattttcggcaagaactcaggtgtgccagccggtttgccttgtgtccggcagagtcaggatagtagtggacgcaaaagaacgaatcaccgtgatattcaaaggcggcatcgaggtggtgcagccgctgaccgaatgatagcggctcaccgctgccccaaccttgaaggctcaagatttttcgtaagagttcaagtacctatgcaaaaccagcgaaaaaatctttttatagtcctcccacaattaattgcagcggtggggttctgatatctttttccgttgcataaaaggactgcccgcgagtggttggcagtcctttttcttagtctgacaaattttacccgtacgcttttcccttgtaaaatgatccgggtttccacaagagatcatgcagacagctttacatcgtgcccatgttccggtaaaataaaagtagctttttccgtcacaacaattcatcaaagaaaaagaggattttgatatgagccattccatctgcggcctcgactgtacggtgtgtgattccaaaggcagctgcggcggatgtgtgaaaaccaatggccgcccgtttcaaggtgagtgcgtcattgcctcctgttgccaaaagaaaggatttgccgactgcagccactgtgccgaaaccgactgcgatttaaaagatcagctgatggcagagttcaatgctcttggcattccggacatgcccgaggtgtgctgtctttatgcactgaagggttcttttatcaatctcgcctacccactttccaatggacagaccatccaactgcttgaagacagtaaaatttatctgggcaatcaactctgtaaagcaggaagtgcacgctgttacggattggctgctgatgaaagccatcttttagtctgtgaatatggggataacggctctgatcctaaaatcatcctttaccaaaagcggcggccggtgtaatgcagcaaacacctcgtctttccctttcccaacaacgcaataaaaaggagctctttgccgatttcaaagtaatttgcaatgtcatagggaccagagctatgcgtttttctgattttttcacccatagctttagatgaatatgggcttttttgccggtttcgcctgccgcggcctgcggccgatcctttgtgcaatcattacatcccagaaaaaaggggttgcagaaatgcagcggcttttagagcatatatgctgaatttcctgtgcttcttctattttactgtatcacctgccttttataagtcagcacgaaaagagctgtgaagaaaattcttcacagctctttttaatatagtctttgtgtttgtttaatagtttttctttctccgctctttccgtaatcctgcccgcagctttccagcctcgaattccgccttttcctcgtcggtatcgcacagcaaggccggcacttccgtgggattttccttttcatccagcgcaaccataatcagatacgcccggttaatatgggttttcttcccgtctaattcctctacaaaggtgtccacccgcacttccatggaggtacgccccacccaggtcagctgtccttctatgacaatggtgttgttggcatgggcgccggactgaaactgcagattatcaatgcaggcagtggtcacattgcagccggaatggcgccgcgcggtcacagccgctactacgtcaatccattctaccagcttgccgccgaacagccggttatacccattgatatgcctcggcatcaaaatctgaatctgcgtcgttttcgattcatatacatgcttggcttttctctccatcattctccccctttttgatagcatacgctatctttttctctttatcctcacattcttttgctccgccttttttccaacagggacagaccgtcctctcctcctatctgcctgcacctttttgccgcaccgccgccagaatggcatccgccacctgtatgggagacgatgccgcgtccgccgtcacctgtgcccgggacaggtatatcgggcgccgaaactcaaaaatccgctgtacttcctctttgctgtttttttgtaccagcggtcggtcgctctcccgaatcctgtcgtagcagaccataaaaggcgcatccaaaaacaccattgtcccgctttgggccagaaagtctgcgttctccccattcagcacggtgccgccgccgcagcacagaaccagcccggtccgcccggccaattcccggcagacttgccgctccatctgccgaaaggcctcttcgccgtccgttgcaaaaatctgcgggatggtgcgtccatatttttgttccagatacccgtcggtatccaaaagcggacggccgctcttctgcgccaacagcgcgcctactgtggattttccgcaccccataaagccgaacagcacaatattattcatctgcgccctccatcctctgctccatttcccggatcagcgcggcaatgtcctcttcccgaaattgggctccataccagtattgatgagcctgtaccgcctgccagaccaacatcgccattccaccgatcacatggcagcccgcctgctgggccagccgcatcagcttagtccgcgcggggttgtagattgcctcaaacacgttttcacatcgaggcagcaccgctgggtccagcggcatgtcgtccaccttcgggtacatccccgcgggggtggcgttgatcagccagcggtagtaggtatcctctcttggcagctcgtctaaagcagttacccgtgctgtcgcgccgggaatggtttcttccatctcttttttcagtccgcatgctttttccattccgctgtggcgtaccgccagtgttacgcgggcgccatgccgggccgattcgatggcaaacatccgccccacgccgccggcgccggcaatcagcacctctccttgcaagggaataccctccagcgaacgcaaaaagcccacacagtcagtattatagccggtaccgccattcttgccgtccacaacattgaccgctccataccttttggcggtatcgtccagccgggcgcagaaagggatgatctgctgtttgtagggaatggtgatattgaacccgtccaactgccgaagatacggccataacgcttcaaactgctccggcggtgtctgcagcacctcatattctgcctgctgtttgcccagcacaaacaatctttcgtggatgggcggagacatggtgtgtcctagcggataccccaaaatggcaaaacgtttcaaattccattcctcatttccccggtaatgaatcgatgtattttattcctttttcacttgattgtcaagggctttgcgggatatttgtgaaaagctgagaaaaatccatttcccgcccaaatactgttgacaaccggaagaaatatgaatatgatagggcaagaacaacatttttaggaggaatttcccacatggtattcgaaaaggttagagaaatcatctgcaatcagttggatgttgcagaagacgatgtgacgatggagtcaaacattgctgacgatttgggcgcagattctctcgacgtggttgatttggtcatgagcttggaggaggaattcgacgctgagtttccggacgaggacatcgaatccatcaaaacagtcggagacgtggtcaagtttattgaagaccgtatctagtttttgtctttttcaaggccgtccgtatgctgcgggcggccttttttccagtattgattgaaaaccccggaaaactatattataataaatgttcaggaaaaggggcaaacgccccaaaaacggaaacaggagtgaatgcaatggcagacaataaaaaaatggtcgaagccatcacctcaatggaagaggatttcgccaaatggtataccgatgtggtgaaaaaggccgaactgatcgactattccagcgtgcgcgggtgtatgattctgcgtccctacggctatgccatctgggaacatattcagcattggctggacagtgctttcaaagccaccggccatgagaacgtttatatgccgatgctgattccagaaagccttctgcaaaaagaaaaagatcatgtagaaggatttgcgccggaggtggcgtgggtcacccacggcggcaacgaaaagctggccgaacggctgtgcgtacgccccacctctgaaacactgttttgcgagcattactcccacatcatcaaatcttaccgggatctgcccaagctgtataaccagtggtgctcggtcatccgctgggaaaagactacccgcccgtttttgcggacgatggaatttttgtggcaggaaggccacaccatgcacgaaactgcggaagaggcggtagccgagaccgaacagatgttaaacatctatgcgaagctgtgcgaggatgcgctggccattccggtagtcaagggcaaaaaaaccgataaggaaaagtttgccggtgcagaggccacctataccatcgaggccatgatgcacgacggcaagtcgctgcaggcgggtacctcccattattttggcgacggttttgccaaagcctttgacattcagttcaccggccgcgataacaagcttcagcatccgcaccagacctcctggggtgtgaccacccgtttgatcggcgcaattattatgacccacggcgataacaacggccttgtcctgccgccgcaggtagctcccatccaggtcgtcatcatcccggtggcgcagcacaaagaaggcgtgctggaaaaagcgggcgaactcaaacagcggctggaaaagatctgccgggtcaaaatggatgactccaacaattcccctggctggaaatacgccgagtatgagatgaaaggcgtcccgctgcgtttggaaattggcccccgggatattgagcagaaccagtgtgtgctggtgcgcagggacaaccgggaaaagactatcgtcagcttggacgagctggaaaccgttatcccgcagctgttggagaaactgcacgacagtctgtatcaaaaagcgctggaaaaccgggaaaaacgcacctttgtcgcccataacctggaggaaatggtccaggttgccggcggcgaaaacggttttatcaaaaccatgtggtgcggcgatcccgcctgcgaggaagctttcaaagagaaagccggcgttacctcccgctgcatgccctttgagcaggaacatctggacgacgtctgtgcctgctgcggcaaacccgcaaaagccatggtctactggggcaaagcgtattaataaaatcatcttcaaaaagctgtctgcctcaaaaggcaagacggcttttttgcggcaaaaccgcctgcaaagcctggccttttcgccgattctttgctacaataacccatagaaaagcgccaaaactcccacaggagcattggggatgcttattctcagtcaaaaaaggagaacggtatggaatttccgctgccgcttcgcacggctattgaacaaaaagcacaggattcatccaccgctgaactgatccgggaagcacaggggctctctcagcgctatcgagaagaaagcggccagggcaaacgcttggtcaccaccgaccgccaggcgtttgtttacgccgctgtgcggatgcccgctacctttggcgcggtagccgcggcgctggaacacacgcttccctttttggaagacgcgcccacctctcttctggatgtcggcgccggtaccggcgccgcagcctgggcggcggactccctgctgtcgttggaatcggtttcctgcctggaacgggagcccgctatggcccggctgggccaatcattgatgtccgcaggcagcgaaccgctgcaaacagcccgctggatcccgggcgatctcaccgacaaaaatccgctcccggcccgcgccggactggtaagtgcggcctatgtgctcaacgaagtacgtgaggaggatcgtcctgccgtcttgttgcgcttatgggccgccgtggaagatgtactgcttctgattgagccgggcacgccggaggggttccgccagcttagagccgcgcgggactgtcttttggcgcagggcgccgtcctgctggccccctgcccgcaccaaaaaccgtgtccgctcccctcggacgactggtgccattttacctgtcggatcgcccgcagccggctgcaccggcaactcaaaggtgcggatgctccttacgaagatgaaaaattctgttatctggctttcggccggtcagcgagcaaccgggcggtttcccgcgtcctgcgccatcctcagattgaaagcggcaggattaccctgcgcctttgtaccaggtcaggtctcatcaccctgccggtgcgaaaacgggatggttcactgtttaaatccgcccgaaaagcaagcagcggggatgcttttcctttcgagggttgatgcttggaatcactaaaaaacaagcgttggggaacagattcccacgcttgtttttttatttccctttctaaagtaaagcagagaaccctttttcttgcttctaaccacataatttgttataatggcttcagctcgtatcggaaccttgttgcagcttgctgcataggatggggtatcgggcaaacggaaaggagggtcgtttttcaaaatcagcaaaaggagggcgagtaaaaacgcataacaggttcaaaagcgccacagccgcacaaaggtacggtcgacgaggcgggaggagtatcgaaaactcggcggatgcctccccgcagcgttcccctgtgatagaatccggcaaaaccgcaggtaactgacggcacaacacggtattctgggaaccatgatttttatcgggaacatcaacatggaaataaaacaaatcgacaccgttttttctgtgtgcgaaatatccgatctttccccaaatgaataggagacgtacattttgctttctcagcaaaaccgatgaggaaccgtctttggtccgtccaacggcggaggttccttctgacgtggctgcacaggaaaacggccggaaagcttttcacatttagggtatcccggatttttctttggcagggattcttgccaaactttccgcccttttgacggaaaacggaatcagcatctttgccatacccacttttcataccgatattctttccaaagaagaaatttttcagctgccctgtccgttctttctcgagccggttatcgggtgatctgaattttttagaaatactactttttacatagacaggagaatagaagatgtgtggtattgtaggttactccggcgcaagaaacgccgttcgtgtcctgctggaagggctcagcgccctggaataccgcggttatgattccgcgggggtttctgtatttactgaaaacggccttcagaccgtgaaatctgccggccgcctggcggtggtggccgaacggctggcatcccatcctctgccgggatgctgcggaatcggccatacccgctgggctacgcatggcgaaccttccgacgccaacgcccatccgcacggaacggcgcggctgagtctggttcacaatggcattatcgaaaactacgcggaactcaaaatggagctatccgcccaaggctatacctttgaaacgcagacagatacagaggtcgccgctaaactgctggatagctgctatcaaggcgatcccatcgaggccatccgaactgcctgtgcaaagatggagggttcctacgctttcggcatcctatttgccgaccggcccggtgaagtttacggcactcggctgaacagccctctgttggctgccgtcggtgagggcgagggctttctcgcgtcggatatttcagcggttttgcagtataccaagcagtattatacgctggaacacggcgaaatcgtaaccatttcgccggacggtgccatctctatctgcaccatggacggcgaaccggtgcagaaggagatgctcactgcccaatggagcgtggagcaggctcagaaaaacggctacgagcattttatgcgcaaagaaattttcgaacagcccactgcgctttacaacaccgttcatccccgcattgcaaaaggtctgccggattttacccatgacggaattgccccaggcttttttcgggatgttacccgcatccagatggttgcttgcggtaccgccagttatgcgggatttgtaggcaaaaacgtcatcgaaaagctggcccgggtaccggcagaagtggatattgcttcggaattccgttaccgggatcccatcctcgatcccactcagctggtggtggtcatctcccaatccggcgaaacggcggatactttggcagcgctgcggctagccaaaaaacagggtgtcaaaacgctcgccattgtcaatgtggccggttcctccatcgcccgggaagcggacattgtcctgtatacctatgccggcccggagatcgccgtagccagcaccaaagcctactcggtgcaaactggcgtgttgtacctgctggccatccgaatcgctatggaaaaaggccgcatcagcgaggaacaggcagctttttacgtagatcggctgcaagaagccatcgagctgacccatgaagctttgaaagccgacgaaaaagccaaagagctgtctgccatcctcaaggatatggaggatttgttctttatcggccgcggcgccgactttcctttgtgccgggaaggctccttaaagctcaaggagatttcttatatccacagcgaagcctacgaggccggagagctcaaacacggcaccatttccttgattaccgacggtgtgccggttgttgcggtagctacccagtcggcactgctgcccaaaaccatcagtaatattgaagagacccgcgcccgcggcgctcaggtgattctactttgcaagcaaagcgatgaaatcggtgaagacgtgtacgaccatatcatccgcctgccggatctggacgatttgttcgccccgattttaggcgtaatcccgttgcagctgatggcttaccatacggcggtcgcccgcggctgcgatgtggataaaccccgcaatctggctaaatcagtcaccgtggagtaattccggaaaaaatatggagcaggccgcgcctttttctttcgaaaggcgcggcctgcttttcttttttatcttccacagagaaggagaaattgcaagttctttaccggcggcgttttttgtcgtataatagtggtaatatcgtccaaaccggaatgagaaagagggaatttgcaatggaaatccgtactgtaaccgcctgttacttcagccctactgatacgactaaaaaaacggtagaggccatcgcccacggcattcgcccggtcattaacattctggatctgactctgccctccgctagagaggcccagtaccactttggcccggaggatcttctggtcatcggcgctccggtgtacggcgggcgcatcccgctggtagaggaagaagccatccgccatatccatggcagctgtacgccggtggtgttggccgctgtatacggcaaccgcgcttatgaagacgcgctgctggagctgcgggatctgctgtcctgccagggctttattccagcggcggcaggcgctttcatcggggaacattccttcggtaatgtcatcgccgccggccggcccgatgcgcaggatctggccaaatgcgccgacttcggccgtcaaatcgctttctggcttcaaaactccactgttggcgacttctctctgaaagtacccggccattatccctaccgtgcccgcggcgcccaatccggcattgcccaccaaatcagcagcgattgtattttttgtctgcactgtgccgaagtttgccccactggtgccatttcctccaagagcccggccattcaggacgtaagcctctgcattaaatgtcaggcttgcgccaaaaaatgtcccaaatcggctcggattgtccccggtggatttttggaaaccatggttgaaaagctttccgccatgtgtggtgacagccgcaaagaaccggagttctttctgggccgatgaatcggattgccctttttacgtgccgggaaagctattttcccccgtctactttcaaagccctgcctgccgcttttaagcggcgggcagggctttgctttggttcgaccacaaaaggactttttcaaagggtacattcatataagaacatctctgattgatcatctcgggcaatctctttatcaaaatcggaataaacttttatctcttgaaaccctacgcgtgtcaaaagctgctccatctcacccagccgatacaaatgcgtctgaaaatccataaactcccgccggatcaggcgccccttatcgtacaattcataatttcccggtgaaaattgcgttccgcttttttcatcgtaggcatttttcgtttttaaaatcaaatcaaacccctttgaagtctttacctgagcggagattgtttcc

SEQ ID NO: 1389 - DNA, 20110 bp, Unknown
  16S sequences of unknown bacteria
gaccaagtcgatgttagagacgttggcggcggcggtaccatcgtagcccttatccgcaatggcaacattttgcagcgtcagagggcggcgcacgatgtccgcggtaaaaataggggtgataagcgtataatactccgcatccgcgccgactagagagatgccctgcaccgaaaccaccttgccggtgccggcgtccttatccaaaaaccggccgtagggggcgccatcgacatgaatatcgtctccctcggtgatggcacccatcaaagagggggtgccttggagcgcaatggtagtggtgccgtcgtattcccgggaggcagcactaagggacaggccggtgatggttagaggctgaacggcctggatctgaaggtgcagcgttgcaggctcggactgcgtgccgtccgctgccttggccgtggcttctatgacgagctctgtgccgggcgcatacgcagccagggacaggctttccccactgtatagcgtctgcgggtcggatgtttcggttttgtcgtctgcggtcagggtgatacgataggtgatctctgcgcctgcggtggaagagagcaccaaaggataggtatgcttgacgacagcctcgtccttcacgctggcagagggggcaagcagctctgtaataaaggcaaagatagcctctcctttgtccgaaaatgaccagacgctgcgtccgctgttgaggagcgtgagaagcgcatcgctgcggaattcatcctccgacagctccgtaacgccatccacggcgccggcgcctgtcatctgtttcccggcaggcgaagcacagtgatcgaatacggcgccctctgcctgcatgacccctgccatcgttccgacggaggttttggccagcacattgcccttatgatagctggtttgaatcagagcggtgttttccgcacaacggatgcgcggcagcgtacccaccaagccacccacctggctttcgccctcgatctggccgagattcatgctatccgccatcaaggactgcgctgtggcggtgcggtccgcgagggtgaactggccgacaagcccgccgacggatcgcgttccgttcacgctgccaaaattggcgccctgcgccaacacgcgggagatgctgcgggtttggctgtctgcggatagagcaagacagccaaacaggccgccggtgttggcttgtccagatacggcgccttgattttccagctgataaaaggcgtccgcctcctgcggcacaaaattcgctgtgccgaacaggccgccggtattggcctgcccggccacactgccttggttgcgcgctttttcaacagcgccggtggtaaatgccccgaacaagccgccggatgcgctttgactatgggtggaaacgcttttgatgctgccggtattgcaaacattggaaattgcaccgcctgcgctgcctgccaggccgcccaaaagcactttggcggaggacttggcagaggcagagacagcgccgctgttggtacagccctccatggcggtcagcgtggcgctgcccacaaggccgcccgcttcgccttgggtacctactaaggaaacgtctgcaaaattcagcccatgcgtaaaagcaatttgctgggctgtaccgaccaagccgccggctgtttggccggcggaaactttgccgcgattgatgcaggcggtcaactgtgctgtttcgctctgttccgcgatgctttgcgcggccaggccgccggcgattttttccgccgacacctgcgctgagttttcacaatgggaaagggaggcattgccgagaaggtgaacaaccagccctccggctaccggcgcggagacagagccgccggaaaccgtacagttgtggatggtggccccgctttgcgccaaaacggccaaagcggccgcctgggcattgccctgcaaagatacgtcggaaaaggtgagattttgtacggtggcggtactggttagcgtatcaaacagcgccggacgcgcaccggtttgggagaaatgaaccaaggcatggcctttgccgtctaaaaagccgctgaaaacgcccgcggcaggcaaaacggcgccctgcagatcaatgtcgttgatcagctgcagggattggttttgaaaggtaacgccctggctgattagcgagagaaaccctaaaaagtccgcccgatcctccagggaaaagaatacgccatctgctttgtaccagctggtgtctatggcggggtcgctttgctcttcagcgtgcgcgacgcccaaggggagccaggcgcacagcagcaaaaggacggccaaaagaagacagagccggccactgatttttttacagaccatttggcatcctgctttctgaaaaatcaaggatagggcaccgcatcaggttgatacgatgcaataccaattcaatttatcatacaacaagttggcaaacgcttcaagaaaacggagcggaaacggggggaagggggcgatattttggcataattccggcaaaagccatgacaaaaccctacccaaacaggggattttgcggtaaacttacaaatatatgacctcaacaaaggggagtcgaacaggtggagcaacaaaacaatacgatgatccgtatcgaggcactgacaaagacgtatgcggtgccgggcggtacggtagacgcgttaaaaggcatagatcttgagatccgccagggagagatctttggcatcattggtatgagcggagcgggaaaaagcacgctgatccgctgcatgaacctgctggagcgcccgacgagcggcacaatacagattgacggccaggatgtaacgggcttatctaaaaaggcgctgcggcagatgcggcacagcgttgggatgatttttcagcagtttaatttgctgatgcagacgacggtggaaaaaaacattgcctttccgctggagatcacaggtgtggacaaggcccagtgcgcaaagcgcgtaaaagagcttttggagattgtagggctatccgacaaggcagacgcgtatccggcccagctttccggcgggcaaaagcagcgcgtggccattgccagggcgctggcggccaacccaaaggtattgctgtgcgacgaggcgaccagcgcgctggacccgatgacgacggattccattttggagctgctaaagcgcatcaatcagcagatggggatcacgattgttgtcatcacgcatgagatggaggtaatccgcaagatttgccatcgggtggcgattatagacggcggcgtgatcgcagagcaaggcgaagtaacggagatattcacagcgcccaagacggcggcggcgaaaaagctgtttcatgtattgccggagggcgaaagcggcaagggcggcgcggtgctgcggctggtttttgacggcaagcagctgtatcagcctgtggtagcgggcatgattctggcctgcggcgtgccggtttccatactatccgcagagatccgcaccatcggccaggggcagtatgggcagctgaccattcagctgccggacgatttggaagcgtgcctgcgcgcaaggcagtaccttaaagagcagggcgtacaggctgaggaggtggaaacagaatgagcggcatgagttttgcgcagctttcgcagctgctcttgcagggcacgctggatacgctgtatatgacgctggtatccacggccattgcgtatctgatcggtattccgctgggggtgatcctggtgatcacgcgcagggagggcatctgcccggcgcccaagaccaacgcggtgctgggaacgattgtcaacatcatgcgatcggtgccgtttttgattttgatcatcgtactcattccatttacccgcctggtagcggggacgagcatcggcgccacggccacgattgtgccgcttattgtgggggccgcgccgtttattgcgcgcatggtggaatcctcgcttttggaggtggacgccggcgtggtggaggcggcccaggccatgggtgccagcccgtggcagattgtgaccaaggtgcttctcaaagaatccgtgcccagtttggtgacgggggcggcgattgcgctgaccacgatcttgggctattcggccatggcaggcgctgtgggcggtggcggtttgggcgacttggccatcaaatatggctaccacaggtatcagaccgatgtgctgttattgacgctggtaatcttggtgcttctggtgcaggtgatccaggcgctgggcaacgccgtagcgaagaggatagatcacagaaaatagtgatttatgcaatattttaacgaaagggagagggtaaaaatgaaaaaaattgcaatgtttttggcgatggcaaccttgctggtattcccgctggcgggctgtggcggtaaaaaaacgctgaaggtaggcgctacgcctgcgccgcatgcggaggttttgcaatccatccaggaggagatggcaaaccgcggcgtggaaatggagattgtggagtttaccgactatccgctgatcaaccaagcgctggccaatggggacattgacgccaattattttcagcatgagccgtacttggtagactttaatgaaaagaacggcacggacttaaagacggccgcctatatccactatgagccgctggcgctgtttccgggcaagacaaaggccattgcggacttgaaggaaggggcacagattggcgtgcccaacgacgcgaccaacgaagcgcgcgctttgctgctgttgcaggaccaggggctgatcaagctcaaggagggcgcagacctgaacgcaaccaagctggacattgtggaaaacccgaagaatttggagatcatggagatcgatgcggcgcagctggcgcgttctttgcaggatctggacatggcggtgatcaatggcaactatgccttgcaggcaggcctgaacgccaaaacagatggcttggcgatggaaacggaggattccttggcaggcaaaacgtatgccaacatcgtagccgtgcgcaacggggatgagaaccgggaagagatcaagaccctgattgaggtgctgaccagcgaccaggtaaaggcctttatggaggaaaaataccaaggctctgtggtgccggtattctaaaaagaagagaaaaggagcggatttcccgctcttttttcttttttaagcagttttacagacaaagcgcataggatgacagaggagggcgagatgaaacagacatggaaaaaaataacgatgggtctggcggcggcatgcgcgctggcggcggccacagtgcattttgccgtggggcatgcggcggaagcgcaaaaagaaggcgttttggtgcctatattgatgtaccacagcattttgaaggacccacagcgcgctggtatgcatgtgctatcgcccgatacgctggagcaggatctacggtatttgaaggatcatgggtatacaacggtttccatacagcagctcatcgacgctgtataccaggatgcaccgctgccagaaaagccggtggtattgacgtttgacgacgggtatttgaacaacctgacctatgtgctgccgctgctggaaaaatatgatatgaaggccacgatttccattgtgggcgcgtatactgagcaggcagagcgggaagatgacgaaaatccgaactatgcttatctgaaaaaacagcgcattgcggaaatggcgcaatccggccgattcgagatcggcgtgcacagctatgatatgcacgggcagcagacgaggaaggggtcggcgaagaacaagggagaatctaccgggcaataccaggcggtgtttcgggcggataccgagcagtgcgtggcgctgctggcggaatgcggggtggacgccaatgtgtatgcctatccgtacggcgccatatcagcagaatccgagccggtgctcaaagaactggggttttgtgcgtcgctatcctgccgcgagaagccgaactacatcacaaaggatccggactgtctgtggcagctggggcggtacaaccgaccgagcggggttagcacagaaacctttatgcaaagggcgctgggagaggatacaaaataaaaaaggggccaaagccccttttttattttatgctcatttgctgcccatgcacaaaaacgccatcacagcacctgcaacatcgcaaaggatggtcaagatgctgccaaagccaaaattgagaagcgcgccgtattcaccggccaggatggacttggagatcaagaccaggatgagaccaaggatgaacaggatcatatggatcaggtagtttttcttttctttggtgacgatggagaacaccaggccacccaccggcaccaaaaacagcacgatggcgccaaagctggcttcaaaaagcacggtaaacgcgctgacaccgaaaccaaacgcgctataggccggcaaaagcaggcaaacgatggtaaccgcatacagggcgatacagatcatgttccatttttccttgatgacattcatatggaaaccctccttaaaaagtatgacaaaattatggcactcttgccgtatttacgtaagaataccattttatccaaagatatgcaaggggaaacgggtaaagaaaaaacgcctgtacaggcgttttttaagggcatacgagctgatccagcgaggcaaaggaatagccctggcttttccaggtctggatgagctcgtttaagatggcggcgttggtgctgctggtattatgcagcaggatgacagcgccgcaatgcgtgcgcggcaaaagcttatcaaaggcctgctcacgggttggctgatcatcttgcagccaatccacataggccagcgaccaaaacatggtcttataccccagcgccttggcattttgtaggttctcgatgctgtatttgccggcgggcggccggtaatattttggcatgggctggccggtgatgtcttggtacagggcctcgtttttctccaattccttttgcagggtttccttggtagagattttagacatattcggatggctgtaggtatggttgccaacgatatgcccttcctgcaccatacgggcgatcagatccgggctttgctctaaataatggccggttacaaagaaggcagccggaacctgctgagatttcaaggtatccaaaatggcggcggtattgccgttttcatagccgcagtcaaaggtaagatacaggatcttttgatcggcgctgcccataaaaaaggcgtcatactgtgccagatcttccgggtcggcattgccgcgcggctgggccccctcttcggaaaagctgagcccccaatcgttgccgcctgccatggtcgtggttaccttgggaatgagcaggccgatctgtacgatcagcgctagggccagggccaggataccgtaatcaatgaaacgacggaattcgtgttttttcatgctgttccccctttctctttcattgtaagcaggagtatgggaaatatgtctttgtgtgctggcagtgggaaaaggaaagaaattgtcgtaaaaatggcgaaaataaattgaaaatcggcgaaatatagtgtaaccttattaaatcagggattttttttattttttggatgggcggtggatggacaagcaatggaagagctcaagcaacgcattgtgaaggatggcaggctcaaagagggaaacatcctaaaggtagacagttttttgaatcatcaaatggatatagacctgtttaacaaaatgggccgggaattttacagattgtttgagaaagaccatgtgaacaaaattttgaccattgaggcctccggcatcggcattgcctgtgtggcggcacaatattttcatgtgccggtggtatttgcaaaaaaatcccaaagcgccaacattgacggcgatgtttataccaccaaggtggagtcttttacgcataagcgtgtgtatgacatcatagtttccaaaaaatttcttaatgcaaacgacagggttttgatcatcgatgattttttggccaagggcagtgcgctcaacggcctgtgccatttgatccattcctctggggcaacgctggtgggggctggcattgccattgaaaaaggatttcaagagggcggccatttgatccgttcgcagggcgtgcgggtggaatcgctggccattattgaaagcatggatataaacaccggcattgtattcagagattaaagcaagaagtgagcttgctacaatcaaaactacaaaaaaggaaaagaggagaggaaatcatgaagaggacaaaacggctgctggcagcaattctgtcttgtgccatggtctttgcgctgaccgcttgcggcggctcggaaggcgcgggcagcggaagcctgaaggcgatcccgaaggaggacctgaagatcggctttgtatatgtggggccggtaggggacgaagggtactcctttgcgcatgaccagggacgcaagaagatgatggaaaacctgggcctgagcgaggaccaggtaatcatcaaggagagcgtaccggaaaacgcggactgcgaaaaggcgctcaacgatatggtggaccagggctgcaacgtgatcttttccaccagctatggctttatggatttcacgctgaacgtagccaaacagcatccggacgtatacttcttccattgctctggctacaaaacggcggacaacatgtctgcttattttgggcgcatgtatgagatgcggtatttatccggcattgcggcgggcctgaagaccaagagcaacaagatcggttatgtggcggctatgccgctgccggaggtgacccgcggcatcaacgcgtttacgctgggtgtgcgttcggtaaacccggatgcgacggtagaggtaaaatggacgaactcctggtttgaccccaccggcgaaaagcaggcggcggttgagctgctcaattccggctgcgacgtgctgggccagcactgcgacagcgcaggcccggtggtagcggcgcaggaaaagggcgcatgggcggtaggctacaacgcggatgcgctgtctaagggcccggatgcatacctgaccgcaccgctgtgggattgggggatctattacaccgagcaggtgcaaaagatcatcgacggcacctggaagtctgaaaactattggggccatggccatatggacgagggcatcgtaaagctggataagctgtctgcaaactgtgcagagggcacagaagaagccatccagaaggcccaggaggaaattgacaacggcaagcatgtatttgccggcccgctcaaggacaacgagggcaatgtaaaggtacaggaaggcgccaccatgacggatgaagaaatgctgtccatggattggttcgtagagggcgtaatcggctctgtacccaagacagaatcgtaacactgcgatgtaagagggtaggagagcattccccaggtagggagtgctcttccttcctttcttggcatttgatttcattggtaggaggcaggcaatggcggaccatccggcatacatcgagttaaaaggcatttgtaaatcgtttggcccggtagtggcaaaccacaacatcaatctttcggtagaaaaaggggagatccatgcgcttttgggggaaaacggttccggcaaaagcacattgatgaatatgctttccggcatctattcgccggatgcgggcgagatatacttagacggcaaggccgtctcgttttccgagccggcggaggccatccgcgcgggcatcggcatggtacatcaacactttaaattggtggatgtgctcactgcaaaggagaatattgtagccggaaaggaaaaggccggctttttcataaagcaaaaggaactgacaaaggaaattcaacagattgaagaaaaatatgggctgatcgtggatccggacaagaaaatttacaacatgtccgtcagcgaaaagcaaacggtggagatcttaaaggtactgtaccgcggggcaaatatcctaattttggacgagccgacggcggtgttgacgccgcaggagattacaaagctgtttgacatcctgcgcaatatgaagcaggaaggatgcagcattatcatcatcacccacaagatgaacgaggtgatggagatcagcgaccgggtaacggtgctgcgcaaaggcgagaccatcggcaccgtaaaaaccagcgaaaccgacccacgccagctgacggagatgatggtgggacgggctgtgagcctggacatcgagcgtgtgccggtggacaaggaaaaccagcggccgttgctggaagtaaagaacctaacggcccaaaatgccgaagggcgtgaggtgatccgccggatgtctttcacgctgaacaccggcgagatcttgggcgtagcaggcattgcgggcagcgggcaaaaggagctgtgcgagctcattgcggggctgtataaggcacagtccggcgaggtgatttttaagggagaatcgatattggggatgacacccgccaagatcattcaaaagggcatcagcatgagctttatcccggaggaccggctgggcatgggcctggtggcggggatggacattgtggacaatgtgctgctcaagacctttcaccaggggaaatcgccgtttgtggacagaaaagagggcaagaagcgcgccgagcagattgtggaaaaattccagattgacacgccgtcggtgcatcacattgtgaaaaagctgtccggcggcaacatccaaaaggtgcttttggggcgcgagatcgatatgaatccacagctgatcatcacggcgtatccggtgcgcgggctggatatcggcgcttcctacaacatctatgatattttaaaccaacagaagcaaaagggcgtaggcatcctctttatcggggaagatttggatgtgcttttggggctgtgtgaccggctgatggtgatccatgacggagagctgatggggatcgtggacccccaagaggtgaccaaggaggatgtgggcctgttgatgctgggccattcgatggaagaggtgaaggcatgctgaacatcgtaaaaaaagaggagccgtccaaaaagcgggagctggcgacccggctgctggccgttgtggcggcgctgggcgcaacggcaatcatcatggtgtttttggggctgaatccctttgaagtgtatgccaagatgatcgaaggagcgacgggcacggcctatcgttttcaggagaccatcaataagaccattccgctggtgatcctctcgctgggcattgcggtggcctttaagatgaaattttggaacattggcgcagaggggcagttttacatgggcgcgtttggggcggcctgggtggcattcagctttccggaggcgccggcgctattgctgattcccatgatgctgctggcaggctttttatgcggcggcctatgggcgatgattccggcgctgctgaaagcaaaatggcatacgagcgaaacgctggtgacgctgatgatgaactacatcgccaccacatggatcacctatctgcaatatgggccgtggaaagatcccaaggggggcggatttccccgcatgccgtatttttcggacaacgctgtgctgccggaggtatttggcatccatatcggatggatcattgcgctgctgctggtgggcgtggtatatgtgctttttaagcagagcaagctgggctatgagattgccgtggtgggcgaaagcgacacaacggcgcgctatgcagggatgagccccaccaaggtgatgctgatcgcgattttgatttccggcggcctatgcggcattgcgggcacggtgcaggcttccggcattgagcattcgttgaccaaccagctttccggcggattgggctttacagccatcatcaccacatggctgagcaagctgtctgcgccggccatcgtcatcgtatcgctgctgtttgccattttgctgcagggcggcgattatattcagacggctttacaggtttcctcttcgctggcagacttgatacaggggaccattctgttctttgtgctgggaagtgagtttttcctaaactatcggtttgtgcgcaagcacaaggcgcagcaggaggtgtaagaagatgggttggataacagcaacggccttatttttgcagatttccgtgcagatgggaacacccatccttttcggtacgctgggcggtatcctaggagagaaaacaggcaacctgaacctgggcgtggagggcatgatgatcatgggcgccgcggtggggttcaaagtggcgctggtgacggccaacccgtggctggctgtgctggcggccggcattgcgggcgcgctgggcgcgctgatctattgcatcgtcacggtgacgtttaagggcaaccagacggtgaccggcttggcgctgacgatttttggcaccgggtttgcgggcatgctgggcaaatccatgtccggggtaagcctgccgcagccggttttggatacgtttgctgcctacgatgtgcccggattgagcaagatcccgattttgggagaagcattttttcagcagagcatctatgtacagattgcgccgattttggcggtgctgatctattttttcatcaaaaagacgaggattgggctgaatatgcgcgccgtaggcgagaacccggcggccgcggacgcctcgggcatcaacgtaaaccgctataaatacctgagcttattggcgggcggttttttgtgcggggtaggcggcgcatacctgtcactggtgtttgtgccgagctggcaggacaacatcacaaacggcctgggatggattgcggtggcgctggtcattttctccacctggaacccggccaaggcgatctttggcgcgtatttgttcggcgcgctgcgcgggctgggctacaagctgcaaaatgtggcgatctcgctgtttgggctgcagtttaccattccttcccagctgttggatatggtgccgtatgcggcgacgatcctggtgctggtcatcattacgatgcggaaaaagcgggaaaaccagccgccggcttcgctgagcacttcgtactttagagaggaacgataacggatacacaaaaaggcatccattttggatgccttttgtttacgtccaaagcgggctttgacgcaaaaaacgcgttgggaatgcgttattcctcggcctttaagcgttcgttttcctcttttttgatttcgatttccgcatggagagcgtccaactgttcacagatttggcgcacttcatcggaattggtgttgtcttgcttgtatgcttcgtaatacttattgccaagctccatcaacagagattttttttgatcctccaatttcatgacggaggctttgattttgcctctttccacgagcttgccgctttcaccggccacggtgttggcgccctttacgatggtatccttcattttcgaaaaaaaatcattggccatgacaagatcctcctctatgctgattccaaacatgtcaagtatagcatctgggcgccagcagagacaaggggatttcctgcatgctatactaaaaaagaaagggggagagaagatgaaaaagcagagcgttacatttgcttccggcaatgggcaggattccatttgcggttattggtatgagccggaggggccggtgcgcgcggtattgcagatctcccatgggatgtgtgaatacatcgaacgatatgagccgtttatcgagtatatgacagaacgaggggttgccgtatgcggaaacgaccacctagggcatggcaaggccacgcgggcgcttgggcactttgccgaaaaaaacggacgggcgtatttggttcgcgatctatacagcatgaccgaacgggccaaagagcgctgggccggcgcgccgtattttttgctggggcacagcatgggttcctttgtggcgcggcagtacacagtgaaatatggatgggcgctggacggcgtaatttacatgggcaccagcggcaaaaacccactggactgggccggcattgcgctgacgaatatgctgggcgtatgcaaagggaaaaaagcgcggagccggctgatcgacaagctggcctttggcagctataacaagcgcatcgaaaaaccgatgggagaggacgactggctttccagggatgtagaggtggtacgggcctatggcaaagaccctttgtgcaaatttacctttaccattggcgcgtaccatgagctgtttaaactgctgcgcggcgtttccggcaaagggtgggcacagcaggtgccgcagaggctgccgattttgctgatcagcggcgaggcggacccggtgggccagtatggcaagggggtaaggcaggtagcagggtggctgcgccaaacagggcatgaggatgtgtcgcttgttctttacccgggcgcgcggcacgaggtgctgaacgaaacgaaccgggcggaggcctaccaagacgtagccgcctggatggaggatcggatgcagtaaacgagaaaaaggaccggcaaagccggcccttttttgctggagggggttagatgctgtcttggcgaatggtttccacaatgctttgctttctcattttgcgcgtggcataccacatggtggcaaagatgaggaggaatacccccaagaccgcgccgagatactgcatccaaggcagggtaaaggggaaagaaaaactctgggcaaacaggcggtacatcagatagctgatgccgatgctgacgggcagcgcatacaagagggccttgacgccgtagaaaaagctttcaaagcggagcatgcggcccatggcgcgctttgtcatccctacggactggagcatggcaaactcctttttgcggagctgcatattggtagagatggtattgagcaccgaggtgacggagatcagcatcatcagcgtgataaagccgtagcagaagatggaaatgatgaacagcacccgctcgttttccgctaccatagcggcaaggctgtatacgttgagaccgctgcgctccttccccaggacgggatgctccgccatccaggcgtcaaaagcttctgtatcgttggcggtaagatagagcgagaaggggaggggttcgcttttaagcgattggcaaagagaacggtactcgctttccgaacagagggcggagatgctggttgaggaggggaaaacagcagagggcagcgtttgcagcgcgccaatgacattgacatctgcggaaacatagccatcggcagtatagacgtcctccccgttttccacagtatggatctcgttccagctgaacagggtcagcggccggggcagcgcagaggggttgacgccgttaaactggtgcatcttgccttcttcatctcggaactcaaaggggctgaccagtaccaggccgctgcggtccggagaggaaaggccctggccggccagcaacgcatcatactctgcatcgggaagcgcgtacaggctcatataccagacctcacaccccagctccgaatcatagccgatatactgattttcccggaagagggaaagtgtctgcggggtgaacagcgcttcatccagcttaaaggaaaaaccgtcggttgcgcgcagcacggcgctgtccagataggcgttggactgcacatcgtcatagacctccaatagcgcttgggcggatcgctcggtgccgttggaggagatgatataatcataatccgcagtttgtagctgcatattggccgccacattcatatagtccacaaagctggaaaagctgagaaacatgacaaggctgataaacagcgaaaagatggtggtacggtaacgcttgcgattgcgctgcatctgcttgagcgccaagttggcctcgaagccaaagacacgctgcgtaagccggttggcgtgtacacggccggcggatttgatgtcctgcgtggtgcgtatggcctcgatgggggaggttttggaggcgcgcttggccggcagatagacggacaatgcgatggtaaccgcggcgataacggcagccagtagggttaatgtgggggatacgtgtagcgtcagcgcgagttggccgggggtattgaatagatccagcagcagggactggacaagcttcagcgtgatcccgatgccgccgattccaaggccgatgccaaggggaatgccgatggcgccgacggtgagcccttcgagccagacagatttgcggatctgcttttgcgtggcccccacagaggccaaaaggccaaactgcgctttgcgctccgtcgcggagattgcaaaggcgttgtagatcacggagacggagccaagcataatcagcgcgatgacgatcacggccagagaggtaaaggtcagatcggtatcgttgctggcaaagctgccgtaataggcgagaaggccggcgttatagttggtatgctcttctgttatgcctaaggactgcgccagaccgggaatcagatgataggcattggaaggatgcgccaaggaaagataggcattgacgggggtatcctgcgcaagggcggcagaatttagcgccgtaatgccaatatagctggcggaattgtacgattctgtgcccatgcgctcgattacgcctaccaccgtataggttttattgactggggaggcgatgctttcgccctctacatagcgcatattggcggataaaggctcgccatccagcgtacgctggccgagagagagcgtgatggtctgcccgacggaaacggatacgccgccattggtaatcaggtgttgtggaagggcgatctcattgggagtttgcggcaggcggccctctacgaggtggacgggcaaaagagcctccgcggcctcgtctagggccatgacatagatatagggtttctctgggttttcggttttgatgttattgcaaccccccatggcatacgaagtgcccacggaagaaacctcggcgttggcttgtagctgaggcaccttttcatagggcatagcggaaaagctgacatgataggcgccggaggaatattcatcgcactccatcagataattgcgaaagcttccgattagcgtggagacggcgcagatcatcgctgtgcacagtatgacgccgatgatggtgacccaggtacggcgtttgttgctccatagatgcttttgcgttaagcgggagatgatgctcatggacgattcacctcatcgctgacgatgcgcccgtcctcgatgcgcaggatacggtccgcctttagggcgatattggtatcgtgcgtgatgatgataacggtctgctgatacatactgttcgagattttcaataggtcgatgatttcctgggaatttttgctgtccaggttgccggtgggctcatccgccagcacaatggctgggttggcaataagtgcccggccgatggaaacgcgctgctgttggccgccggatagttggttgggtagatggtttaggcggttttccaggcccagcgtatgcatcagctggctgagctgggttttgtccggcttttggccatccagcagcagaggcaacgtgatgttttcctctacattcagcacaggcagcaggttgtagaactgatagatcagccctacctggcgccggcggaatacggccagattgctttcattgagggcatagatgtcctcaccgtcaatcagtacgcggccggaggtggggcggtccacaccgcccaagagatggagcagcgtgctctttcccgaaccggagggccccacgatggccaagaactgtccctttgggacctcaaagtttacattgtccaacgcggtgacctgggcgctgcccttgccgtagaccttggtcaaattttccacttttacgatgctcatgcgttttgatcgctccttccaaggtctaccatacccaatgggggtgtctggcaagtgacggagaagatgacagttttgtcatgttatacaacgccgtggtacaggcgaatggaaaaccggctgccgcgccccggccggcttttgacatcgacgatgccgccgtttttttcaatgatggatttggacagcgctaagccgatgccgacgctgtccggcgaggcgtttttgccgcggtaaaagcgctcaaacagatgggggaggtcttcaggatctatgccttcaccggtatcctcgatacaaagctcggtatatagggggttgccttcggcggagacggtaacggtgccgccgggcggggtatgttcaacacagtttttcaggatattgccaacagtctccgtcatccaaaagaggtcgccggtaaagcagacgttgaactggcctttggcctggtagcgtatttgtcgctgctgcatcagcggatagagcggcagaaggcaatgctccatcagggattggcagctgacggtcttacgttccatcgtaatggtgccgctgtctagcttggagagctttagcagcgcgtctaccagccatttgatgcggctgatctgcgcggtgaggcgttggagaaataccgtgcgctgggcttcgtctaagggctgttccagcagaagatccgtcagcattgtcatagaggtaatgggggttttgatttgatgggaaatatccgagatggcgcgggagagcgccgtgcgctcgtttcgggagcgttcggcgtcgtggtacagggtgcgggcgactttgacggactcattggagagatagccaaggtctccctcctggcaatccagcagtgcggcggcgggctcgtcgcgggcggctttttgcagataccaggtgatatggcggatcttgcggaagatcttggcaaggcagactaggccggctgtacagaacagcacaaaacagccgccagcatacagccaaaaggaaacgggcacggacagcggccgagcggaggtgtagttgtacttggccagcacggcgcgcccggcttctaacgtggcaggatcgggctgcttggtaaactgacggacaatggaaagctcctgttccggatgggcctgcaccaaagcacctactgcggcagcatcgtgatcggccaaaatggcttgggtatggcgttggatctgccagctaaaaaacaagcccatgacacacaagaggcataggcttgctagcatccatagcaaataggatctgatttcaggatttttgaaaaagcgcatgattttttatccttccattcgatagcctaggccgcgaaccgtggcaatcagcggctgggcagcatcggtatcgccgatcttttcgcgcaggcggcgcacatagacggagagggtattatcctccacaaaagcgccgtccacatcccaaagcgcttccatcaggcggctgcgggtaagcacctggccgggatgccgcataaaggcgagcagcagacggtattccatagcggtgagaaagagctcctcttcctggcggtataccttggcttggtctggatacaggcgcagagggcctacctgcagcatgttggtggccagcgattggccgcggcgcagcactgccttgacgcgggccagcagctcgcgtaggcgaaacggctttgtgatatagtcatcagcgcccagctccaagcccatgacggcgctcatttcctcttcatgaacggtgagaaagatgatggaggttgcgggcgaagcttgcttgatctgcttgcagagcgcataaccatcgccatccggcaggttgatatccaaaatggcgagatggaatgcatgggaagaaagcgcctgccgggcctctgagatgcgtgcgcaggcggtaacggtatatccttcctggcatagggcaaattccagccccatggcaatggtttggtcatcctcgaccaataggatcttggcagagtccataggagttccccctccttttgagaaaacgaagcaaaaaggcgtaccggacaggtacgcctgacaagctgtaaaaaggcaaagcggctgcgctgcctgacaagcattctatcataaacagagcgcatccacaagcaagactagcgaagggaaaaggggcatccgcagtagcgctgccggtagagcccgtattggcgggataaggcaagcgaacgctggtagccgccgcgctttttgaaatccgcaaacaaaaagcggcaggattccgtttgcagggccgccccgatttcattgaggagcgcggcgtttttatgagggctgacggacagggtcgtagtaaaaaaatcaaatccatgcgcagccgccgttt

SEQ ID NO: 1390 - DNA, 5037 bp, Unknown
  16S sequences of unknown bacteria
aaaccgatttttcttgcaagattggcaagaatttcaattttatcggaaaccttgtttattcgagaggaagggataattctcttcttcttgcggctcacatggacgagcccggaatcattgcaacgtcgataaaatcaaacggaagaataaagtttgacgcaatcggcggcattaagcccgagtccgttttcggaaaaagagtcagtttcggcggagttttcggaacggtcgaatgtgttccgcctcatcttctgtcgggagaaaatctcggaaaaattccgaacatttccgacatgacggttgacataggctgcgacacaaagaaacagaccgaaaggtatgttaaaggcggggactgcgccgctttaatgtcagaattgcgtgaattcgggcaagatagattttgctgcaaggggctttcaaggcttttttcctgcgccgtgcttatttatctcataaacaacacggaattttctgcggattttctttttgcggttaaaaacgaagcgggatttgcgggtgcaaaggcggcggccttcggaaaaaactattcatcggcaattgtcttttcggcggccgaaagccttgactgcgtctcaaaggacgagcaaaaggccggctgttttttgggaaaaggcgcggcggttgcctttaagggcaaaaacatcttttttgaccgtgaatattataacggcatttttgaaattgccgaacaaaacggaatcaagctgcagcaaatgaaggcatgcggccttcaaacggctgccgaggtgcttcaaacctcgggcggagggatgagggttctgcctgtactgcttcctgtcagaaacttcggaactgcaaacgagacggccgacaaaaccgatctcgaaagcgcaaagagcattgcaaggcttttttgcgaaaaatataaatttggagaatgaaaatgaacaagtttttttcagtggacaagcgtctcgacgccattgccgatgaggtgagaaacgagcttaagacgatttttgccgaaatagacgaaacaaccgagtataaccagcaaaaaatgctgtccgcttttatcaaaaacggcgtgagcgagtcgcattttgccgcctcgacgggatacggatatgacgacaggggaagggaaacccttgagcgcgttttcgccgacgcaatgggcgcggaggattcgcttatccgccacaattttgtttcgggaacccacaccctgaccgttgcacttttcggagtgcttcgcccgggagataccgtactttgtgttacggggactccctatgacaccattcaatttgctttcggaataaaggatgcgcccggttctcttaaagaattcggcgtaaaatatgagcaaatcgaccttaaagacgaaagaccagatcttgacgccataaaaacaaggcttgaaaagcagccggtcaagatggtatacatacagcgttcaagaggctattcgctgcgcccttcgctttttgtttctgacattgaaaaaatcgtcaaagccgttcgagaggtggataaaaaggccgttattatggttgacaactgctacggcgagtttgtggaaaagagagagcccctttcggtgggagccgaccttattgcaggttcgcttataaaaaatcccggcggcggaattgctccgaccggcggatatattgcgggcagagccgaccttgtggagctttgcgccaacagacttaacgcaccgggagtgggaaaggagcttggagcaaccctcggccattccaaggagctttttatgggaattttcaacgctccccacgtcaccggagaggccttaaagaccgccgcatttgccgcgggacttttttcccgtctcggattttcggtgactccgactcaaaacgaaaaaagagccgacatcattcaggtcgtccgtctcgaaagggaggacgctcttatcgcgttttgcaagggcatgcaaaagggtgcgcccgttgattcttttgtcactcccgagccttccgatatgcccggatatgactgcaaagttatcatggcggcgggagcctttcatctcggagcttccatagaactttcctccgacgcgccgcttcgcgagcccttcgccgtttggatgcagggcggtctgaatttccacagcgcgggaatgggagtgcttttggcggctcagtcctgtctcgaacagggtgttttcactttggatgataaataaaatctttcgctttggctttttgccaaggcgattttttatttaatgtcttaaaaaaattcggtatataacactttgacttatagacatattgaccgttttgtgatataataattctaaattttacttgtatgaggtgtagttttggcgcgcaagaaatggatagtcaaaaacgccgataaggctcttgcgaaagagcttgccgaggaatgcggaataaatcagcttgtgtcgcttattttgctttcccgcggcatgaccgacccggtggacatcgacgaatttttgaccgatgagctgtatttttccgaccccttcgatcttcccgatatggaaaaggccgtcgaaagaatcgaacaagccaaacaaaataaggaaagaattgccgtttgcggggattatgacgccgacggtgtgactgcctctgccattttatatacatatctgaaggataacggatatgatgttgtctgcagtattccgaaacgcctcgaaagcggctacggactgcataacgacaccgtcgacgaactgcacgaaagcggagttaagcttattgtgacggtggacaacggaataagcgccgccgaagaaatagattatgccaaaagtctcggaatagacacggtggtgaccgaccaccacctgcccggcgaaaggctgccgagggccgaggcgattgtagacgcccatttgcccgattcattttgtgaattccgcgactatgcgggagtcggcgttgcgtatatgcttgtgtgcgctcttgaacgctgcccttgcgaggatatgcttgaaaaattcggcgatcttgcggcgctcggtacggtggcggatatggttccgctgctttcggaaaaccgcgctattgtaaaggccggtctgtcggttctcaaccgcagaaaaagaccggggctgtgcgagcttataaagctgacggctatcggagacaaaaaaatcgacgccaccaacattgctttcacaattgccccccgcataaatgccgcgggacgtatgggaaacagtattcgcgctttcgagcttcttattgaaaatgactccgagcgcgccgccgagcttgccaaggaaatatatgacgaaaacgatctccgcaagtccaccgaaagcggcataacagaaagtgccgtcaaacagataatagaaaaaaggctttatgacaataatttcattgtggtttacggtgaaggttggcacaacggagtgctcggaattgtcgcggcaaagcttgtcgagcgtttcggaaagccgactgcggttttgtcggtcgaaggcgatattgcccgcggctcggcaaggagtattgaagggtttgatctgtttgaaggattgagcagctgctcagatacgcttattcagctcggagggcataaaatggctgcgggactgaccgtttgcaccgataaaatcggtgaatttgaaaaagccataaacaaatatgcctgtgagcttgaaatgctgcccgttccgacgataactcttgactgcagattgaatcccctcggcgccacgcttaacactcttgacgcaaccgagtgccttgctccctacggctgcggaaacgccgagccgattttcgggcttatgggaatgacggtttatgccgttcatcctctcggagccaagggaaacaccttgaaaatcacccttaaaagagatgatttgcttcttgtttgtcttaaattcggacagtccatgaaggactttccgttccgtgcgggcgataaggttgacgttgccgtaaatctcaaggaaaacgtatacaagggaacgagaggcattaccgttcttgtcaaggatataaggccgtcgggagaggatgaggacgcctttttcggcgacaggagcatttatgaaaagtttgtctccgcaggcgggctttcagcggagcaggccgagaaaattctgccgacgagagaggatatggcggaggttttccgttatctgcgcggtcacagcggatttagattttcttatgaaatgctttggtaccgactcggctttcgtccgagcttcggcaaaatgatgatatgtcttgacgttatgaccgaattcggtttcataacaagggattatgacggaaagaactgtgtaattacccttgcggacaagatgcagaaaaacaattttgacaattccttaatcataaaaaagctaaaggacaggattttaaatggctgaatataaatccaagcgtaatgatcttttaaaggctgttgccgaaaatgataaatacgatcaaaagctgataaaaaaggctctcgattttgccaccgaatatcacgacggccagttcagacattcgggagagccctatatcgagcacccaataaatgtcgccctgattcttgtgggactgggtatggacaatcagtcgattgtggccgcccttcttcatgacataatcgaggacaccgaagtgacctatgaaacggtggaacagcttttcggctccgaggttgcaaagcttgtggacggtgtcacaaagctcggtaaaatcccttattattcaagagaggagcagcaggccgaaaatttaagaaaaatgtttctcgccatgtcggaggatgtgcgggtaatcattatcaagcttgccgaccgactgcacaatatgcggacgatcgaaagccacaatcctcaaaagcggcttgacatttccaaggaaacgcttgaggtttatgctcccattgcccaccgcctcggtatcagagggataaaggaagagcttgaggatctttgtatccgccagcttgacccggtggcctatgccgaaatcctcggcaatttggacgagcgcaagaccgagcgaaccgagtttataa

SEQ ID NO: 1391 - DNA, 10148 bp, Unknown
  16S sequences of unknown bacteria
cctggcatgatccagctcggcggccacgagggcaaagctggaacccataccccctattccgccgccgacaatgtgaacggttttaggattttgtgtcttttttatgtaatgcttatcccattgcatcatttcggcatttacggcacatcttgcaagatgaaggctgtcggaaagtgactggtcgttgggaacgcccttgtagtggcacatattgaagcaaccgttgtgacacagaatacacggacgtatatcctcgtttttatcgttcataagctttgttacccaagccgggtctgcaaggaactgacgggcaaatcccgcgccgtcaagctttccttccgaaacggcccgagccgcaacctcggggtcaagccgtccggcacataccacgggaatgtccacaaaattctttatgtgctcaacatcggcaagattgcagttctcgggcatataaacgggaggatgagcccaataccatgcgtcatatgttccgttatcacagttaaggcaatcatatcccgcgtcctgaagatattttgccgccttttccgactcttccatatcgcggccggcttcgacataatcctctccgggcagcgctcccttacggaagcctttggtttttgaaatgacgctataacggagcgaaacggggaaatcatctccgcagaccgccttaatcgcctttacgatttcaacgggaaaacggtatctgttttcaaaggagccgccgtattcgtcggttcttttgttgacatatttcagcgtgaactggtcgagaagatagccctcatgcacggcgtgaatttccacaccgtccaccccggcgtccttaagcatttttgcacattttgcaaaggcgtccacaaattcctttatttcggccaccgtcatttcccttgagggaaccttgtccgaccaacggttgggcgaggggcttgccgttgcggttattttgtccaaattcatgaagggcttgctgacagcgcggagaaacttgtttgtgtaaagggtctccatcatggagcttatggtgaaggaacgcccgaaacccgcggtaagctgaacaaaaagctttgcaccggttttatgaaattccggcatccactttttaagatcctcatacatttttttgtttttataaagccattgtccgaacatgggattgtataccggctgacatcccggcatgacaagcccggcattgttttttgcaacctcaagaataaatcttgcgccgtccttatcaaaatggttcttttccatccagccgaaaaggtcggttccgcccatgctcgtcagaacgattcggtttttgatttcacaattgccgattttccacggcgtgaaaagcggatttaacttctcattcattgtatttcctccgtactttcaaatttccttcttcggaaaatccgatttaagaaatcggtttacgactttattatacatcttccaaagcaaaaatacaagaagtaaatatttttgttcgaatttaacaaattgcaacgacaaaacattttagacagcggcaaaacctgcctccgaataatgctcacttgctttttttgccgattagtgatataatacacagactgtgattgacacaatgtttttcctacattttaatgaacagcggtgtaaatatgaaaaataatatatataaaatttctgccattataattgctgcgctttttgccgtatcgtgttcaaagccggccgaaactcctcccgcctcatccgagacggagaaggtatctcaggttaaagagatttggaacatagaccccgagctttattggagcttttccgacctttacgattactcggaaatcaaaggaatatcgggcgaaattacccttgacgctcaaaagggcgaaacacttcgtctttttgatgaaagccaatcggaaattaccgattattccgcccgtataaaggacggacaaacacttaaaaagtttgataaagacggaaatgtcgttaaggaaacggagctcaaaatgcccgatgtcacggtttccgacagcacttcctcagctgccgttaccgatgacgctcccgtttcagaaaagcaaactatctcgatacttgttccgtcgggctgcaacggtataaaatcagccgccgcggaatatgaaaagaaacacgccgacacagacattaaaataatcgagaaggattttaagcaatatgcctcggttgtaaattatctttccgatttgaaggagaaaaatgatcttcccgatttgataatgctcgaccaaaagtacctttcctcggcttattcggcgggtttagtaacctctttaaatgaatttgagtcccgtgacgatttcaagcagttcacttcgacctgcattgagggaatgatgatttccgattcggtatgcgctctgcccattgaagcaaccgtttcctgctttatttcaaatcccgatatactttcctcctgcggtcttgatatgccgaaaagctatgatgagcttgtcgactcctgcgaaaaaatcaagacctataccgaccaggttttccctctcggaatttcctcaaacgatgagaattttgacgatctttcgtctcttttcctcagttatctttggtcaaccgaccgcactttcaccgacggttcttcggcggctttttcctccgacgattggaacggctttatggaatatataaacggtcttaattcgaaggggcttatttcaaaggattattccccttcacagatgctttacggaaaaaccgccttcggctttaccgaaagctcatactataaaaacacattcggaacatcggccaaatataattttgactgccattcctttgccgaagtgttcggaaaaaattatatttcgcaaatgaagctgtcgggcattgccgttgtttcaaacgaggataacgaaaaggaaaaatcggcttacgattttgcaaaattctttgcgtcaaacaaggaatatacagtccaaaactgcatttcgagaagcaccgttcccacccttatctcggcacagtcgtcggaaaaatttgccgatggggtttggaaaacatatataagtgagcttgacagttcaagatgcctttcctccgacgtttcaaatgatttgtatatgcgttatgtttttgacgccgtcatcgcaagccttgagcaggattccgatatttcggctcaggccgagctgcttaaatcccgcataaacgcaagactgtcaagataatttttcacaacatttcggcacaaacgctctttataatttatcgaaaaacaaattccgacaataaatttgtatagtttaaataaattcattctttattttatgaataattgttgacacattatgaattgtagtgtataatatttctaacgtttggagacttcaatgcaaaagaacgattttaaaggaaaagaccccgaaccgtcggacgaacagctcgccgtgtccgccgccaaaggcgacgacgctgctttgaccgttctcaccgtcagatatatgcccattgttgccggccgcgccttgggatatttttccgacggatatgattccgacgaccttattcaggagggaatgatcggccttataaaggcaatcagaagtttttctcccgaaaaaggcgcctcctttcacaccttcgctctcctttgcatcgaccgcaacatcatttcggcggttcgtatgtccctttcggcaaaaagaatccccccttcctccctgttatacatcgatcaaagcgacgacgacagtcccgacgccgaaagtctgttgtatgaccgaaagccaaatcccgaggacgccattataagcaaggacacggtcgagcggataaacgcccggctttccggtctgctttcaaagacggaatttgaggttttcgagctttatcttaagggctgctcctatgacaccattgccgagcgcctttcgataagcagaaaatcggttgacaatgcggtctgccgtgcgaaggggaagcttaaaaactatattcggctttttgaggacaagtatgatatgccccagtagcttaagcagagcgttgttatcaaaggtgtcggtgcaaatccgtccgcgggcaaaataatttcaagcgaggttaaaaaaatgtttgaagacaaaaccctaatctgcaaggaatgcggttccgaattcgtgtttaccgccggtgagcaggaattctacgaggccaaaggtttcgttaacgagccgcagcgctgcaaagcctgccgcgacgcccgtaagaacgctgcaagaggagaaagacagatgttcaccgcaacctgcgcatcctgcggagcagaggccaaggttcccttccagccccgcgaagaccgtcctgtttattgcagcgactgctttgccaaaatgaaggaagaacaggaataattttttctgttaatgaggagcggaaaaagttttctgtaatccaaaaacataaacagccggagaaaaactccggctgttttttttaataataaaattcggataaatcctatcttgtcgcttttgaaataaatccgtcaaggtcgttgagagaaaagacatatttgtttccgcaaaagctgcataccgtttccaccggctcaccctcgtttttaaggtcttgcagctcttttttcccgagagaaatcatgattttctcatatctttccctgctgcaattgcacttaaactcggtatgcgtctcgtcaagaatatcatattcaatgccttcaaaaacggtatttattatgtctgacggcgttttgccgtccttgatcatgcgggaaacggaagaaatatttttaagattattttcgattttatcaattattccctcgtcggcgcccggcaaaagctgaacaagaaatccgccggcgcccgtacatttgaaatttttgtccacaagcacaccgagggcgcaggccgtgggaacctgttcgctttttgcgtaataatcggtaatgtcctcggcaatttcgccgctttcgatgggacacattccgattgtcggctcttcaaatcccaaatcacggataacgtaaagggttcctccgccgacggcgcctcccacgtccagctttccgaggctgtttggggcgagctcgaccgacggcttttcaacgtagcctctcacattcccctgccagtcgctcacgcagcatattcctccgcagggtccgtcgcacttaaactgaactgtcagggtatttccctcgtttttcagcatcgagcccataagcgacgttgccgtcagcgcacgaccgagagcggcggtcattgtgagagaggttcgatgaatttcggcggctctgtttactatttcggtcgaatcacatgccattatacaggcgcttccgtctcttgatattgctcttataagatttttattttccataaatgttgtcaatcctttaaatatatgctatactccattatatatgaaaaagcaaatatgtcaaggaagggatagcatgatagaaaagcttgcaaaggcggcaagagacaacaatcttaacgtatattttataaccgaaatcaaggacggcaatagcacgaccgagaaaattgttcccgcaaacgattgcaacgatatatattcaatttcaaaggcgataacctccacggcgctgggggtgctttacgacgagggaaaaatttctcttgaggataacatatacggattttttgccgacgattatccgaatataagcgaagtgtggaaaaatgtcactctccacaatgttttgactcacacaacggggatcaaagagcctttcctcgatgttgacgcacccgtcaacataatcgacgccgaaggctgtgacgattatctgaatatcgcgcttgaacatgttcccgaaaatacccccggtgagcaatggaattacagcgactcaaattattacattatctcacgcgttatcgaaaaggtgtcgggaagagaactggaagattttctttttgagcgttttttcagaccaatgaaatttcagtcggcgggcttcgcaaaatgccctcacggtcactcgatgggcgcaaccggcctgtttttgagcacatgggatcttgcaaaattcgggcaaatgtgtcttgacggcggtatttgggagggcaaacgtcttgtaagcaaggaatggctcgatatatccacaagctgccaaagagagctccccaacgacggattctacggatttggattttccggcagcaaagacaaaacctttaccatatccggcggaatgtacgggcagacccttttcttttcccgaaagcatcgatatgtcatagcatggacctgccacgatgaaaacggcagcacgggaattttgactaaaattttggaggaaaacgaataatgaaaagaatcggcatgatggtagccgtggaaatagaggctgttctgtcgaaatacggacagcccgaaagatgcgaagaatgctgcggttttgaagtgatgaaatatgactgcaagggctatgagctgctcattgtaaaaagcggagagggtgaaattgccgccgcagccgcaacgcagcacctgatttcaaaatacggtgtaaacttgatcgtcaacttcggcgttgtgggaggtctgacccccgagatgagcaaggcaaagacctgcattgtcgaaagagttgttcactatcagtttgacatttcggaaatcgacccggtcaaggtcggtcaacattcgggttatgacgacatatatatttatcccgatgccgagctttttaaaaaggcggttgcccttcaccccgagcttaaggcggtcacctgcgcctcgggagaccgtttcgtcggaaaggccgaggataaaataaagctgcatgaggattttgacgccgatatttgcgaaatggaggcggcagcagtcgctctcacctgtgaccgaagcggtatcccctgtcttattttgaaaaccgtttccgacggcataaccggcggtgcagaggaatttattgccgaggtcgaccgttcggccgacatctgtcttgaaatcacggacagaattataaacagtatataaaataaaaagctgtgagcacataaaactcacagctttatttttttattttataagtgttccagcattgtcgccggtatatgtgtcgccctgataatagaaatacgaatcgaaaatatcacgggtgacctgagcgatattggagccgtaaccgcccttttccacaaccgtcacaacggcaatttcgggattttcataaggggcaaaggcaataaaaacgccgttgttgtattcctgtcccttgtcaacaacggtggccgtacccgtttttccgcccaccttcaaggcatagtttgcaaatgcggtcgacgcggtacccgccgattcggtggtaaccgaaagcattccctgttttaccacgtcgatatactgttcgtcaattcccaccgtgtccataacctccggttcgaccgacgaaacaacactattcatgttatagttgcaaatttccttaacaagtcttgcgcggtatcttgtgccgccgttggcaagagttgcacagtaggttgcaagctgaagaggtgtaaatccgttgtccgactgaccgattgcagcctgcagcgtgtcacctgcgttccatacgcttccgatggaatcgcggtattccttacccgcaagaattcccgccgcctcgtcgatttcaatacccgactttacgccaagtccgaaccgtctgcaaaattcgttcagcttttcaattccgattctgcgtccggtctcataaaagaaatagttacacgacacctttatcgccgtcgtgacgtttatatcgccgtcatagtgcagacaggttggctgatagtcgcggtagtaggtgtatacacgggagcagaaaattgtctcgctcggagtaatcgcgccgacctgaagtccgattgatgcggtggcgggcttaaaggtggagccgggggcgtaaacaccgctgaaggcgcggttaaacagcggatttgagctgtcggaaagaaggctgtcatacgagttgttgtatgtatcaatgtcatacgagggatatgtggcggcggcaagcacctcgccggtgttgacctttacggccacaacggcgccggcatttgcatactgcccgtccttcgtgccgcgaagggaatcaatcatatttttaagggaattttgagccgtttcctgcatttttttgtcgattgtcaaaacaaccgaatttcccggttgcggttcggtggaaacagagctcgaaacaatctttcccgacgagtcgcggacggttttggtatatcccgatttgccgcggagctgatcctcgcaggccttttcgatgccggattttcctatggagtcgtcaaacgaatatcctttgtccttaagctcgtcccattcctcggcataaataagacccatgttaccgagaatgtggggagcaaggtcgcccgaaacatattctcttgtgctgtcgatttcggtttcgacacccgaaaggttggaatatgcctccttgatttttgtgaccgtgtcgatggaaacgccctcggcaaaggtataaggaattgcgtcggaataatcggccacaagcattgtcagccttattcccattatcatacgctttgttgcgtcgtcgtaatccgacagcttgtatttctccaccatggcgtcccagcagttctgagccgtggcataatgcgcaaggccaagctcggatttcatagtgtcggaggaaatacttctgttatcctcaaattcatacggagcggattttgtcagcggacatttatccttccatgtttctcccgttgaggtaagcagtcccgtcatggcaagaatcgtgtcattcaaatcggaatccttcagataaagtcgattgaaaacaatgttatagctgtccttgttttgaacgagcggacgcccgtatcggtcataaatttctcctcgagcggcgtttatggtggtatacgtcgccacgttggcaatggactgagcttcgtatttatccttatgaataagctgccaatccacaagccgtacggaataaagcaaaatcacggcggcgagtattccgcttaacacggcaatacggcggccggaattatccttttgttttctcacaaacacccctcctttatttaaagtcctttggaaagctttttacacaaaaaataccacggaataataaaaatccacgaatataacgtcgtgagcaaaaatctgtttcttaaaaaccacattccttcggccgaaaaaccgccgcgaaagcaaagaaggcaaacaaaattatacagcacaaggcacacaagacaaagaataatcgccgaaacaagatttttggtcagcaaaagtcttgccacaagaccgcaggcgcagccgatgaaaagcataaaaagcgcatttatcggaaagcccggacttgtataaaggtccaaaagaattcccgaaaagaggccgaaaaagccccctgccgtttcaccgaaaaagaaggaaaccgcaacggcaagagcgacaagcatattgggcgtgacttcgcttacggtgagtatcgaatagggcacgttttgtataaaaaacagcacaaggccgacggcgcaaagtatcgccatccgacctataaatgcgtgatttttcttttttacgggttttatatctgtgttcattttattcggtaataccctgtccttcaaattcggttataatcataacttgggaaattgacaaaaaatcaaccgccgggtccacctcggcaaagagggaaactcctcccgtttcggttccgatttcttccacggttccgacgataattccctcgggaaaaactccgcccacccccgatgtaataaggtaatcccccattgcgaccgaggaatttcggctcaaataggaaagccgtgtttttcccttgccggaaagcgattcgcttcccgcaaggattcccgtttctcttgttcggctgtcaatcacaccgacgttgagattgggcgaaagaacggtttcgacgaccgaataggtggcctgaacctccgaaacataacccacaagcccgtcggcggttataaccgggtcatgaacagaaacgccgcgaagagagccggaattcacggtgaaggttccggttgaatttatgttgtccgccgcaacaacggtggaattttcaaatttaaagtcgctgtttttttcct

SEQ ID NO: 1392 - DNA, 7130 bp, Unknown
  16S sequences of unknown bacteria
ccgccataccttcctgccgcatcacttccaaatctttttggaaaagcactccacaatcctgccgcatgccatccatgcagctgagcaccgtaccctgcgcatccaaaaacatgccaaaagccaaaaaaggacacgcctgaatcactctccggagctgttcttccagcgcagcagtatccctccgcgccaaggccgtcggcattccctccatctcgtcgacccaagaaatggccacatgcatctgttcccgacgcgctttcaggagttcctgtgcagaataggacgccgtttccaaatagcgcacagcagaattggtcagcatgttattgaataccacgttggacaccaacgtggcaatcaccattgccaccagaaccatggacgatgcaaatacgatcagcttctgcttaatcgtcatggcatctgcctcccttcggcctttgattatggctctttgcgcaggtcacggcacagcagcaccagctgcacacggtctttcacctgcaatttgcggaaaatattactcacatgggttttcactgttttttcactgatgtaaagttcctgcgcgatcaccttattggattcgccctccagaatatgtgacacgacaacggcttcccgccggctcaggcggtattgcagcatcagctgcgcctccagcggactctcccgttcttcttgttcctgcgaggctttcaaatcggtgatgctctccgtcatttcgaaaatgttggccgccagattggcaatctgcatcagctttttcccttccgccagcggcacctcaaagcgtacataccgctcgctttccccaccttcggtgcgcaccacgcctccgaaaaaagcggcgacgatttcgccctccattctaatcgggcaaaaaaacgcctgcacccctgcatagcaggtttccaaaatcgttttcccgcgctggcacattttctgcaaggcgcgcgttctctgcatgctgcagtgcgcgccttccttggccgacaaataatgacacaacagcgattcattagaccaaacggtcatcgcattgcccgacagagacagaacacaggcactgatctcaaaggccgatgcaaaatcgtcctgaaaagactgcacacgctctttccccacggcattgagccacttcgcggccaattccggttccttccccctcattctctccacctctttttgcatgcaggccctctgcgggcatgctccaaaccaaagaaaggctccctgctttccatccgctcaggcagcggatcctttctaagtttatattataacaaaaagcccaaaagatgtgaacatctatcgggctttttattataatgttacaaaatattattaaggtgttttcaatgggcgcacagaataaatcacatcggtatccacatagcatgcgattcctgcatccaggtaaagctgctgcagcgaatagaggtcttctttcgttaaattcggttgatcgcgatacacatactccagtcccagctgctcccatttggatgttcccattcggtgaaacggcagcaagttaatctcgaaaaagccgacttctttcataaatgcaattgtggcccgggcgttttccgcagaatcattgaatccggggatgatcggcgtgcgcagaatgatgcgtcctttccatccgctggttttcaacgcccggagattcttcagaatccgctcgttgctgacgccggttttctcttcgtgcttctgaggatccatgtgtttgagatccacaaaagcaaaatcaatgtaggagagcacgtgcaggaaaaccgcctcttcagcatatccttccgtttcaatcgccgtgtggatctggtgctttttgcactcttccagcacctttaccaggaattcccactgcaccagcgggtcgccgccgccgaaagtcacgccgccgttgccctgccaaaatacacggtcccgccggatgacttccatcagctcttctacggtgtactctttcccggaaatgcgcagcgcctcataattgcacacccgggtgcaggcaaattctgtgcagtccatgcacttgacccgctggatctgcggcagccccgatttctggttcattgtaattgctccctggggacaggccgtcatacaccggctgcaatggttctgaatcgctttgcagcgtcctttggtgtacatcaggttatgctttttccgcatcccctcgggattggcacaccattggcaccgcagcgggcagccgctcaggaacaccagtgtcctggccccgggaccatcatgaacagaaaatccctgaatatcaaaaatcaaacctgtttgtgacgtaggtcctcacctcgcaatcccccgcagcagcatatcatctgtcttacacccgatccgttatccatcgctgcgctgttccatctcccggatcttcttgggcagcgtgagggcaaagaaagccgaaaggccgaacataaccagcgccataataaacgacacccgatagctgccgaacacgacatacaatctcgcgcccagatagctgcccagtgcagggccgatgcccatgataatcaatgtggccagaccccagatcttcgggaaactcgggccgaacacagaacccatgtagccggtgacctgcgcaggcattccctgccagtacatggcaaagaacacgcaggccagaatggtgatcgccagggaatggatgcccagcagcagacaggccatacccagcaggccgcaggccggggccacgaacatcagccggcggcgggcaaccgtttcattgccgactctgccggcgtacttatccgacagcgtgcccagcagcggcgcaaaaatgcagcccaaaacaccgaggaacgcatacaaattggtactgactcccatgctcatgccagcatccttgacccaatagctgaccaactgagaccagatcaggaactccgagaagcacgagcagaagaacgccaggatggatccccacaccacataggttttaaaagcttccttcaccgtccaaacacggggcggagcacccttggccgcgccgccgatgatctcgcccttaggcttcataccataggtggcaggcggctttttcgttaggatcgtcgccaccgccagcagcaccagcgccaccaccgccagcatccgcatgccgatgcgccagtccatcgtcaaaagcaccgctttaagtcccagggttagaatcacctgagccacacaggcgccggctgcggcaaacccgaacgctttgccgtacgcatttccgataaaccagctgcgcaccgtggacgtagctggcacaaacagcataccggtagccacgccggcaaacagcgcgtacggcaccagataggccagaaagctcccggcaaaactcgttacaaaataccccaggaaaccggcgatcgtgccaacgccgaaacagaatttggcgccgtatttggtgaaaaacattccggaaaaataggatgttaccgcatatagcagcatcatgatagagtaaccggaggtaacctgtgcagcatcccagcccatatccgtggtcatgggcgtcagcagaacagagaatgcgctccgatatccaaagaatacaaagtacgccaaaaatgccgccacaacaaccagaagcccactgcgggtgctatccttttcagacataatcctctctcctttctggaaaaggggcggctttgccgcccctttcaaaacctgctgcggactgctccgttattcttttgcctgatatccttcacaggtctttgcattcaaatcggcataggcccagtattccttctccaatcctttgcagatgcccatttcctcttcattcggatcacagaaatgaacacaattccggcatttcggtgccgccgcaaactgcgggcaagtatcgctgtcaatcattaccatgcctccatttgcccggcacaggcccttgaacgcatccaacggtgtgaaattcttgcaatcgctgtgtttcataatcatacccctccttcaaattcggtgcgggcaatcacttcatcctgcaccggcttgccggtttcgacccagtactgcgtaaacccggacacacgcaccagcaggtcgcggtaggcatccggatgcttctgcgcatctttgagcatcttggaatcaacaatattaaactgaacatggaaaccgccctggtccatataggagcggatcagcgccagcagcttcttgctgccgtcaatccccttgaccgcattgggatggaacttcatattcatctggctgttctgggatttgctctgatcccagcagcagctggaagccatcagggcataggggccgttgcggtccgttccggggtatgcggacatggaaccatccgccagcgccgtattgcacaggcggccgtcaggcgtcgcgcaggtcgccattccaaccgcggcatgcagcgccaccgaaatctggcaggcatacatgggcttggcatacagggactgatactggttgcaaaggtcacagaaccaatcctcgtattccaccaggatctcttcggtcatcttctctccgttgccgtgcttaggcgctttcaggcagtcgccgtggatctcgtcaaactgtgtgacatcaggctttttcacctgctcgcccagcgaatatgccttggactccatggccgtatagaatccgaaattgtttcggatcgcctcacggaagtcttccagtgtatacttcttctgctcatacaccaactgcttgagggcagccagcgaattgaccatattgatggtgccgcaggactcaatattatatgtagcattatatcgtgttcccatatggccgatatgatgccccttcgtcaaacagtccggcttcatgatcgagttgacaatggacatattgcggtcgcgccacacatcgtgctcgatattgtttgcgcggacggaaacatcaaggatcatggcataataggctttatattgctcccacaactcctcataggtgttcagttccttattgtgaggcggaagtacctgaataccggttctcggatctacaccgttgaacagaaccacattgagcaccttggggttatccaggaagtgaacgcccaccgaagtagtctggctggatccggtcgggatgtaatgcgtttttccgttgaaatgcagcggcatccaggatgcgggcgccgtttccagacagccgccgatggccacagcccgagcctcttccacggtcattccctcatcgccatactggttcagcaggaactccatagcaccgcggttgttcatccaggcagggtatcccgtaccgatctttgtgcactccacacacttgagcaggaactcttccggcagccgctcgtcgaaaagcaccgaaagcgtaggctgcggacagggatttgtcatgcccgcatgcaggatgagccattccaggcgattgccacagggtcggccgttcttctgcaggccgcccagagacaagttgttgaaggtgttgccggaaatgccgccggaaataccggtactggcaaacaattcaatagcactgaatttgaagcgatggttctccagcagttccagcacttcctcttccgtaattgtcccgtcagcaatatctttttcaaaatacggatacagtacttgacccagccggccgggcgaatagccggatattgcatcctcgttcaaaacggtgacgtgaatgaggtaagtcatgtgcagcgcttcgcggaaattccgcggcggattatgggcgatccattccatctgatcggccagctgcagatattccgccctctgtgcctcatcccgctcttcttccgccaggctctgcagttctttgacataattgagccagaactgctggataccacccagaacaatgcgggctgcttcatagaagtacaggcgtttcatgccgaggatcccgtccccgccggcattacctgccacttcaccgcggcgttcctggcacatggcgatcatcttatccaggccatattccaacggataatagtaactggcaatctcacgcccctgggggatggtataaccgctgtcacagaacaccaggacggttttcataatgtcgtccttcattttgaagtccggcatcaggcgttcataatgcaatcccagatcttcgacggattttcctttccactcatgggccagtttggtcataaccggcacttcttcggcgcggatgccaaatttgcccgccagcgaaatgatcttgccgttgtttttgaccacattgccgccgccggttcccaactgtgccatctcgtcaataacggccgaggtgtttttggcctgttccttgaattcatcctctttggccaaatagaaagagttggtcagccagggcattggaaatcctccgcgcagataactggtcttcccgcccggaagcaggtcctttgggtaaacagtgggcgtcgtatgcgcataagcgcaggccagcgcctttgcacggcgcacttccagcacatcgccgtcgcattcctcaaactttctggtataccaataggggaattcggtgttcgccgtggaaaaactctggtaaaacaggctgtccatcagccactttgtgcgggctttcggttcgagtttgatttcccggtccaccacaccgtcccagctttcatcctggggcgcaccatacacaaaacctgtggacaggccctgttccgccaagatttcttccagtctctttcctgttacagcatctgccatgttcatttggcctcctttttgttaaattcaaacaatctgtactccttaccgtctgtctttattgtacagatctttcaccacacccgccatcgagcacgagatgtattttcgggctgactctttttgttctgtttcgttctgatccccgttctacaactttagtctgaattttcctccctgggataaaccgcgggccatacgccagctgccttcctctatgttccggcatccttatttcacctggaacagaaaagcatctcttcgtttcttcagtcaaaaattttccgagctgcctaaaggatctctccgttttttatttactctgcacaaaaattagaaacatgattgacagattcatgtgtaattggtatgataaagaacaattacaatggattatttctctcttgacaagaatatcgc

SEQ ID NO: 1393 - DNA, 32759 bp, Unknown
  16S sequences of unknown bacteria
gcgtcgtcgcgggctttgctccatgtcgggtcgctatccctatgggataggcaaccctccaacgctccgccgctcctcctttccccagcgggccttgcgtcccgccggggaccccataccaaaacacacttggggctgtgccccaagacccccttgccgctaagctgcggctggatacgctctcaaggtgcctgcggcgcatttgatttggatgcagcagaaaccgaattaaaataaacaccttataagcgtcgtctagccccagatccgggaggtcgtagaccttccggtcggggcgtaccggcgcgtcgggggtctcggggttctccccgagtgacttttggttacttttcttcatagaaaagtaacccctcgccggggagacgtacagtttatgcctttgcaaaaggcaccgcgacgcctttaggcgagataaaactaccaccatagttttgggcggcaacccctcagtcagccttacggctgccagctccccttacacagggaagcctttcggttggggcgacgctctccctttacgcaagggaggctttgggcatgaaaaggcccctgggcgttggccgccgcaggggtcgtttttaatagaatttaacctaaatggaccgcgttctcatccacccagccgtagataccggagccgtcctctgaaaccaggtggaaggggtgggcggcgccctccgcatagaaggtgacccggcaggtgctggtgccctcaaactggcgggcaggttcggtgctgcgggaggaggcatagactgcgccgccagtgaaggtgacgcggctatccaccccaatgaccgtcaagccgctttcgctgcttttccggcccagctcagccaggatctgctccgcggcctccagcagggagagattgtggacctgggcctgctgactgttggaaagctcccgataggccaagcgagcgatcaaaaccttgatcgaatcggcgctggtgaccggctgcggcagagcgtctatcagggcttccacctccgcggcggtggggccgtggggctgggaatccgatacggcaggctgttcgatggcgggctggccaataacaggcagggtaactacgccgccgatggccagcactgtggtgatgatggcaatcaaggccaggaggcccagtgcgatatacaggatatgttttttcattttgaccatgatgctcccctaccgcgccgccgggcggcgctgctgctctctttattatgcgagtgggccaagccactgggcggctaaaaaatgggaagatggcaaggcgcggccgatggcatactcatgcccggcgcaagacgggctgttgtatggcgaggacgcaacgcagccagggcccattttttagggccgtctaaatgcctatgcagtgattataacagatggggcgggatttagcaacctgagaaaagagaagcgcccgccgagtggcaggcgctcctcctcacaagagagacaaatatgaaagagtataggacattaatcgggatcaataatgtacggtggtctccttgggcttggtttccgcgaccagcttaccattgcggtaagaatacagcacggatacatcgtagttgagggcatcataccagtttttcgcatcgaatacgacaaagttggcagcgttgccttccttgatgccgtaggcatcgcccagatgcagggtacgggccgcattggtggtaacgaacttgtaggagttgcagatctcatcgtagcccagcatatggccggcatacagacccatgaagacggggtcacgcatatttccgttgcccagggggttccacggatcaaagatatcatcgtaaccgaaggatacattgatgccctcagcggtcagctctttgacgcgggtcatgctgcggcgcttgggataagtatcggcacggccgcccaggtgaacattcacgcagggattggcaacaaagttcatgccgctcatcttcaggatgcgcatcagacgaataacataagcgttattgtagctgtgcatggcagtggtgtgggaagcggtgaccatatcgcgcattccggtctcgtaggcacgggtggcaacagtctccagaccacgggaagcctcatcgtcgatctcatcgcagtgaacatcgatgagcttattgtacttctgagccagatcgaagcaaatgttaagggactcaacagagtactcacgggtgaactcgaagtgagggatagcaccggcagcgtcggcgcccatcttcaaggcgtcttccagcagctctttgcccttgggatagctgaggataccatactgggggaaggcgacgatctggatatccatgaaatccttgacttcgtcgcgcagttccagcagcgcttccatagcggtcagcttgggatcgttgatatcaacatgggtacgaacatgctggataccattggatgcctgcatacggatggccttattgacgcgatccttaacttcctgcttggtgaggaagggcttatactcttcccagcactggatgccttcaaacagagtgccgctcatgttccagcggggacggccggcggtgaggcaggtatccaggtggacatgggactcgatgacggggggcagggccagcttgccgccgcaatcaataacttcttcgccggggagggcttcgagactggcggcgatcttttcgaacttaccgtcggtcacacggatatcaaccgcttcggttgcgttttcgatgaacagattcttaaaaagcatgggtttcactcctccttgagagataatattgcattttcagacggagcttacttgttggcgccggtcagctcgccaatgaagaagaagatggcggatacgaccatcgcattaacggctgcgataccccagtgcaggaagtttgcaacagcggcagcggcgatgatgccgagcacattgaaccagttgacaacagcctcagtgtgcttgccctcatacttactgcggttcttgaagtagtcgaggatcacgatcatgccgatgggaggcagagcgcagttcagaatgttcagccagccgacgaagttgtagtacagccagatagccagggcggtgccgatgatgccggcaacccaggtgaggtgcttcatgggcttaccggtgatgttggcaaggcccagaccgccggtgtacagagcgttattgttggtggtccagatgttggcgcccagaacgatgagggcggggattgccagaccctgtgcgatcattacatagaagatatcctctttgccggtgaaagcaccgccgatggcgccgaagcagaacatcagggtgttgcccaggaagaaggcgataacggtggtccagacagcaaccttacggttcttggcaaagcgaatgaagttgggggtggcggtaccgccggagatgaaggagccgataacatagccgacaccggtgaacagggagatcttaccggaagacaggccgaagatggcagaaaggccgccgccctctacgcctgcggtgatcatggaataaacaccgaggataacgatgagcggaacggagatataagcaacgatctccagacccttcatgccggtagccgcggtagcggtcataagcagaccggcgatgatggtgagaacccactcattgacaccgagcagctcggcagcgggaatggagaacatggcaacgcctacgccgaaccaaccgatctgggtgaagcccagcaggaaggaggacaggtaggagcccttggtaccgaatgcgcgacggcacagcaggtccatggtcatgccggtggaagcaccgatgaatgccagaacgccgcagtaggcggaaaggataacaccgccgatgatgcacgcccagatgaagccggagagatcgaggccgttaccgagcttggcgccgacgctcatgctggcgctgaagaaggtaaagcctaccattacgaagaacatgttccagaagcctttgcgtgccgactcgggtactgcttccagagaatagtcagcatcgactttttcgactgcttttgcagccttggtgttttcagacattgtgaaaaacctcctcaaagttgttcagaagccggccctctatgtaaccggtttcatctgacatgttcatcatagcacgccctaacggcctttgtccacccccttttgcacgatttggtgacaaaaataactggatttccttgtgaaaagtgccgaatctgcgaaaccgattacatggattttgacggtttgtgcaattttctttgcaaaatataggctgatatgctataattagtgccgaaaagagagaatgtaaccggttatatgccggaccggcggaaagaggtgaggctgccatcaatataaaagaagtagccaaagcggcgggtgtttcggtagcgaccatcagccgggtgctgaaccacccggagcaggtgcagcccgaaaccaagacccatgtgctggcggtgatggaaagcctgaattatcaccccaactggtttgcgcgcgggctgaacctgggcaaaaccagcaccatagcgctgctggtgccaaacatagaaagccggcgctaccgggagattatgtccggtgtggagacggtagccctgaaaaagcagcacattgtgatgctgtgcaatacccatgccagcccggaggaagaggctgagtacctaaaaatggtggtgggccggcaggtggacgggctgattctggcatcctccgtgatggggcaggagcagcgcaacgccctgctgggtcccaacctgccctgggtgcacatcgggccgggtgagccgggattatgcaggaacctctgctatataaattatgaggaaggcgcctatcaaatgacaacccatttgataaaaatggggcaaaaggaaattacgctgctgctggatgaggcaccgctggtggaaatgaggcagatcacagccggttaccggcgggccctgcgggagctgctacccgacgcagaagagcagatcctgacggagcaggacaccccgcggggcgggtatctcatcacccagcggctgctgcagaacgataccctgcccagggccatgatcaccgcgagcagcggacaggccagcggcgtgctgaaagccctgcaggatgagaaaatcctggtgccggagcgcatggcactggcctgcctttccgattcctcgacctgcgccatcctggagccgccgctgacggcgctggaatcgcccagccgaagactggggatggtggcggcccgcatgctctttgataacatagaggacaacggcgaagagggcataggcccgcaggaagttattttgcagcccaaattgaagatccgccggagctgcggcaataccaagcccatttatgagctgtttggatgaaaggaaacgaatgggggtaaacgcaatgtcattgagtaccgagtatatgggactgaagctgaaaaatcccatcgtggtggcggcggggccgtggtcccgcgatggcgcttcgatccagcgatccatagatgccggggccagcgccgtggtgaccgaaaccatcacgctggaggccaaccaaaaccccagcccccggctgtacctaagcggcagcgggcagctattcaacacaacgctgttttccggcattcacctggagcagtgggagcaggaatttgagtcactgcggcgcggcgactgcaagctcatcgcgagcatatggggcaacacccccagcgagctggcctacctggccggcaaggtggagcggatgggcgccgatgccgtggaggtgagtctttccgcgccgctgggaacccgcatggatgtgggcaccgtgccgcgagagatcttcggctttatttccgcggtgaccgaggcggtggatatccccgtttcggtaaagctgagctatgaggcctctaatttcaacggatttacttcctcgctggaggaggccggtgtgagcggagtgaccgccatagacgccctgaaggggctgatgggcgtggacctggagcaccaccgggcgctgatgcccacctacggcggatacagcggacagtacatccggcccatagcgctggcgaccattgccaccctaaagcagacgaccgggtttcccatctgcggctgcggcgggatcaactccgcccacgatgccctggaatttatcatgctgggggcccaaagcgtacagctggccagcgtactgctgcgggacagctacgaagcgatcccacgcatcctgggtgacctggaacggtggttggaggaccatgggtattattccatcgaggaagtgtgcgggctggcgctgggctctctgcaggcctttgaggagctgccgccccgtcccctgacggcccacctgaccggcggctgcgacggctgcggcaagtgtgtgagcagctgcctgtacggcgctatgacaatggaggcggggaaaatagtactggatgcggcacgctgcaccggctgcggcatgtgcgaggccatctgccccgagaacgcgctggagctgcggtggtaaaaaagagcggcggcatagaaaaatcggggagggcaatgccgcggcgaaagcaggcttatgcccggcgcaagacgggctgatgcctggtgagccaaggcacagccatcgccgatttttacagccgccggactctctgaaggaaatataatataagcccccgattgaataaagccgggggctttgctgcggggcggggagggctctcccctgccctattgcagattgacgaccggcgacagaaatggtatgatgagaaaaagggggaacgcccccgaaaaacatgaaaaggagctgtatctcattatgatgtatcccaacgccacccatggcctagagcgagtgtatcaatctcaggtcattgcactggttgccgctgtactgatgatcattccggtcatcaatatgctggccgcaatcgcgctgattgtttctctggtgctgtatatgatcggcattaacgaggcgggaaaggacgacgaaaactacaagaccgcctttaccttgattatcgtgcagctggtcatcagcgtgctgaattccctcatcggcggcgttatttttgatctggtgaatgaggcactggcactggcggtgctgtactttgtatgcatcaccaccaacaaactgctgaagaacatcggcgcggatggacgtattaccgaccgcggcgtagtggtttggaagatcaatgtcatctgcaccatcgtggaggtggtatgcactctgctggcgctgatccccagtgcttccctgcagctgctggcggccgttgtgacactggtgacggccatcgcgcaaatcgtaggatccatcctgtatatcctgtacctgcgggatgccaccacggcgctgaaatccattggcggaccggcagcggatgtatatgtaggaccggagctgtaaacaccatttggcaataaaggcactagcaccctcccctgctgtgggagggtgcttttttgcggaattgacggtataggcgttatatgttacaattaaattgtatgtggaaacatgaattttagtaaaaaaggagatgtgtatgatgacttatcccaatgccgcagcaggactgaaaacggtgtaccaagccagactggtagggttgatctccattgtgctggtgatcgtccccattgtacagattttcgcgatagctgccatactggtggcggcttttctatccctggtggggttagcccagtgccgcaaggacgataaaggctaccgcaccgcttttaatctggtcattattgggctggtcacaaacctggctgccagcctggtttctgcttatgccggcaccgaagggatagcaggtatttgcggcaatattctatcgatggctgacgatattttatcgctggcttcgctgtactttgtatgcattaccaccaatcgcctactgaaagaaacggctgctgcggaaaatctgattgaccgcggcatcgtggtgtggaagctgaatgtggtgtgtactgttattcttcttgtgtgttatctgctgcggatgatccatggcaacatcgcagtcatcattgccgggtatcttgcgatcttcgccgtaatcgcccaaatcattggcacggtgctgtatatcctgtatctgcgcaatgcttaccgggctttggaagcggcggttccgccggaggaacaggtacagcaaatgatgtaatgatgtaatatataaatcgcataatacaaattgtatattaaggaagatgaaaagagccgcccatatgggcggctcctatttttgtgcgattacaggatgtgggtggcgttggcatcaaagtggacaaagcagttttcgccttgggcaaagatgcgcttattcttggggttgtactcggtgagcttgacgagagtctcacccacacggacatggtagttctgataggaacccatgaagcagctgacttcgaccttgcagggcagaccgcgatcctcggtgagggtggcggattccggacggagcaccatggtgacctcctccccaaccgaaacggggcgggtagcttccacatgggcggtttcgccctcgatggccagtgtggcggtattgccctccaaagccagcaccttgccgcgcaggaagttcgcttcgccaatgaaatccgcaacaaattccgaaacggggtggaaataaatttcctgcggggtgccgatctgcgcaacgacgcccttattcataatgatgatctgatccgacagggccatggcctcagactgatcgtgggtgacataaatggcggtgatgccgacctcctgttggatgcggcggatctcagtacgcatggaaacacgcagcttggcatccaggttggagaggggttcatcaaagagcaggacaccgggttccaccaccaaagcacgtgccagggccacacgctgctgctggccgccggaaagctggttggtcatgcggccttccatgccggtgagctccaccagatcgaggatgcgcatgactttttcacgaatctcctccttggggaggtggcgcagcttaaggccataggcaacattatcgaacacattatagtgaggcagcagagcgtagctctggaacaccatggcggtatcgcgcttattgggggtcagctcattgatgggctcgccgccgaggtagatctcgccggcatcggggctttcaaagcccgcgatcatgcgcagcgtggtggtcttgccgcagccggagggacccagcagggtgacaaagctgcccggcgcaatatcgagattggcatcatggacggcgtagaagtccttgccggttttaggatcttgatagatcttggagatattttcgaggcggacgccttttttcactttttccatcagtcagtgacctcctttattttcttgctggtgccgaagtgcttaatgaaggtattcatgagcaggacggagccataggtgatgatgataaggatggtggcaaaggcacaggccaggccatagctgcccttttcggcgaactcgttgatctgcacggtgatgagcaggaactgcggcgtgaccagcagaatgatggcggaaatggcagtaatgctgcgcacgaacgaggtgaccaaaccgctgaagaaggaatccttgataagggggagagtgacggtggtgaacaccttgccgctgcccgcacccagatcataggcggattcctcgatgcttttatcgatctgccgtagggcggaaataccgctgcgggtaccggtgggcaggctgcgcacaatgaacacgatgaccaaaatggcaccggtgccatacaacccctgcatcaagccggtatggaagataccattggcaaagccgcggatatagccgacacccagtacggtgccgggcaccgccatggccagcatggaggcaaactcgataaagcccttggtcttgaagttctttttgaccaccaggtagctgatgatcatggagagcagcgaggtaatgggcgccgcgatgagcgacaggacaaaggaatcggtgaaggcctgcaggccgtgatagcgggtgaatacacgctcgaaccatttgaaggtgaggtggaaatcatagccccaggtattgaagagagcgccgaagggcacgcagatatacatgaggatgacgaaaatggcgatagcactgcacagcacggtaagcggtacccgaacgctcttatcggtgatgagcatgcgggcccggctggccttgccggtgagggtggctgctgttttgcgctcaaggtagtacttctgtaccaggaacatgatgaaggtaatggacaggagcaccacggccatggccgccgcgccgatcttatcgtaggcaccggtgatttgcaggtagatggtggtggccaaggtatcgtagctgccgccgatgatcatggggttggcgaaatcggcgatggattcaatgaaggacacgaggaaggcattgccgaggccgggcagcatgagcggcagggtaacactggtgaataccttccagcgggaggcgcccatatcacgggcggcctcctccaggctggggtcgatatttttgagcaggccgcggagcataaggtagcagaccgggaagaaggtcatggtctgtacgatgacgatgccccagaagccatagacgctgttatcgtaaatatgcagcaggtaacgggtgatgatgcccgacttaccgaacagcataatgatggacaaggacagaacaaaggggggcgagacgaccggcagcatggaaactaccttgaataggccgcccatgaatttaccgcggaccttgacatacacttcgacataggcgaacagcaggccgataagggcggagccgatgcctaccataaagccgaccttgagggtattgccaatggcggtgcggaaggtccacatatcaaagatacgcttgaaaacagagagggtgaagcctcccccatcgggagagataaagctatccaccagcaggatggccagcggataaatgataaacagagtgaggaacgcaatcaatacgacgacggtagtgaccatgatgggatcggcaaagagctttttgcgatccagcgcggcgccttgtcgttttgtcatgtggcttcctcctttcgctgaaaaaatgaggggagctgcggaaaaaaggtgagggggacggctttgcccaccgtcccccttttcattctactgaatgttcagttgtgatgcgggtggaaattattcagtctgcagtctggaaacggtcatccgcagcagcaccaagagcctcaaagatatcggagatgtactgggtggtgttctgcttggcatcctcgaagtcataatccataacattggtgggatccaggccgaactcagtagcagcctcgggctgggtggcgttatcaattaccaggaactgataggagccggtgctggcagcctggttgacgcactcgggagagagggcgtactcgatgaacagcttggcagcattggggtgcttggtgcccttgaagatggcggtagcgccgatctcgaaggaagtgccggaggacggaatgatcagggagatgttcttatagccattatcgaggatctgggtaataccatcatgcaggaagccgatgccgatgacgcactcaccggagccaacattcttggaggggccggagccgctcttggtgtaaacttcgatgttcttatcgaggtcaaccagatacttgatgccctcatcgtggccgtacatctggatcatggtattgaggaccagcttggcagtaccggcagtattgtagttggacatccagacgaggcccttatactcttccttgagcagatcgggccagtccttgggggcttccagacccatgcgggtcagctcatcggtattgaccatgaagcccaggataccctggtagataccataccagtaaccatcggcatcgcgatacatgggcttgagcaggtgcttggcgttggtggcctcataggcttccagcagaccatccttggccatcatgttgtaaggatcggtggtgccgccgaaagcgacatcagcagagggattgccggcttcttcctggatcttggcctggatctcgccggtggacaggcgctgatgctttaccttgataccaaagatcttctcaaagctatcgcaggcagcggaaagatactcttcctcgcagccgccgtaaacggtgagctcaccctctgcctgagcagcagcgatgaggtcttccatcccggcaaagctctcgggataggtcttggcatcctgatcgttgtcattgttgttcttgtcgccgcagccgaccatcagggtgaggaccatgatgacagcaagcagcatagacagtgcttttttcatttttgtttctcctccattaactaaagtgtctttataattaccgcggatgcggaaattaccggccaatgacgccctcctgcttgcagacaggcaggagatcaccctaaggggattggggcttgttcctctttattatagacccctgtctaatgtttgtcaattatgacaatatagactattggaatgctatttatttggctattttgcaaaataattaggcaaaaagtgccgccctttacagaaaagagcggcacaagggggaaaattacagttttttgacggccccacggaaggcgagatccagcagaatgaccacggcagtgacgccgaggaacaccaggaacgccgtaacataggtaccggagccggtctggatggcgccgacaatggtagcaccaaaggaagcgggcagcatgctcatattggcgatgctgaaattggtgccgtaattttgggtaccgaagcaatcggccgtgacggtggaggtcatagtgggcatgccgccataggagaagccgatgagcagcaggccggccaccgccggaatggccccgccgccgcgcagagagaagagcagcagcaggcaggaaaggatgaagcagccgacatcggtgagcatggcgaaggtgttgccctttttatcaaacagggtgccgaatgccaaacggccaaggccattgcagaccgactgcagccccacgaccagtgccgtgatgccggtggccacaccggcttccaccgcgatgtagcgggaatggccgatgacgccggtgccaatcatattggaacagacgatgatgaagaacagcagccaaaaggcagcagtcttgaccatctggccggcggtgtattccctgcgggtgggagccgccgccgaaccggccggagcggccatttgaggattggggacgacccagcggctgccgatgagaaggacaaccagtgtggccgcgcccagcagcaggtaggcggtgcgccagcccatggcggaattgaagaggcgatcggcaagattgcccatgataagggtgctacagccgaagcccataagcagtacgccggaggcaaagccctttttatccgggaaccagcccaccacggtgccgaggacggcattgtaggagaagccgacgccaagaccgatgagcccgccgtaggaaatatacagcagccacaggctttgggcggtgatgcgggaacagaggaaatagcccaggaagcacatcaccgcgccaatgaggacggtaacacgggcggaaagcctgcgggtaacaaagctgccggccaggccgccgatgcagaagcaggacatgacgatggtgaaattgagacccagctgcgcgctggtccagccgaattccaccgggaagggcgaggagaggatactccaggcgtagatggtaccggtgaagaggaacatgatgcagcccgcagccagaatagcggcacgggtgggcagtttacgctcagccataaatatgcgcggtctcctctccaccgagtacacgcaggcagccatcggccagggcctgcatctcgttttcgccggggactaccacaaactcgccgaggaagccggcgtaatccttgaccatctcacagaaggacttggaataagcgatgccgccggtgagaacaaaataatcgaccttgcccttgacgaggacggccaagcgggccagcccacgggcaacgcccagggccatagcctcataaacgagatgggcatcgtgatcgccctcttcggccatcttttccaccacacggctatcggaggtgccgaaatagctggtgagaccgccctgacgctgcaggagcttcatcgtgccgttataatccagcttatccttttcaattttacgaaccatcagataatcggggatcaggccggcacgctccgggctgaagggcccttcgtcatcggagacgatatcgataatgcggccattgctgtgcaggctgagggtgatgccgccacccaggtgagcgaccgcgacattgctggaatagtagtccacgcccttttcgcggcagaccttcatggcagcggcgcgcatattaaggttgtgggcctggccgacacggcggacatccttgaggccggtcaagcgaaccagctccacaagttcatcaacggtgacggggtcatagatataagccttgacgccagcttcattggcgatatcataggcgatagcgcagcccaggttggaggcgtggtgattgataggccgctcccggagggcttcgataagggcgggagtgacctcgtaagcgccggaggaaatggtggtaactgcgccggtctcctcattgacataggagggcagcaggccgccgcgggctacaacaccatccagctcggtgaccttttcgccatgggcggccagggcaccccggaccagcttggtgcgcatatccttctgatcatagatcacggcatattttttgatctcggcggcatcgtgctcgatgctctccttccagacctgctccccatcatggtagaaggcgatcttggtggaggtggagccgggattgatgacaagaatctttttcatgggagatatcctcttttcttctgcgattatttgttcagtccggccatcaggcagcccagcgcgatggagcacagcttggtttcatcgttatcggcacggctgcacatgacaatgggagtatcggtaccgacgatgacgccggcggccttggcgcccaggatatcgcccagggtcttacccatgatgttgccggcttcaatattgggaacgatgaagatatcggcatcaccggcgacttcggacttgaagcccttgacctcggcgcagtgggcagaaaccgccagatccatggcgatggggccttccaccaggacattggggccgaattcaccggcttcgcccagcttcttcagctcagcggcatccacagtggcgggcatcttggggttgaccttttccttggcacagagcacagcgaccttgggattttcgatctccagggccttggcgaccggcaggcagtttttgatgaggccgatcttctgctccagggtgggatacagcaccataccgccatcgctggtgagcatgagtttatgataggcacccagagtatcgaaggtcataacatggctgagcaggccgtggaccggcagaccggtctccttattgagaatggctttgaggaagatgttggtatccacaaggcccttcatgaggaaatcggctttgcccaggcgaaccagctcgacagccttggcgcaggcttcgaccatatcatcggcctggaccagctcggcgttccggaaggtgacgccctcctccttcattacacgctcgatagtggggatatcaccgacgagaacggggcggatcataccggcctcctcggcagcggccatggccttgatggtatccacatcctgcgcggcggcgccggccagcaccatcggctcgccctgctttgctttttccagcatctgttcaaaagaaacgatcattgagagtccctcctgatattttttaggatcgcccgctatgggcagtgttttccacctactattataggaaagggaaattagcctgtgaaatgcaccatttgaatgactgttattccaccctaaggaatgactatcattccaaaacagcatttcctttttacatgtggaaggtgtatcataaactcatcggaagtctcctggagcgggagagttccggataggatttgaaccgtttcctcatacttctccttatttggttttccggggtgccacacttttttgtcaagacactacgacctcccaatgtcgatcgtcacttttacatggcacacccctcccctgccgggcattctcccccggcaggggattcctctatatatggataaatctttttgcggaaaatgcataaaaggtatttgtcgtttgcagaaaattatgatagaatgaatgtatacagcattgaatgcatcttctaaaaagcccaaaatcggaggtatgccatcatgacaatttttcagttggaatgcttttgcgccctggccgattccttgaactttacccaaacggccaacgccatgtttataacccagcctgcgcttagccgggctatttcctcgctggaacaggaactacagctgaccctgctgcagcgcaccacccacagcgtgaccctgaccccggccggcaaaatcttctccagcgagtgccacaaaatgctgaaggaattccagcgcggcagcgaacgggcacgctctgcccaggctggccagataggcagcgtgcgcatcggcttccagcgggataactttgagacctacattgtggacttcgtgaacctgttccgccgcagccacacggatatcaccctggagctgctgccgctaagcgtcaacgagctgaacaacgccctgcaggagaagatagcggacgcggtgatctccggcggcccccctgccaatgagtccatccgcagtctgatgatagccaacctgccggaatgtgtggcgctgccgctggaccatccttacgccaataatgacattctggatatgcgcgacttgaagaacgagaagtttatcgccatggcgcgttccatttcctgctccggctttgaatccatcattcaaaaatcgctggcggcgggctttgaggcacagatcgtggcgcaggtggacctgctgcccaccctgatgaccatggtggcctgcggccaggggatctccattctgcaccgggacatgctgccgcgcagcaatgggcgtattgcatttgtgccgctgcgcagtgtttcctacttccgccgctggctgatgtgggacatcaacaacgataacccctgcctgcagccgctgatcgcgctgggacacaagtggcaggatgacctggaataccccgtagaataataaatagaacagaataaaatcccccggaaaagagccaaatgagcctttcccgggggatttttccgcgcaaaaaagcaacccggcgcaagacaaaatgccttgcgccggatgccggtattattctgaaaaagagaggataaaagaggacctatgagaattatttctgctcccgaccgatggcgaggcctttttcaaaggcttctttattgagcggcagcagcttgggctttttggccatcttgtgctcgatggtggaccaaacgacctcaggcgggacgacctcggtatagcctacatagacgcccagcatgataacattcagcaccttggcgttgcccatttccagggccatctcggtaacgggggccttgaccagcttgacatcatcacggccgatgtcatcgctgacgatggagctattgatgaacagggtgccgcccttcttcagggtgggcaggaacttcttaagggacggaccattcataacgatgaggtcatccatgacatcgcccagcggcgcgccgatctcctcatcggagatgacgacgaagcagttggcggtaccgccacgctgctcggcgccatagctggggaaaaaggttacattcttattggtagcatcacaggtggcagaggccaggaatttgcccagagtcataacaccctgaccgccgaagccggctacgcacagattagtttccatttatgcgcttctcctttcatcagcgatcgcggatcacacccagagggtattccggcagcattttttcttcaatgaacttcagagaatccagaggatccaggccccagttggtgggacagttggtgacgatctctaccatagagaagcccttgccgtccagctggttctggaaagctttgtggatggcctgcttggtcttgataacattttgaggggtattgcagctggtgcgcaccagataagcgggagcagtcagctgattgaggatttcgcacatatgcatgggatagccgtgctcctcagcaatacggcccttgggagcagtagaggccttcatcccgataagggtggtgggggccatctggccgccggtcataccgtagataccgttattgatgaagataacggtgatgttttcgccgcggttggcagcgtggatggactccgccatgccgatggaggcgaagtcgccatcgccctgataggtgaacaccagggtatcgggattggcgcgtttcatgccggtggccacggcgcaggcgcggccatggggcgcggtggtggtatcgtaggcgatataatccatgtgcagaccacagcagccgatgccgagaacgctggcagcgcgatcaacaaggttcatctcatccagcacttcgccgatgagcttgataacagtgctgtgcatacagccggggcagaaaccggaaactttatcctcctgaatggtttttgtccgcgaataaatcttttccattctttcccctcctttacttattcagcagcttttctactgcttctactacggcctcacggctcatgacattaccgccggagcacaggcaggtcttgatggggcagcggccgcgcacggcgtgatccacatcctctaccatctgggcgggaatggacatctcgacatcgagaatggcatggcaggtgccatagtccagtttatcaaaggcagccttggggaaggggtgaacggtgatgggacggatgagaccgaccttcttgccttcggcgcgcatcatctccactacggatttggcaatacggccggaaataccataagcggcgatgactacttcggcatcctcggtgcagtattcctctaccataacatccttttcccaggaagcatacagagcagcggcttcttcattgacgcactgcatcttattggtatcccactggccgggctcgatccaggagcggttgggcagatccagctcgtggccaatgcagacccatttcttcttgctctcacggatagcggcgacttcttcctcgcttttcatttcgggcagctctaccggctccatcatggtgccgataacgccatcggccagaatgaggacggggttgcggtcacggtcggccaggtcaaaagccttgtaggtcaggtccacagcttcctgcacggtggcgggagccagaacgatcatctcgaagccgccgttgccggaagccttggtggcctggaaataatcctgctgggcgggctgaatggcgcctacgccggggccgccgcgggagatattagcataaacgatggggatacgggcagcagcgcagtagctgatgccttcgctcttgagggcgatgccggggctggaggaagaggtcatggagcgggcaccaacggaagcggaaccgtaaaccatattgatagaagcgacctcggactcaccctggacaaagttaccgccaacttccggcaggcggcgggcaaaatactcgggaatttcgttctggggggtaatgggatagccggcaaagaaacgacagccggcacgaacagctgcttcggcgatcgcttcgcagcctttcatcaatactcttgccatagctttagtctccttttatttgtatacttcgatagcgccatccgggcagatgcgcgcgcacatacagcagccaatgcagtcatcattgaccggctccacatactcgtagcccttggaatttaccttagttcccagagccagaacattcttggggcagaacttgatgcaatactggcagcttttgcaccgctcggcaattacaacgacctttgccataccatgaaacctccttccggatacgaaatgataagtatttatcttttagcgcagggaactttctccctgcagccacggatacctgagatgcagctccagcgggagaaccggcagatcatcgggctcctcttctcctgcgtggagcggctgatagatggctgcgaactccatagtgcagtagggatccagcatttcgcgggtcttggccaaacccgcctcatactcctgccgggtggtaaacagcccattattgggattggccacaaatcggagcttgggcaactgcagatgagtcacttgcagaatcttactgagggtgccatcgatatgttcaatatcgcaggaccagggacggtaagcattgacgatataatagaccgctgtcttttcgcggttgagggccggagcatagccgcccaccgcccgcgcgccgatatcatcgccaccgacatccataacgacacagcatttgggatcccgcagcaggcggttgacgccgcccacctgggtcggtgcatccatgaactgcttttcaaagtggaagtggacgcccaaggcctccatctcttccgccaagtcacgagagcggaacaggggctttgtcatatccaaatcgaagaaatgcacgggtagcggctggcactgagccaggtgcgcggcgaggttcagagcaatctcgcttttgccgctgccggcttcacccagcagcacaaagtttttgtaattggcacagttctgttccaggtactctttccagcccatccaaaccagctcccctttcttctataaatggctgtttttacaccttccattttagtaacgattggatagtatgtgaaatgcaaagagtgtataagtgttatcacgccctaatttacaccgctttgttttggtgaacacgcagcaaagagaattggcaggaaaggtaaagtgccaatataataatatcggattattgattccgtaaaatagaattttcggaaatcttgagctatttcgcctaaaccctgtcgggcagggcggctccgccgggcagaaaaactgccaggtgggcctttcggtgctgtatgaggaatccatcctgcacctggccacagcgggacagtttattgtatgcaatgataaatacggcctgcccggcacagtacttcccgcctactgcaccgccgccggaaagctgttcctttcccagctggatgatgaaacgctggagacctgggagcacagccacaacctggtaccctataccgccaataccatcattgaccccgatgaactgctgaagcagattcaccaaacaagagagcgtgggtatggcattgtcatcagtaagctgtattactttgtggcctgcatctccattccagtcatcggccaggataatcgggtgctgggggcgctgaactttttcaccaagctggaacactttgatgccttgaacaatgagaagttcatctctgatgtaacaaacactattcgcagcgcccagttccactaaagcaataaaacacacgatcccccaccgggcactgtacccagcgggggatcacttcagtctgccgagaaacccagtacgcaatcaagtgcgggctgggggccttgacaaaaccgcgcccaccaaataaaaaagacgccatatggcgtcttttttatttggtgggtcttcagggactcgaaccctggaccaaccggttatgagccgggagctctgaccaactgagctaaagacccttagtaaaaaacgccgccgacaaaatgcacggcggcgttttggctccccctgtccggcttgaacggacgaccctgcggttaacagccgcatgctctaccgactgagctaaggaggaatatgaccgcagtatcgctactgcgggtgtcggcatcaacctattttcccgggccgcttccagccaagtatcttcggcgccaatgagcttaacttctgtgttcgggatgggaacaggtgggacctcatcgcaatcaacaccgactatggtgactcgtgcgggaatcgaacccgcgttaccggcgtgagaggccggtgtcttagccgcttgaccaacgagccatggtgctgaaataatcagcttttatattataaccagccatcgcccggttgtcaatacgctttctgccgtttccgcataaaaatttgcgcagcaaaaaagggagccttttcggctcccttgaatgcggttttatacggtgggggtaccacagtaagggcagaagttgccgcgcaccattttccggcacttggtgcagaagcgatcctccaggccatcgttgggggcaggcgctgcctgctgctggttctgctggcccaattgctgggcaatctgcgcgccaatggcgacttcggcacccaggccggctacaccgccgcccttttccataccatctgccgccgccacggtaacatacttgttggtatcggtgatgaaggactgtgccgccaccttttccgccatcttctccacctcgggcggatagctgacactaatgatattcacatcccgcacacccaggccgatatcaaagagctccttatccagctcctcagccatcttcttccccagggtgcggttattggcctgcaatcctaccaggacattaagtcccacggctcgctcgccattcaggatggattcggccacaatgccgctcatctcaccacggatacgctccgaaacatcactgagggaataggtatcccgaatcccggccaccttggaaataaaggccagatagtcccggaaatagatgaccatgttgccattcatacccaccgggatgccgctgggaacctccggggtgggaatcataatgcgctgggtggtgccccagttcagggtcatgtccttgctattgacaaagtaaacctccgcacgctcgccggtatcgctgcgcagatgcagcgccgcattgatgtgggtgaggaacggaatgatctgggtatcgatatcataggtgccctcattttcaaaaatgccgtggatacggccgccggagtagaagattgccttttgaccggcacgaatgaccagacggctgcctttcttgatctcacgatttttccatttgtagaacagtacatcggggcggtattcgatccactccactgtatcttttttctgattaaaaagtcccattattcatctccctttcccggggcggcttaccagtcgccgccccaatcgtagccgtaatcgtagctgccgtagtcaatatctccgctgtcgtagctgtaatcataaccaccgctgtcccagctatcccaactactgccagaatcataactgtagtcatatccaccgtaatcgtaaccactatcatagccatagtcataaccggaaccgccagagtagctgtaatcatagtggctgtcaccgtaatcggaagacccgctctccagcagcatcaagccgccaaagaacactgccagcgccaacagaataaccaggataatcttcccgacgcttttagggtactgagcggaaaccttgccattttcgccattgatcatgtagtgataggttttgccggcataaccgtagcgggccttccacagcggcaccagcacctgcttatagcgcactatatcatagtgggtgttcataccggtgacctgcgcctggctgtacccatgcccacggatatcactctctgcccggctgcgctggtcacggtcaatgtagctttccgcaaccttaaatccctggataccatctatcgtatagcactccgcctggtaacccgccagatactgcggatgataggggttggtattgccgatggtattgtacggcagcaccttttgaatgagattaccgctggcggttttgctggcacacacctggatatcattatagtagccccgcaccacaccggaaacaggataccactgagtataggtctctgtcttgccatcccggccacggcgggtataggtgcggccaccacgcccgcagtactgggtcacagcatcggcatcgtaggtccaaaagggcacatacatgcccaccagctccccttcagcaaaggtgcgctttaggctggcaggagcgaaccatcgcttgcggatccactggccgaaacgcttttgagcctcataacggtcgatagcaaatggtacaaccccttctaccggaatcccgttgtgctcctcttccggtttgatttgcggagaaccgcacatggggcaaaccgtcgcggtcccttccgccggctggaaaaactccgctccgcagacatcgcagcgcagagcggtttcgccgttttccagcatccggtgcccttcgcgctcgcggtactccgcaaagtcgtactcctcaacggtatctttccctggggtcactttttggatactaccacaagaggcacaacgaaattgctgtgcctccggatcaaatacaatatttccaccgcaggtagggcaccgcagggcggcattggtttgctccgatgtggtcataactgcttacttgcccaaacgagccttgagggcggccagatcggcttcgacggaagcggaaacttcagcagctttctcactgtacttctcttccagcttcttgatgtccatcttatcggccagctcttcattcagggccaccttggcatccacggaatcgatacgcttctggacggcttccatcatgttctcaaagccggacatatcggtacggcccgctaccttgtgcatcaggtcatccatcttctccttgtgctcggcaacggtcagcttggcgcgcagctccaccatcttgccctcagcggaagcgatatcctccatgagcttacgggtcatctggcgcatcttatcgctgttgctcttggccgtctcataggcagcttccagctcagccttcttggccactagctggctctttgcatccaggaattttctagcgtcatcatcattgccggccaggactgcctgctcggcatagcggtcgtacttggcgatttcttcgttattggcagctacacggcgggcagcggccatttcatccgcaataatagcggatgtttcggacttcagttcttccaggttggcgcgggcgtcagccagatatttttccagcagcttgccggcattcttctcctcagcaccgctgagcaggctattgatgtttgcactcataatgtcactaaatctctgcagaatacccattattgttcctcctgatgttgaatctcatattgggggtgataacgccactcccctaagttaattttatagcaccgctacaaaaaaatcaagagagcagcacgatctttaagaataattcatgaaagcttaaaagcagtgccacatttccctccggtcacacctcaaaatcgaggtaggccgctccgatgatgccggcatctccgcccagcgctgcccggcggataggacaggtgggtgcccggtggccaccatagcggttcgcccggacatagtcattgagcggaccgatcagggcctcccccgcgttgctgactccgccgccgatgaggacgacctccggggcgaagatgttgacaaaattgacaatacctgccccaacataggtaatatactgttccaccacagccttagcggtttcatccccctccgccgcgcaaataaagggagcactgccatcggcgggattaaaacgcttcatagcggtttcggggtgggccagctccgcgcggtggcgctgccgcagcagaccggtagcggaagcatacgcttccaagcagccgcgctgcccacaggtacagggctctccgccaagaatgagggtggtatggcccatctcagtgccgggaccaatatccccttcgtaaattttcccattgaggataacaccgccgcctactccggtccctagggtaatcatgatggcacttttggcgcccttcgcggcaccagcaaacacctcgcccaatgcggcacagttggcatcattggaaaggcgcaccggcacgcccagctcctgccggagctcatcacacaggggaacatttttccagccgagattattggcatagacaaccaagccctctgcggcgcggcagtagcctggcgagccgataccgaccgaaacgcaatcctgcagggtaattcccgccttttttactgcttcttttacacagcatccaatatcatagatgacatcatccagcatccgctccgggcgagtcttgatagacgcgcgcgcaatgatttgtttgttctcatcgaccacgccgaccgctacattggtaccaccgagatcaatgcctacacgatattccattcgtatcgtcctcctttatggggttctgcccatagtatagcgcactttgtgggaaaatggaagtgaaaggcggcggtttgcaaaaaatccaggcagacggcccgccggaccggccgtcccctacatggcaaaggacccgccacatggcgagtccctgagtaataagatcatgtatcaatctttaatcgcgcggcgcagaggcggcaccagcagcatagccagcacaccgccgataactgcggtaataagctgcgggaaggaaaagctggcggaaagcactgcggtctgcttctcattaagggtaagcaccatgggcaccagccattttacaatgacaaggtacaaagtgagaaatttagccacggcggcaacaaccagtgcgatagcctgacgggcaatgggggcattcttggcaccggcaataagcacccacagcaataccaaaacggcattgcccaaagcaacggcggggacaacctgggggaatgccgggccgatgccgatgaagaaggcacagatgggagaaagaaccgcgacggccaagccgccccatagaccgcacatcaggccagaagcgatgagaatcagattgacgagagagccggtaacatactgacctatggaacgggtaacaaactgcacagcgataagcagcgccagaaagatagcggtacggcacagtgttttcaggctgctgctagttttggtattgctcatgatgttctccttttggataattgttttctgaagcgcaaaacgcttgctttttttttatattatactacactggtagatgtaactctgttgcatttgcaacgaactgcaagaaaggcgacgataaaatgattattcgaatccgacttccctcctgtccattatttgaggggatcgctccagaggcactactggaagaactggcccgcctgcaggcagcagaacgaaaatacaaggccggggaaacactgctggcggctggttctcccaccagtcggatggggctggtgctggagggggaactccacgcgattttgccattaccgcagggacggcagctgctgcaaagccggctgctgcgtggggagctttttggacagttgctggcactggatggagagcgggaaagccccgtgaccgtaactgcccataccccctgccgcgtgctgtggatcccgatgaagaacctcctggccggtggaggaacgccttcttccgcacggcttctgagcaatctgtgccgtcagctaagcagcgcctatttctccttacaacggcggctcatctgcctaacacagcctactctgcgggaacgattactgtactacctgcggacggaatgctatacccaggggagtcgcaccgttcgtctgccctttgaccggactggtttggcggactatcttggggccgaccgcagcgccctttcccgggttctttccggtctaaggcaggaaggcttgctgaattttgaccgaaagcacccggccgccattacactgcggtacccactggaggactgaattcctcatattttcccccaccgtgggcaattcggggcttttctcccctgtggaagtatggtataataatagccgaaaaccggcagaaagccgttaagacaggcgaatcccatcatttacagggaggttatttactgtgacgaaaaaatttgtattgaatttcattctttccgctatctgctatgtggcgctgggcattgctctcattgtatggcccgcaacctccatcaatatcttttgctatgtgttgggtggcgtaaccgctgcctatggtctgtggcaggtataccgcttcatctctcatcgggaggagcgctatgctaccctgtcgctgatggtcggcatcgtggcgctggcgctgggcatctgcttctttgtcaaaccggagctgtttgcttccatcctgccctttatcctggggctgtacctcatctttgatggtgtagtaaaactgcaggccgccattgatatcaaaaaagagggctaccaaaaatggggcatcctgctgcttttggctgtcttgatgatcgctctgggtgtagtcatcctgctcaatcctttccagtcggcacaggcactcatcacttttatcggcatctgtatgctgctggatggcgttattaacctgtggaatgcctttgtcgtttggcagcatctgcgggtgctgaaaaaagccgcttccgccgccattgataccatcgccgccgcagtggatgccgccaatggcaatgctcccgctgatgtggtagtggatgccgtaagcactgccgattcccctgcggaggaacccactgcggaacaacccgtcgaagaaaatacccccaacgaataaacctgaaagataaaatttcccctccgccgcaagacggaggggattttgttatttgttctcctgctctacatggatggctgccagccccagtcgcataataatatgccgcacccatggggtatacataaaccagcgtttgatggtcttaagccacagcttcagacgcaatgaagtcgtttttctccggtaaaagcgggcaagttcgcggtcatcatcggcttggctcatggcctccgccagggcgctgccgctgcggatggcgctgctgattccttcgaaggagctggcgctgataaagcccgccgcttccccaataagatatacgccatcccggccagtgataaaatccgaaaagccgcgtggacgcaccgcctggcaggcctcggtcttaatggggcggcccagcgaatgccccaggtactcctccagtcggcttttctgtcgattataggcttccctgctgtcctgtggagaaaagcaaccgccaaaaatcagggtgtcgtctttccgtatgatccaggaacagctttcgctggtgaccggatcgaaaatacaggaataaaagggcgcgcgattctccccggccgggaaccactgctgaatagccgtgtagcgggtcttcggctcccggtaaaaggtgcggcgcaccaaagaagacgcaccatcagcgcccaccacccggcgggcggtaaaatgtcgctccttcccatccgtccttacagtcagggaaaagctgtcctctctgcgggcaactgctgtgcagcggccggggagtatctccgcctgcgacggcacaagcgatagaagccaacggtcaaaggcgtagcggtccatattgagatagtagcgctggtaataacgcacctgccggctgcaaagatcaatggtctgcaccgtgaaaatctgcggatcgaccagcacctccttgggtaaggtgagatcgaaatgcgccaacgccttttgggaatcgggggccaacaggccgccacagggctttttatgctgctcgttctgtccatctataaggagcagcgaggctcctggacaaagaatcaagtatcgacgggcaaaagttgcggcggcagggcctccccccaccaccgcaatgtcataaatcatattgtttcctcacgatgagtgtggggattttcttcactgcggcggaacggcaccagcttggcacggtccagcgccaccatgatagccgggataagcaccagttgcagaataataccgggaatggcattgaggaatgcgccggaaataaacatctgccaggtaaacacaccgccggaaagccccagcagtacaatcatagcagccgcccacactatacgcccagcaatcatggcgatgataagggagcgatacagcatgcgggtgcactgccagcgcgcccgactataaaggaagcccgctacaaaggcataggttgccatctcgaatgccatggccaaagcagtaggcatgcggggcatggaaaaaagcgcgaagcgcaaaagcggcataataaaaccaacagcggtgccatactgccagccacagatcaaggcgcagaggaacaccggcaggtgcatgggcagcagcatgttgccgatctccttgatctgcccggtgaaaaagggcagcaccaaaccaatggccaggaacatagccgccagcagcaggtttctcagtgattgattttgatgcttcatatttttattcctccttgatgggtttgataaacggggcataatattccgctaactgcagtggcaaatcattccggttctgttccgtcaccgttatcaactgtaccttagggtggttgcgaatatcctccagccagcccatggcatcctgccgcataacacccagtataggggtatcgccatccagcagttccagtacccgcgcccggaagcagggaagcttttgctccaaacggccacactcatccagcacaatcagtggataagaggacgcttccgagagatattggagccccaactcctcaaaactgggcaggatggtgcgtaccggggcgccattctcatcctggccgaattttacgatggcatgatccggtgtgaaagcacggggttccgcggcgctgctcatatacaggtaccggcagggagatttgcgatcttccccaaagtaggagcgaaagccgccgggggtaaccttcagcagctccagcgttttattcagggcagtcgttttcccaatctggacgctgcctgtcaaaaacagatgcatatgatcactccttttgctggggggtgggtaccatgccctaccacttttgctattttaccacaaaagatggctgacaacaacacaaaagcgcccggccaaaacggccgggcgctatgcattttagctatgacttgcaattacttgtgaatagcggtaccagacttaccttccagcgccagggcagcattgtgcagatcagcaatgatggcacggccgccggactgggcaaaggcaatggcagcctgaaccttgggcagcatggagccgggagcaaactggttctcaccgatgtacttctctgcctcggcaatgctcatctcctccaggctcttctgatcgggcttgccccagttgatggcgacacgatccacagcagtgagaatgaacagagcatcagcatgcagcagctcagcgatcttggaggaagcaaagtccttatcaataaccgcgggaacacctaccagtttgccgtccttcttgataacggggatgccgccgccgcctacggtaatcacaacagcaccggaattaacaacagcctctactacatccttctccaccacatcaacaggcttgggggagggaaccacgcggcgatagccgcggccggcatcctctaccatggtaaagcccttggtagctgcgatctcatcagcctgctccttggtatagaaagcaccgatgggcttagtgggcttctggaaagcgccgtcattctcatctaccagaacctgagtaacgatggtcgctacgggcttattgatgccgcgcttgaccagttcgttgccaatggcattctgcaggtgatagccgatgtagccctgggacatagcaccgcactcagggaagggcatatcgctctttacagcgccggcttcagccgcagcgctcatggccaggttgatcataccgacctggggaccattaccgtgggcaatgataacttcgttgccggcctcgatgaggtcaacaatgggcttagcggtctcggttacgagctcgagctgctcataaggggtgttgccaagggcgttgccgcccagggcgataacaattctggacatagcagtttctccttttgtatgttttttctatggttcttccggcgtaattccccaaattggctaaaattcgggggttgaatacagaaatatcatagcaaatgaccgttattttgtaaagagtttaggagaaaaattttagaagcaatttttcagtatgtaaaaagttcacaaagcgctttcccctattccagtctgtttttcgtcgtggcgacaaaggggcggcttctccaccggttttggttcttcatttggctgcgttttgcgctatgcggggataaactcttttttgccgtttctgtcttgacggtgaattgaaagcgcaaaagcccccggtcttccaccgggggctttcttcattctctctaaaacttacttttggttatttaccgaagtagcgcttcagcagaccggcaaaggcacggccgtgacgggcttcatcgcgggccatctcatgtacggtatcgtgaatagcatccaaattgagagctttagccttcttggccagctcggtcttgcccatggttgcgccgttttcagcttccacacgcatcttcagattcttctcggtggagtcggttacgacctcacccaacagctcggcaaacttggcagcatgctcagcctcttcccaggctgccttctcccagtacaggccaatctcaggatagccctcgcgatgggctacacgggccatagctaagtacataccaacttcgcagcactcgccgttaaagttctcgcgcaggccctgcagaatctcaggatcacatccttgggcaacacccactacatgctcagcagcccaggccatctcgccttctaccttctggaacttggaagccggagc

SEQ ID NO: 1394 - DNA, 10158 bp, Unknown
  16S sequences of unknown bacteria
cgtcgagccgacatagccccaggcatagccggccgccgacactttatccactcgctcatcgtcatcgcagacatccacgatgaacgcgtcatagaagatgatcgtgccattgtagccgaccatggcgatcacgaagatgatcagcgccatgcggtaatcgatgaacggcagcgccagcgcaaatccgccgatgatcccgatatacaggaaaaagcgaaacatctgcatcttgcgtcccttatagtccgcgaccgtgcccaggatcggcgacatcaccgccagcagcaggccgtacaccgtattggcccagccgacatagacgctggaatctcccggcgtgatctgcgcgatcagcagcgggaagatgaccgtgcacgtcgtcagcacctgtgcagagttgccgatgtcatagaggatccagctcgtctcctctttcgtatagcccatttttgtcaatacccttgtaaacatgcttattcctcacttcacaaaacgctattattatagaacaaaatcaagaaaacgaatatcagattttgtttaaatttgcgcaagatcacctctcctctcaaaaaaagtaagttttttcagcgcagtgatgaacatgtctgccagactgttatatgatatatatgccatacaaaaaagacaggagagagcaagatgtatcagttcatcgacagcgtcgatccccgtgagcatgacgcctttgtcaaggcgcatccgctttgcgacctgctgcagtcttccgcctggaccaaggtgaaatccaactgggatcatcagatcgtcggcctgcggaaacgatccaggctggccacctccgcgctcatcctgatccgccggctgccgctgggcctgtgcatgatgtacattccccgcggaccgatcatggacctcaccgatgaggagatgacccgatccttcttccaggcgctgaaggcatgggcgaaaaaacagcgctgcatcttcatcaagatggatcccgcagtactgctgcgcagctatccttatggcacgccgcagcctgaggaagacccggcggcattgcggtgcatcgaaaacatgaagcaggccggagccatccaccatgggtttccgctgatgatcagcgacagcgtgcagccccgtttctcgatgggcgtcgaagcctgtgacgatctggatgcccaactgccgcaatcgacgatccgctcccgcaacgtcgcgatacgcaaacaagtcaaggtcgctgaagcgtcgatagaggaactgcctttatttgcggaagtcatgcacagcacagaaaaccgcaagcatatccacctgtgggatgaagaatacttcaaccggctcatgtgcgcatacaaggaacacgcgcatcttttcctggcacgcattgatgttcctgcctatcatgccggcttatgtcaggaagaagaacagatccgtttacagctgcaggatcccgagctgggacggaaagcagcgcgtaagctgaaccaacggctgacccagctcacccaggaaaaagcgtccatcgcgccgctgctggaaaaatatccgcaggaatgcgtggcggccggcggactgatggtcggcttcggcaagacgacggaaatgctgtatgccggcatgaacgaagacttccgcaccttccgtccgcaatatctgatctactgcacacagttcgcctatgcgtttgaacgtggatatcagtatgtgtcgatgggcggagtggaaagcacgctgaaggatggcctctctgtctacaaagcaaacttcaatccgaccgtgaaagagctcatcggcgaatttgatctccctgtccatccgatgctctaccgcatgagcatgtggctgctgaaaaaaacgcggttcatgatgttcatgatgttctgtctgaatttgcttgccaacgcatgaaagtatgctataattactaacacatgcgggcgtggcgaaattggcagacgcaccagatttaggatctggcgggcaaccgtgcaggttcgagtcctgtcgcccgcaccaaatgcagatatgggccgtgatgcaagagaacaacatgtttctcacatcacggccctttttttatctgttcaattttgcacgtctccttcggatgtacgccatacgctcccccgcgtcagggcgatggctgatgatgaacgcctgtaaggataccgccgtttaccggatagactttccaagttcatatgcctgacgaagctcaggcttgtcttggatatcccccacgttcatatttccgccggcgagcacatgaccaaggtttttccagcgcaaatgctccatcagatgatcataataaacaagcacatcttcaaagccatgaccttctgcggccatcagcagcactgaagctcttccatgtcccctgagcaggttgccatccccttcttctaaagcaaacaagcgatcgatggcgatcctgatctgtccgctcatattccagtaataaagcggggttgcgaacaccaccacatcaccttcttttactgccggataaatctggccatatcatccttttgcacgcacgggcatgcttggctgctgtgtccgccaaagcagcctttgcagccatggatctccatgctgtcaagaaagaactccgtcaccgtattcccagcacatcttgctccttcggcaaatgcgtttgccagcatggaggtattccctttttttcgcggacttccatttaatatcacgatattcttgctcatctttgacaccctcttttatattttttctgccagcgcagccgcctgccggcgcccgtccgtctgttcgatatcccctgtatgcaggacgccgggaatcagaacctctcccgccatatgccatttcatcaatgctgtcatccgctccatggggatccgcacaccgtccaaaacagacatatcctcttcttcacaacaagcgatcagcatgcattcctttccagcgatgtcttttccagcgacacagaatgaatacagcttatctatcaccgctttgatctgcgccgggatcgaataccagtataccggcatagaaaagacgatgacatctgcatccagcacagctggagcaatcagattgaagtcatcatcaaaggaacatgccctgccagtcttatagcaggtttcacaggcctggcagccgcccacattcatcttggcggcgtcaaacctcgtcacacgatgccccttttcctttgctgcgcggataaaagcgtccgtcatggcaatgctgttgccgttttctctgggactgccggtaatgacgacgatcttcttacacattaagctcagcctcctttgatctcttatgctgcctttatggaaaattgactttctccgatactgacattataatcataacaagaatgatccctgagacaagtacgcacatcaacgtgcgatacttaccataaagttaaatacttacctaaaggagagcgtaaaaatgagcaaaagatgcatatcagacgaatgcctgagttcaactggattcagctacacgctgtcattgatcaatggaaaatacaaaatgacgatattatataccttgatggaattcggtgtggtccgattcaatgagatgaaaaagtatatcggcacgatttcctacaagactttaagctctacgctgaaagaattggaagccgatcagcttgtccatcgagaagaatacccgcagatcccgccaaaagtagaatacagcctgactgagcggggaagatctttaattccgatcttagataggatgtgcgagtggggagagcaaaacaggttatagcttgccgccatgtcctccgctgactttcatcagctgtttctttccctttccgcctctatgatcaagattaaaaaagcgtgatcatttcgaccatcacgcttttttggtctgtcgcggatccagcggtccgtaaaagtaggatgcagtcgcgccgccgtcgatcaggaaatcagcgccggtgatggatgcgcctctgccgctcatcagcaattctgccacattggccacttcatcggccgttcccgggcgcttggttggacactgcgcaaacatgcgtttgtaaaagtctccgcgcggtccgttgaactcatccagcgccagcggcgtcacgatgatgcccggcgagatcgaattgatgcgcgcgccgcgctcgccccacttcaccgcttccgccatgacccgctttacattgcagcgcttggccagctggtaagcgtgcagcgtatcacggatgttcttcggctgcaggatatccaaggaaagcagctcttccgcaggcgtgtatgccagcaattcatcctcctgcgggctcaacgccggcatgcggtgtccagactgactggagatatgcacgccgacgcctccaggagcgatcaccttccccgcttcctccagcaataccgctgttccatacaggtccaccttcaggatcgtctcgatcggcgcctggctcggcgataccccggcggcattcaccagcatcgtgatcggaccatgctgctgcgccttagcgatgagcgcctgctggcaaaatggatgcacctttaccttcaaatgtatatacatcagctaattgtgtgtcttctatagccttttttagttcagcccgtactttctcatatttatctacactacagatagagctaatgaataccttaattttttgtcctggagatatcggcagaggaactgatttctcctctgatttttcatattcccatgaaagtccgccaacaggtgtacttattcccgttaatcttatacccatattccatctcctaaaaaacatcaatatggttatttttacagttgtttatctttgattttgaatttgccactatcactgatttttccagaattagtggttcaaagattttcctattcaaagtgccatttaaaaatacctttcggcactttaaatggcactaaaaaatatatgacttatatcaagaataattttcctcccctgactcttcttgcgcgtctacatcctctgaatccctcttttctgtctgcagcaatgtcaacagccaatcatacagttcctgagtctcttccagagccttttttacattgtattcttcaatgaacagctcctgaggatatcgaatctttactccgtatggagtcagatcatcacacatttcaagatatttctcatccacttccgtatattcccgaagcatttctgctaaaagaccgagatcatgtgtcttcttaattgtaacgcctctggaaatcaaaacacctttcaggagcttttctatagcctgctggcaatggtaacaaataatctctagcggtttcggttacatatgctcatacagatgtttcgccgtaaggaaatccatcttagcgaactccacccactctttcaaaattttttcatttttcatataacagcacaccctcctgctttacaaccttttcaagggtatttttcttcgccctttcgtcaaaagatgattcataacccacaacgatgtctactggacgtttacgaactccgcgaagggatttatatgctttctgggacagttcgattttgttcccagcatcatcaggaacaacaacaaaaagtcataatcactgtcctcattataggtatctttagcaaaagaaccgaacagatagatccgtttcggcatgatagtcatacagattctgtctttaattgcattaatctcattgttgatcatctagttcacatcctttcaaacaaactcgcctgaaattctactttttagtcacatatagtatactacagaactttctgcttctctatctgaaagaatattcagatagctcacttaccccaacactctctttatgaatacataaaattaagcaggatgccatacaccctgcctatgtttcagaatattctgttctcaataattacagacccagtccattcacccattcctggacatccgcttcatcaacaccggaccggaatctcatgccttcctgccagtctccggtccctgccatctgtgccagcagctctccgctctcgcccaagccggaagaagatgaggtgcagaatgggatgaccgtttttccagtgaaatcgttattctcaataaactgattcaccggccatgcggcaatgccccaccagatcggatatccgatgaacacggtatcgatctcttcccagttgtcgacgctcgtgctgaccagttccacatcacgctcgtcttcattttcatattccgcaacgacgcggctgttgtcatcggtccagttcaggtcttcctctgtatagggatccaccggttctagttcaaacacatcagcatccaatgccgcggcgatgtcattcgccacgctttcggtgtttccggtcgcagaataatagaccaccagcacattctgccctcctgtatcctgcgtattctctgtcgtcgacggttcggccgtccctgcatcatcatcctgtgccggcgcgcggcaggcactcatcgagacacagagcagcaagctcatcaacatagcggcaaatcgtttcatctcgtcatcctccttatctgatcgagaaagcgttcaggcgatgctgtccgcctccttctgccctcattatagataagccgcgtgcaggcaggaagtatcgtttcgttcatcagtgttatcctgcaggttgatactcattcaatggcaaaaaaagcaaaagaaagagttgaccggtagttgctaccgagttttacaatatgggcgtaaacggtcatgatgaccgtacgcaatgtaatgaaggaggaattttcatgaacgatttcattttttcctatccgaccaaagtatatttcggcaaggatgcgttcggcagcaatgtcctgctcgcctatggcggaggctccgtcaagcgaaacggcatctatgatgaagtgatgcaggtgctgaaggaacacggcaagcacgtcgttgagttttccggcatcatgtccaacccgacctatgccaaagtgcaggaaggcgccagactggccaaggaaaacaagatcgacttcatcctcgcggtcggcggcggaagcgtgatcgactgctgcaagatcgtcgctgcacaggccatgagcgaagaggatatctgggagatggagcattccgcacgccgcttcccgcagcaggccatcccgatgggcgcgatcgtcactgcctccggcaccggatcagagatgaacggcggcgccgtcatcaccaatgaggccctgcacttaaaggcaggcatgggggcattccctccggcctttgccgtgctcgatccagcctatacgatgtctgttccgcgcatgcaggtgctctccggcgcctttgacaccctgagccatgcaatggagacatatctgggcaattcagatgaagacaatgtgtccgatgatgtcgctctggcgatcatgcgcaacacagtcgtcaacatgcgccgtctgctgaaagacatcaacgacatccaggcccgcagcaatctgatgtgggattccgccatggcagaaaacggcatattgaaagtcggccggctgactgacttccaggcgcatcagatcgagcatcagctgggcgcatacactgactgcaaccacggacagggactggccgtcatccaccctgcctattaccgtcacatcatgaatgacgccaaagagaagttcacccggttcgcgcgtgtcgtattcggcaaggaaagcgcagaagagggcatcgaggcgctggcggccttcatcgaggaatgcggtctgccgaccaagctgagccagctgcgctccacgacagagatcacgccggaactgctgcgcaaggtcgccgattccaccaacatcatcaacagcaatccacgtgcgttagacgcagatgaaacatatgacatcctgatggagtgcaggtaagcgcatgaatgttccttatacggtatgtcatatcttgagtgccttggacggcaggatcagcggcgcattcatggggctggacagtgtccatgacgccgcggcatcctacgcaaggatacgcttcgactaccaggctgatgcatgggtatatggaagcaccacgaccagagaattcgtctctgccgctgctccttatccacgcagcctctcatctgatgttccatctgatttcgcggcagagaaagatgccgggctctactatgtatcagtagatcccaaaggcgagatcggctggtcttccccgaccttcatcagacctggctgtcccgaagcacatgtcatcgaggtactgctggaagatgctccggatgcttatcgggaatatcttcgtgagcgaggcatctcctatctcacttgcggcagacagacattgaactgccggctgctcaaggaaaagctgtatgcacacttcggcgtccgcaccatgctggtatgcggcggcggagcgatcaactggtcttttttggagcagcatgagctggatgagctgagcctgttgctggcaccggcggcggacggagacccttcctcccctgcagtgttccagcgctccgcattttcccgcaccgaaagcccggcaggctttcggctgaaggaaataaacaaggtgggacaagatctcatccacctgatctatcaggtcaatgatcgttgactgacatgcaaggagctgtttcgacggctccttttcgatcaaaaaaagaccaggcgttcgtcatcgatcgtctgatcttgttcactgcgtttgcggtcaatgctcctgatgtccgatcaaatcgctgtgatactcctttcgtccggaaagcacatcatcataaaacgactctttccattcgatataacggaccgcgtcttccaattcgcggatcttcatctgcagttcgtccttatgcttgattaacacgagctttcgctgcgggatcgtcttctctccctccaggcaaagcgcaaggtattctttcatctcagcaatgctcatcccgcagcgtttcagacagctcaggctcttgatccagttgatgtcatgatcatcaaatatccggtaattattcgcgctgcgcttgacgttggggacaagtccttcattgcagtaaaacttcagcgtttcataagacatgcctgctgcctggcaggcctgtttcatcgtatacatcacaaggctcctttctgctcatctttcggtatcattttacctctttcccgtattggaagacaagccctgcacaggacatcgccaaagcgcatgtgcatttctcagacatgatgataaaataaaagagaagacgcgcatacggcgcgaaggaaaggagaagatcctatgcgatataagacatttcaggacctgcagctgtccgcgctgggcatgggctgcatgcgtctgccgctgaagggcggaaacagcgagatcgatgaagaacagacggcccgcatggccgcttacgccatggcgcacggtatcaattacttcgacactgcctggggctaccacggcggcaattcagagagcgtgatgggaaagatcctgtccgcttatccgcgggatgcttatcatcttgccagcaagtttcccggatatgatctggccaacatgccgaaggtgcaggagatcttcgcgcggcagctggaaagatgccagagcgaatactttgatttctatttgttccacaatgtgtgcgaactgaacatcgatgcttatctgaatgaggaatatggcatcctggaccatctgctcaagcagaaggaggccgggcgcatccgccatctcggcttctctgcccatggcagcatcccggtcatggaacggttcctgaacgcatatggcgaacatatggaattctgccagatccagctgaactatctggactggatcctgcaggacgcaaagggaaaggtggagctgctcaacgcccgccatatcccgatctgggtcatggagccattgcgcggcggcaagctgtgcacgctggatgaagaagccatgagcgagctgcagaagctacgtccgcaggaaagcatgagcggatgggcattccgctttctgcagagcatcccgggcgtgacgatgatcctctcaggcatgtcggacatgcagcagctgcaagaaaacatcgagacctttgccgatgaacagccgctgaatgaggatgagatgaagacattgaccggcatcggccggcgcatgagcacgagcgtcccccgcacggcctgccgttactgc

SEQ ID NO: 1395 - DNA, 10627 bp, Unknown
  16S sequences of unknown bacteria
tttataaatatatagaaaagagcggtgccatagataagctcatcgaaatgggactcgacgagggtgatatcatacgaattgcagattacgagtttgaatattattctgaatagttaatttttagatgtgcatttgtggttttaaacaattaaaataatgtatacattattttaattgtttaatttacaaaaaatacttgtttttttattctgaacaatgtataatattaaaatctcaaagatactttgggtttcccaaagtatttttatttgagggcaggggcaagaattttttaatcaaaaggaggaccaatatgaaacctaatcctaagtttttatctttttattatgaaactatggcagagtttccagacatcaaactcgatccgaaaaaaacagctctgttaatcgtagatatgcagaatgaatttatcctgagagacttcggcgaagcgctgcagtttaaagaagcaggagagtgggaaagatggattccgttccacgacagactcgatgatatcactattccggcctgcaaaaagcttctcgattacttccgccaaaacgatatgtacgtaacattcggaaggattgcatgccttctcgaaaatggcgaagacaggtgtatggtacaaaagtctgagggctggaatggcatgctgcttcctgtaaattcaaagaatgctgctatgatagacgagctgacaccgcttgataacgagatagttgtcaacaagacaacggacagcgtagtaacaggtacaaattatgttcgtcttatgaaaaatatcggtattgaaacaatcgtcgtttgcggtatcgtaacggatcagtgtgtcgcaagtacagtgcgcgatcttgccgataatgattttcaggtaatctgtgtggaggatggctgtgctgcccctgatatgacactccacgacactgaactcaagattatgaatataatttactgcaatgtgctttcttccgacgaaactatcgaagttatcgaaaacaacaagaaataatgaaatttgacaaagaagatttataaataccggaaaggaagactacatataatggaacaacaacagttaaagaagagtttaaatttgccgcaggtaataacgcttgccgcaggcggtatgattgcagcttggatggtggaaattaagtactggtttgaactcaccggaacaggctcgtttttagcgcttatagtctgcgcaatttttgttttgcctctctgcttcatatatgcagaaatgacaaccacaatgccgtatgcaggcggtgaaaatatttggattacaaatgcatttggctggaatgcaggctggctttgcggctggtttgtgcttcttctctatgttatggcaatgcctacggtttcgtttggtattgcaagtatggtaagttatctctatcctgtaacggatgtacaggtaaaaattattgccgcggcaatacttgtagtttggttttttcttactaactacgaactcaaattcattgctaagctccagagtatacttttctggacaacgcttgctgtatcacttgcagcatcactgatttttattttcagcggagcgtggagctttgaaaactttaagagcaacctgatgccaaacggtttttcaggattctccgcagctatagcgcttctcataatgaagttcatcggctttgatatgataccgcagctttccgaagaaactacattcccgaaaaaagatatgtggaaggcgtttgtcggttcgcttggatttactgtaatcatctacgctatggccgttattggcgtcggcggtatcgtttcgcaggaatgggtacttcagactgatattgtagacccgcgcgttgcagatataatagatatgcactggcttggtgtggcaattgttataatgggtaccggtacttgcctgacgacgctttcaggcttttggatttcggcttcacgtacattcttcggtgcggctaagcagggacagtttaccaagaagctgactaagctcaataagcacggacagccggtgctcgcaaatttcatcgttggtattctctcgatttacttcacggtgtttgcaccaagcgcttgggttgattacatatatacgatttacagcgtaaatgccggcgtcgtatatctcatggtatcgctcgcgttcctgcgcctgcggcagaagcaccctgaatgggaacgtccatacaagctcaaggctccgtggttctttggtacagttggcgtcgtattctgcatttatgtaatctacgtagctctttcagctatgaatatgaacgcttggattgtacttctcatatatctcgctttaggcgtaatgttttgggcttatgcaaagataatgcagaagaaaaatccggaagaatggaaggtgataatcacatcgccagatacggaaatgcaggctaaataaacaacaaagaactaatccggcgcaaaacgcgccggattttttaatttttgctaattttctataagtcaattctgtacgatgaaacttttccgatatagtttatttcgtcgaagctttcgattataaaaatctcactcattctgtcatcgggaatgagaataattttgtctttttcaaaatacacccgcctcagcactgcctgcttttttccgaacgggtaaaatgctatgatatcccgcggctttaaaagctccgtgcgggtaggcgttatctgtataaaagagtgaatgggtatagtcggtgacatagccggatctccgagaaagagagtcgtcatattcttgtcctcgacggcacctcctgattcgagcgtaagctgctttacgaattccgcagatatgtcaattttaccgtctttcatatattttgatgacatttctatcgtcgagagtatatcgagttgtttgagatatgcttttgcttcatctgccattctgccgtcattagaaagcttgtaaagtgactcgagcatcgccttattgagctcggatgaggcaagcatatactgctttatcacctcaggtgctttttctatataaccctgaaaaatgagcttggcctcatcgtgagaattgcacactttcgcaagtatcatcgaaacctcaggagttggaggcggaagctttccattctttaattgtgatatgtatgacggcgtaatactgagatcgagatctgcacatcgtttcgagatctgccgcaatgataaattgctttccgcaataattgaatcgagcatttctgcataattcaagtctttcacctccgcttgttcgtacacgtatacattatgtagtatttttagtgttaagtatatactttactataccattgattgtttttgccgtcaattactataaaagaaaaagcataatatattttcacagtaataaaattatatatcagctatgtacaaatgaaaggagcgctatatgaaaaatagaaatataatgtatcagagtatcatatgcttatgttttgcctgtgggtttatgcttttatcatcgagtgaacggcctgcggccgtttcggctgctgcttttataagcaaacatctcgaacgcgagtacagcataagcgagattaaggaatttaacgaaaatgtgaaagaaactgtaaaaagcattccgtcttcaatggcgaaggcagctgaaactcttgggccgaacgttcgttacggtgaacctatagatgaagagccctcttccgcaacagcaatggtatacgctgttgccggcggaacggtgcgcgaggtaggaacaaacgaggatattggaaattacataattataagccacggcagcagcgccgaaagcatatacggcaaccttgcgaatatcagagtatcggcaaacgagcgtgtgaagaaaggtgagataatcggcggctacagcactgattcaaaaaaggatttttattatactcttaattcttttgattagtgtactcatttgtgataaaatggcagtatggatattaaatacgaattggacaagctgctcaagcttgtggaaaaaccggccagatacataggccgcgaaatgggtgaaatagtgaaagataaagaaacggtcgattgccgtttctgttttgcgttccctgacacatatgaaataggaatgtcatatatgggacttcaaattttgtattatgtcgtaaacaaggaggaaaacttaagctgtgaacgcatcttcgcgccggggctcgatatggaagagctgatgcgcgcgcgaaatatacctcttttcacactcgaaacaaagacgcctatagccgaaatggatatgataggttttacgcttcaatacgagatgtcgtttaccaacattttaaatatgctcgatctcggaggcattccgctgcttgcatcggagcgcagcgatgatatgccgctcatatgtgctggcggaccatgcgcatgtaatccagagcctcttgccgatttcattgatttctttatgataggagacggtgaagaactgctcccagaaatgataaaacgctggggcgaatttaagaaaacgggtgggagcaaggaagattttctaaaatcaatatgcggtatcacgggtatctatgtaccgaaattttacgaacctgtgtataatgaggacggcactgtaaaagaaataaaaaaactttacagtgacgcaccggacactgtaaaaagatgtatcatcgacgatatcgatcatgcattttttccaaaagaaatactcgtaccgctgatcgaaaccgtacatgacagagccgttgtcgaaactatgcgcggctgtacccgcggatgcagattctgtcaggcaggtatgatataccgtcctatacgtgaaagaagtgcagagactgctgaagatatcgctctcagtcagcttgcttactcaggaaacgatgaactttcactgctttcactttcgacgagcgattattccgaattcaaaccgctcatactgagactcatagataaatgcagagaagaaaatttctcgatttcgctgccttcgctcagacttgataatttttcatttactgtgcttgaagagctgcaggaaggtcgtagatcgggacttacattcgcacccgaagcgggaacgcagagactgcgtgatgtgataaacaaaaacataacggaagatgacatctacggagctgttagaaaagcgcttgagctcggctggagcagcgtcaaactctactttatgatgggacttccgacagaaacatatgaggatttggatggaattgccgagatctcaaaaaatataagagagcttttctttgaagtgacaggcggcaaaggagctggcaggtttaaggtgacagcgagtgtagcaaactttgtgcccaagcctcacacacctttccaatgggagccgcaggacagtccggaaagcttcaataaaaaacacctctatctgcgtggcaagatgaagataaaaggtgtcacatttaattaccacgatactttgacctcgagctacgaagctctctttgcccgcggagacagaaaaacagggaaggcacttctcgccgcttttaagcacggatgtaagtttgacgggtggacagaacacttcgaccctaaaaagtggcaagaggccttaaaagaggctgatatcgacatttcattttatactgagagacgcagatctgaacttgagatcttcccttgggatgtcatagatatgggtgtaagcaaggagttccttctgcgcgaaaagaaacgtgccgagcaggcgcttactacgcctgactgccgatatggatgcgtaggctgcggtatcagcaaactcacggactgcccgtttggaggtgtgcttgcaaatgaataggaaatttataatattttttgaaaagagcggctatataaaatatatttcacaccttgatatgatgagactttttaatcgcgttatacgaaagtgcagcatcaagctcgcatattctcagggttttaatccacaccctaaaatgagctttgcgctgccgcttgcgctcggatatactggcaaaaatgaaattctcgaaatagaaacggcagaagattacgaaacagcgttcatcctttccagcctgaacagagcaatgccggatggcataagcatcaaagatgtccaagaagatagaggcgaacgcggaaacaaaactatcgcttccgcagtatatgcaggtgaatacattgcggaaataccgcttgtcgatgatgcttctgctaaactcggcaatataactgaaaagacatcggcattcttatctcagcctattatagttgcagaaaagctgcaaagaaagacgggaaaaatattggaaatagatataaaaccgcttatagatactttaactgccgttataattgacaataaatttattatgacaactatagttgcgcagggaagtacagcaacgctcagtcccgaactcctgctgacagtgttttgtaaatttataggccttgattttgaaagaagtgaagttgaaatgactcgcacgcggattttatatcattagtatcttttcttatgatatgtgctgcatacgaaattattacaattattttccaattatatattgacatattatacctttaaatgtaaaatgtagtaaatattatttactaaaggagtacaaatatgtcagggattttgggaaaattaaaagaaaatttagcgtttacttggaagcatgacaagcagtttttcataaaaactgcactgattgtgctcgtatttattgtagttttcatctcgttcatcataaatcgctttgatgtgcaagaaaaaaacaccgcagaaagtgatgacactctatttcacgatgaaggcattcttatatcaaacgaaccttttcatgcgcaggaaagcgccgcaggtatttccgcaggtgccggacttatgaaaaatgaaaataatgaagagatagcggacgcgattatgtacgtagatgtatcgggcgctgtatgcttgccgggagtatacatgcttccagaaggaagccgtgtatttgaagctatagaaaaagcaggcggtctttcaaacaatgctgaaacggcaaatataaatctcgcttccaaactcacagatggtgacaaactgtacataccgacagaaactgaagtaaaaacaggcgtgcaaagcggcggcatcataacagaaaaaatctcagcttcaaacggcaaaggctcgtcctctcagggaaaaaatacatctgctcagaatgacttttccggtaaaggaataataaatattaacaccgcagatgcagatcttctcacggaaatttcgggaatagggccgtctacagcacagaaaataatagattaccgcacaaatcacggatattttaagtctgtgaacgagcttctcaacgttagcggtatcggtgaaaaaactctcgcaaaaattaaagacagattgtgcgtataaggcgtataataattaaatttgtatgaaagcgccgcaaattacccataataagcaaaagaggtgattttatgggtaacagatatttattcggaaaaccgaaaagaacaggcgcaagaaacgcagtcatagcatcggcagtcgttgccgccgttgcttttggagtttttatgaatctttcagatgaagaagtacaggataatacaaatctaattgcaaatgcaggcgcacctgttcaagataaagatacagatgaaaataatgctgacgaaagaaatagcgacaaaatcgaaaaagaggacaaaaatgatgtggtaacaaaaggcgaagaagcatattatcttttgaaagaagcagaaggacagatcgagctctattactatgatgaaaacggaaaagagaagtttatccgtatgacggatattccgttttctctcatatcaaattccgatcaggagcttttcagacagggtgtagtcgtgaagagtgaaagtgaactcgatagtattttgcaggattttgaaagttaagggggatttaaatgaaggtctttacaaatcttaaaagggccggaattgtttttgtttgccttacggccgcggtcgtatttggctgtttcgtaacaaaaagtgaaacagcaagcgaagctgcagtgcccgttatgagtgaaagagtgctcgtgcccggcggcaacagcgtaggcgtaagaatggatgtaaaaggagtgcttatagtcggtcttgaagaaattgatacaaaagatggaaatactgttaatcccggtctcgatgccgggcttgaaataggtgatacgatactcgaaataaatggaaaaaaagtatataaagcaagtgaagtacaggaattagtaaatgaagttaaagatacagtaaaactgaaagtgcagcgtaaggacagaagtcttaatatagaactttcacccgttgttgctgaggatgacggactttataagctcggcgtatggataaaggataaaacagccggcataggtacgcttacattttacgacccggagacaaaaaagtttggtgcgctcggtcacggaataacagatatagaaacagggacagttctcagcgtcaacgaaggcgaacttctcaattcaagagtcgaatccgtaaaagaagggaaagtgggcactccaggcgaaatacacggtatattttacgaggcggaagctccgctcggagcgcttgataagaatacaaaattcggcatctttggcagtctctacaatgatgtagattccggactctattcaaagccgctcgtcgccgccacacagcagcaaatagaagaagggcctgcttatatattgacgacgatttcgggagacaaaatagaaaaattcgatgttgaaatagaaaggcttacgccgcagaccacacccgatactaaaagtatgataataagagtgactgacaaagatctgctcgaaagaacgggaggtatcgtccaaggtatgagcggcagcccgattatacaaaatgatcgcataattggtgccgttacgcatgtctttgtcaacaatcccgaaaagggttatggcatttatatagaatggatgctgtcggaatgtgattcaaaataaattgtatatgtcgaatactgtcaaaacaggacgtaattttgtggcaatatacagttgaaagccctctgtaatttttttaaacttatagtatatttaaaaaagtacgcgtgacctttatgcattacaaaggggtcttttgcgggggagggataaaatgaataaaatacgtcttggcattgccgatgacaataaggatttctgcgatattctcatagattttttcaatgctcaggagaatattgaaattgtatttgtagctcacgacggaatggaaacgctatcgtgtgtcgaaaaatatttgccggaaatacttattctcgatatgataatgccgcatcttgacggacttggggttcttgagtcgctcaacagcagcgatatacccgtacatccaaaaatcataatgctgtccgcagtagggcaagagagtatcacacaaaaagctatagactttggagcagaatactatgtcgtaaaaccattcagcctcgaaatactgttaaaaagaatccggcagctttctggaaacgaagagcagttttgcaaaaatacgggaaacaaaaacagacaaaatgtcggatatacgaaaaacagcgatcttgaaatcgacattacaaatatgatacacgaaataggcgttcccgctcacataaaaggttatcagtatctgcgagacgcaatatctatggtcgtcgacgatatggatatgctgtcagctgtaacaaaagagctttatcccgccatcgccaaaagaaataaaactacgccgagcagagttgaacgtgcaataagacacgctatcgaagttgcctggaatcgtggtaaaatcgaaaccataaacaacttatttggatatactgttgcagaagacaaaggcaagcctacaaacagcgaattcatcgctatagtcgcagataaattaagattagaaaggaaataaaaaactatatgattactcaggaaatgatcgaccgaataaacgaactttctcgcaaagaaaaaagcgaaggccttagcactgatgaaagaattgaacagcaaaaattaagaagagcatacatagacgcgttcaaagagaatctcaaagcgcaacttgataacataatagtagtagatgaagagggaaatccgactgcgcgtaagaattagtcgaaaaaaagagaaataaaaatctattcaaaggcaggaatttacaagtttcttgccctttttattttacaatattttcgggaggtataattatatgatgactttcagaaaatattacaatttacttttcgtaccggcaatgcttattatatttctgacttttttctcaggatttgcggtaaagagcgaaagtgaagaaataaagtatctgctgcgcgaacggacgcgtattttgcaggactgttactatggacttatagatgcggaaagtgcagaagatgagcttgccggtattgaaacatatcctattctcagtgaagatataaagggtcttcgcgaatgggaaggtacggaagtggatatcgttgaaaaaatgatattcacctcacttgaaaagaaacacagcattctcggaagtgaaacgtaccgtgcagaaatatgctgggaagtctcggggctcgg

SEQ ID NO: 1396 - DNA, 17360 bp, Unknown
  16S sequences of unknown bacteria
ttagaaaggaaattgatccgttttaagattttggtttgatatcacagatgagaaaaagggggcgtttttatgaaaattcaggaatctgcagaggattatttggaatccatccttattttaaagcagacaaaaggcgcagtacggtccattgatattgtgcgctatatggaattttacaagcccagtgttagcagagccatgagccttctgcggggaaatgggtatattcacatggaaaaagagggatggattgaattgaccgatgcaggccgtgagattgcagagaggatttatgagcggcatcgcctgctcagcgagtggttagtggctcttggggtttcagaagaaattgcggcgaaagatgcctgccgtattgaacatgatattagcagcgaaacatttgagaaattaaaagaacatatttctcaaccaagaaaatagtctttgcgtaagttgttatctcagaaaattatagaaatagaaaagcctcctgtttcaggaggcttttctattaagcagagataccggcgcttaatcaaaattttcgtaagataagaaataacccaatacggtcgatacgtttttcacattgtcacggcgctgggaacccttataagttttgcgaaaaaagaggaatcgttttcgagcaaaaactgtgaggaagaaaagcccttcattgcaaaaattgcaggataagcgtataatagaaaaataatacacaattgttttttctgtacattcgaattagaatgccggatggcccgatttttaaggccgcgagttaagataattcgcactaattgttttgatttgatgatcatattcttatggggagagaagcaaggaggtcggaatgttgaaagaacaactgctgatgggaaatgaagccatcggtctcggggcgcttcacgccggtgtggggtttgttgctggatatcctggaaccccgtctactgaaatattggagacagtggcaaagcacaaaggaaaaggtgtttatgtcgagtggtcagtcaatgaaaaggctgctttagaggctgcggcaggtgccgcgtatgccggagtccgctcaatggtaaccatgaaacaagtcggtctgaatgttgcgtctgatccgctgatgagtttgacttatgttgggattaaaagcggtatggtcgtggtagtggcggatgatccgggtccgatttcttctcaaacagagcaggataccaggcgctttgccgaatttgccaaactgccggtatttgatccttcttctccggaagaagcctatcagatgattggagatgcgtttgcgctgtctgaacaactgggtacgcctgttttgcttcggccaactacccgcatttgtcatagttatgtttccttgcctatcgaagagtgtcctgtagggcctgttgcggcaggatttgtaaaagatacttcccgctgggttatttttcccaagttaacctaccaaaatcatcaaaagatcgaagcgcgaaatgaaaagttgcgggaaactttttctacatatcggttaaaccggttggaaggttccggtaaaaaaggaattgccgctggtggcgtcagctatgcatatacgaaagaagcccttcagttgttggaaaaagaacccagacttttgaaaataagtacaccgcacccgtttccggaagcattggctctttcgtttttggatggattggaagaagtgctggttctggaagaactggaccctgtaattgaacgggaattgacctatctgtgtgggaaacaccatttgaacgtgacgatcaaaggaaagctgacaggagacgtgccgaatgcgggtgagctgtcggtggaaattgtcaaagagcgcatagagcgttatttgggattgatatcttctatgccggtttctctgccagatctcccttcgctgccggtccggccgccggtgctttgcgctggttgtccgcatcgagcttcgttttatgcggttaaacaggcgatgaaagggaaaaaagcagttttttccggcgatattggctgttacacattgggcaatgctgccccgctggatatggtggatacctgtctgtgcatgggagctgggatcaccattgctcaggggctgcaccgagtggaaccggatgcggtgaattttgcctttgtgggagattctactttctttgcttctggattaaccggtgtagtcaatgctgtttataacgatgcggatattgtattgattgttctggataattccacaaccgccatgaccgggcatcagccccacccaggtacgggaaaaacgatgatgggagagtttacgcaaaaagtcagtattcccaagatgctggaggctgcaggtgtatcttttatccgccgcgtaaatcctctggatttggcgtctgccatacaggcggtgcaggaggcagcgtcggttcgcggtgtttcggcggtgatatttgaatccccctgtgtagcgctgataaaaccggagacggtgcacatggtggaccctcaggcctgcattggctgcagtagatgcgtgcgggaattgggttgcccggcgttaacaatggaaaacaaaaaagcaaaaattgagccggatatgtgctatggctgtacgctttgcgcgcaggtttgcccggttgacgccatacggaaggaggagaaaagggcatgatgaatattttgcttgcaggagttggaggacagggaacggtgttagcctccaagcttctggcacaggcagcaatggagcagggatggaaagcccgcaccgcagagaccatcggtatggcacagcgcggcggctgtgtggtcagtcatgttcgaatcggtgatgatgtgtattctcctttgattccacatggtacggcagatgtgattttgggttttgagccagcagaagcagtgcgctgtctgccgtatttaaaacacggcggtacggttgtagcggcaaaaaaggcagtgaaaccggtaacggcttctttatcgggtgttgactacgagagtgaatcaatgctggattttttgaagcgtcacaccggtcgagtaatcattgtagacacagaagaaatctgtgcgcaatgtggatctgcaaaggtgctgaatgtggcgcttctgggagcggctatcggcagcggtgcgttggcattttcgttggaacagatgcagcagacgattcggcagagggttccggaaaggtacttggttatgaatcaaaaagcactttcccttggagctcagacagctcaacagcagatggaattagaatagggaataaagggttctatgctgactgggttgacatttttggataaacgtgctttaatgaaagaaaccgttgacggagaagtaaaactgccgacagcgcccacagagattcgggaaagctgagaacccggaggaaatgcgcggcagataaatggactcctgagggtgcgttgaaaagtgttgaaaggcgcttagtatttcgcaacgtctgcccacgttaagggctgggggcgtgatggcgcatcctgattgagcgggcgcggatttttccgtgtcaaacaaggtggtaccgcaggtttacacctgtccttgaaaaaggacaggtgtttttttgttttccagccaagatgataaaaagctgctgggtatctaccgccgccacagtctcctgatattggcgattttgataaaatggagagttgcgacatgaaaatgaaagaagaacagtttcgtctgatccaagcacagatcaaaaggctgatgggtcagggcggattttacagtaaaaaatttgcgggaatcgacccggattcgatacaaagccaagaggattttgaaaaacttccttttacctggaaaggggatttgcgggatgcctatccactggggttgcaggccgtaccggatgaacaggtggttcggatccattcttcttccggtactaccggtacgccggttatcattccctatacaaaaaaagacgtcagcgattgggcgtttatgtttaaacgctgctatgagatggcgggcgttaccgcgcgcgaccgcatccatattacgcctggttatggattgtggacagccggtattgggtttcaagccggcgcggagctgttgggggcgatggcggttccgatggggccgggcaatactgaaaaacagcttcgtatgatgatggatctaaaaactaccgttttgacagcgacttcatcgtatgcgttgctgttggctgaggaaattgcgcgccgcggtatcggggatcaaattcacttaaaaaaaggcatcatcggatccgaacggtggggagaaaaaatgcgccgacgcattgcgtctgagctgggcgtacagctgtatgacatttatggcttaaccgaggtatatggtcccggcattggcatgagctgtgagcacgagtgcggtatgcactactgggacgattacgtttattttgaaattatcgacccgaaaaccggtgagttggtaccggatggagaaatcggagagttggtcattactacattgcgaaaagaaggagcaccgctgatccgttatcggactcatgatctgacacgtttcaaattgggggattgcccctgcggatctccctatcctagaattgatacgttaattggccgaactgacgatatgacaaaagtcaaaggagtcaatatttttcccagccagattgacgaactgctacaagatattccgggcgcttccagcgagtatcaggttatgattgatcatctgaacggaaaggatattatgaccttatttgtggaggcagagcctggcgcagaccgtcaaatcctgggtgcgaatattggaatgacttttaaagcaaagatcgggatttctatttcggtaaaaccggttgccattggagaactgccacgcagtgaaaaaaaatcgactcgaattttcgataatcggtactgatggaaagacagatatgagattttaaatcgttttttgcagatgaaaaagcacctgaagtttcaggtgctttttataatggggatggctttatttcttattagctttccggcagccgagtaaaagcgaagcagcccaaaagagaaagaaagcagcgatattcacgcagacaacactggcgccagccggggtagaccaggcataagagatgaaaataccgatcaaaaaacacgaaacagataaaattgccgaacagataaccacggaacgaaagcttttaaaaattctcatgctggtcaatgccgggaagataaccaaactggaaatcagtaaagctcccatcaatcgcatccccagaacaatggttacagcagtcagcagtgcaatcagcacattataccaaccggctttcacaccggtggcccgggcgaaattttcgtcaaaagtaatggcgaaaattttatggtaaaatactacatacaaacccagaacaattgccgctaaaacaatactaagccagacatcatcttggctcatggcgagaatactgccaaacatatagttgtaaacgtctacattcataccggtggaaagagatatggccattactccgatcgccagtgctccggtagaaattaaggcaatggcggcatcccctttgatcttgctattttcagaaagacgcagcagtaaaaaggctgcaaccataaccaccgggatggcaactgcaaggggagcggcatgaattgcggtggcaatcgccagcgcaccaaatcccacgtgggaaagcccatctccaatcatggagtaccgcttgagaaccaaactcacccctaaaagggaagcgcagagcgataccagtgcaccgacaacaatcgcccgaatcaaaaagggataagaaagcatttgtataaacaggtcaatcacacacttcacctcccaaaaactgtttcgcggcactgcttttcaaatagtcagcggttttgccgaaaaagagcgggcgattgtgcaaatgcagaatgtggcttgcgtactgcactgcgctttggatgtcgtgcgagaccataatgatggtaataccctggcggttgagcttttgaatcagctggtacatttcgtgagtgaccatagggtccagtccggctactggttcgtccagaagtagaagcttacgggtggcgcacagtgcccgcgccagtaaaacccgttgctgctggccgccggaaagttcccggtaagatcggcggcgcagttcccacaaatctaactttttcagattctcctgtgccaaacggcgcagcggtgcggaataaaaaggggagagcccgctttgattcatacagccggactgcacgacttcccaaacgttggcaggaaaatctttttgcgccccggtttgctgcggaagatatccgatctcattttgccgcagtccatctccgaatcggattgaaccgcaaaacgggcgtttgaaggaaagcaaggccttgattaaggtgcttttaccggagccgttttctcccacaatacatagataatccccattgtgaacggaaaaggataggtcggacaaaacaacattgttttcgtatgccaaactgatgttttcacaggtgatgaatgccatgtcagcgcaggacctccttgagtgtgtttaaattttgttccattaaagacagataggaggcgccgtctttttgttcctgggcagatacattatgacaggagtgaaacagcgcagttttggcgccggtagcttctgcaatactgtctgctacctggtgattggaaaactcgatatagaatacggtgctaatcttttccgatttgaccttatcggtcagaaaagcaatcgtcgcagcgctgggttctgtctcattgctgcatcctggaaaggcggcaaaacagtccaaaccgtattcttccgcaaaataacggaagggaaaacggtcgccgaatatcattgttttatgggaaacgcctgcaaaaaaatcgcggaaattttggtccagtgtctccagttcggaaacataggagtctgcatttttttgataaacttctgtattttccggattgatacggcacaatgcttgttcaattgcccgggaaatcaagatggcgttttgaggagaagtccaaacatgctcatcatattccacttcatgcgcatgagatgagtcttctgcctgcattccttccaaaatttcttcctcatacacgtcaacacaatccatcatttttaccgtattgatcggctgctcaagagaggagagcagatcgtccacccatgtatcagattctccgcctgtgtataaaaacaaatcacagttttgaatttgtatcatgtcctgcggtgttggctcataagagtggctttctacaccgggagagagcaggatggtaatgtctgcattttctccggcaatggcgcgtgcaaaatcataggaggggaagatggtagaaacgatttttagtcgcccgttattttgtgaagaagaaaaattcccggtgcatccggtgaaaatcgacgagataagaacagcgcatagcaggagctttgacaattttttcataatatcctccaaaatgttattgtaatgcacaaggacaatcgtattatgaaccggttcgaagtgcttgaaacggctctggcctgtcagcggcattttggacacaatccatataaaacactttttccactgtcaactaaaaagccgtgatctgtttcaatatgtttctgcatttccttcatcaaacggcagtccatatggattaactggccgcagcgcagacattttaaatgaaaatgataatggcaggattctgattcgttatattggtaaaaagcgctgctcccgccggattccgtatacttttttaactttccttcctggctcagcagtgtaagggttcgatataatgttgcggccccgaccgaaatgcttttctgctcgattaaatcttttgcacaaaaacattcgcctggatgtgcggcaaaaaattgcagtatcatttcccgctgcttggtgcggtagggacgtatttctttcatttttaagcccccaatttgatatcgattatcaaattggagtatatcacaggaattagattaatgcaagagcaggcgaacctgtttccaacatcacagaaaaagagaccttggagtgttttttctaaagataatcctctctgtggtaaaatggagagggggttaggtaattctgcccgaacagataaaacccgccatccgaaaccggatgacgggtttgtaaaaagaatcgattcgaattaagaaacaagattcaatcgaagactatcttttttccatatcggcgcggattccggctgcaagatccaaaaccgaatgtttctcataatgttcaaattcctgggaatttatgatcaaagctcccatgcgttccatatcggataaatttgcctgctggatttcctcggtttgagaggaggtacagtcagacaataccacaacgttatagtctagtgcgttggcatcgtagcaggtagtgcggatgcagttaggggtagtagtaccagccaggataacggttcgaatatccatccggcgcaggattagatccaattccgtttgaaaaaaggcgctccatcggggcttaatgatggtgtaatcaccttcctgagggcgaagaccttccggctcctccgcgccatagctgcctggcgccatactgcggccgccggcaacccagctttgatagcgggtacactccacatcactgccgtcttcccggtaaatacgcttgacgaaaaaaacagggatgccttttcggcgtgctgtctgaatggcggcttcacaggcaggaactgtagcggcagctcctttaatgcagtgggcggaagcaggatcgataaatccctgttccatatcgattaggatgaaagcggatttggttgagtttttcatctgtttttcctccaagatgtaaaagcttttgcagcggctgatttaaaaaaattcctctgataaaacagtagtccttttttaaaacagttttgttcaaactggattttatccacaaaaaataccgcacaaagttggattcatacggcattgtttctatcattatctttggaaagagtttgccgagtttattggctgtcagaaatatttccgatagtcaattttgttattccagaatatccatatcatttagctttatgattttgctttgctatctgtgcttttgatttattatgtgggatcaaagtgattatttatttggagcaatgtttttgaaaagtccgttccatgtttctccgaatcaaataagaccgttactttgataccaatcgtatcaaagtaacggtcttatttggtggagacggtgagattcgaactcatgacctctcggatgcgaaccgaacgctctaccaactgagctacgcccccatattgattctgttgttcctacgacaacgcatataagtataatcgatttttgacaaaaaatcaataggattttataaattttcttattgaaaattctatgcgtggttatatcgaaaatcgttttgccgatgatatgattaattttaaaagggtaaaataaaattttctaaacaaaacaccaattttttcagacaccaattgacaagtgggttggttttactataatgagaccgtatttgcaacaaaacaaattgggaaaaagagtgaggaaactacgatgaatggcacgcctaaaatgatccagccctcctatctgttgaaattgacttggccagtctttgtggaactgattcttcaaatgttggtcggtaatatggatcagttcatggtgggacagtattctcagctttcagttggtgcaatcggcaatgccaatcaaattctcaatgtgttgatcattacgttcagcgtaatcagtactgccgcgatgattttgatttcccaatacctgggcgcaaatgatcggcagaaggtgcatcagctgtatacgttgtcttttgtggttaatacggttttgagcctggtaatcggtgcagttttactgctgtgcagcggaccgattttccaactgatgagggtgccggcggaactgatgaaagaatcgcagcaatatatcagtatcattggcggatgtttgtttttgcaggcaatgcagctgaccctttcttctttttttcgcagccacgccatgatgaaggaatcgatgatcgtatcagttgttattaatattgtcaatgtcggcggcaacctggttttgattaatggcaggttcggtctgcccgccttgggcgttgttggtgcggcaatttccagcaaccttagccgtatagcaggattggcgattatgttttggattttttacaaaaagctgggggcccgtttttctttgcggtatctgcgcccatttccccaaaacatgctgcggcaactgctgcatattggattgccctctggaggagaatcgctgtcttataatatgacgcagatttttatcatgactttcgttaacctctttggctccgtatcgattaatacgaaggtatatgccagcatgtttgccatgtgctcttatcttttttcttctgcaatcggacaggccagccaggtgatagtcggctatctggtcggagcgggcgatttgaaaagtaccaaccggcaagtttggtatacctgtaaactgtctatgttggtatcattgatcgtggcgacagctttatttgtgttgagcaaaccgattttcggaattttcacctctgatccagaagtgattcggctgggcgcagtgatcatgctgattgaaatttttctggaatggggcaggagcgttaatattgtgatggtgcgatgccttcaggcggcgggggatattcgttttccggtgacattgggcattctgtcggcctggacagtggcagttttgggcggttatctggtgggagttgtggctggttggggactcgtcggcatctggattgccatggcctgtgacgaatgtatccgtgcggttgtgtttttattccggtggaaaagcggtgcctggaaaaataaaagttttgtgcagccaaaagaaaaaatggctccagaacaggcgtaagcctgcgaaataagagaagctgagtcgttctggctgcactctcttggaatgaattgacattccttttttcgggaattataatgaaaacagtgtagcttttttcttagttttcatgaaagggagttttcctatgtatcaaaagcagttggaagaatattttgcagcacaccgggacgagatgatagaagatatctgcacgttgattcgtattcccagcgaccggcaggaagcaagagacggaatgccttttggcgagggtccggccaaagctttggaggcggcgatggaaattggctgccgtatggggctgagcgttaccgattatgaccattatgtggcgacctttgatttgaacgaacaggaacgcggcttggatattctggcccatttggatgttgttccggtgggggacgattggacggtgaccaagccatttgaacctaaaattctggatggaaaactgtatggacgcggttctgcggacgataaaggcccggcagtagcgggactttgggcagccaaagcggtcaaggatttgggaatccctctgtccaaaaattgccgggtgattttaggtaccgatgaagaaagcggcagcagtgatatcgcccactattatcaaatagaaaaagaagcgcctgctaccttctcaccagatgcagattttccggtaatcaatgtggaaaagggtagttacagcagcgattttaccgcccagtggacagaagatgaaaaacttccccgcatattgtcggtaaagggaggattccgccgaaatgtcatcccagataaagcggaagcggtgctggagggcatcgacctagaaaagattcgttctgcctgtgcgcagtacagtgtggaaagtggtgttgcttttgaagcagaagagaagaatcataaaatctttgtaaaagcaaaaggccgggccgcacatgcatctaccccagaagtgggagcgaatgccgtaacagccatggtggaatttttgtccagactgccgatggctgattctgaaggcttttccaaattgtgtgctgtcagccggattttcccccatggagattgggcaggagaggcggcgggcgttaaaatgtctgacgaagtatccggacctttgaccattgctttttccgtctttgagtacagcctgacaggtctgattggtatgtttgacagccgggtttctctgtgcgccaatgatcagaatatgcgggatgtgttggtagatgcgtttggtaaagcagaaattcatttggggaatcttaccatgcgtccgggccatcatgttccagcagatagtccctttatccggactttgctgcgttgctacgaacagtataccggcaaaaaaggcgaatgtattgcgattggaggcggaacctatacacataatttgaggaacggcgttgcgtttggttgtgctgatccgacggtggataatcatatgcatggtgccgatgaatttgcagtcattgatcagctggttttaagtgcaaaaatttttgctcaggttatcattgatatttgtcaataataaaaaagccaaagggagaggacttccttacgaagcctctccctttggcttttgtaatcagccggaatgattggattgtaggtaaaatcaatcataattggaggattacaaaatggataagtacatttatgacgagaaaaacgggctttggtatgaattgcagggtgattactatcttccctgcctgaaactgcccgaagaaagaacggcttatatcggcgtatggggacagcggcatttatggtatttgaagcagtatcacagggtacgttactacattctgctgacaagcggcaagctgaacagttatcttgccgatatttgcaatcaggcagaggaactattctttcggttgctaaaacaaatggcaaaggcagaaagcattaatgaacagttaaaagtcgccgacttcatggcttgggtaagtaaaatgaacaacattcgaaaccaagccatcgaaactgtcaattccgaaatcatatacgcataatcagcaaaatgaccggcagggaaacctgtcggccattttctatacatctcttttatgtgttctttgctatttgatttctgttatcggtggaataaagttctctattgcactacgcaatttaggatggtgaatgacgaaatggattgcaggcgcttttcctttggataccattgcccagcggccttcgtgaatcagaatttgcagattgtcaaaagcgtggactgtagaacattttactgtgtaattcatattctgctcggcaaacgccatggtttctctcagatgagctgtatattcttcttcactgtacataatgtctgtttcatagaatagtgccgaaagttctaaaaccggcggtctttctttgaaatcgctcggacgaaaggtcgggatctcgtcttcaagtgtttcggatgaaaggattgacaacactctttgcctttgtgctacggcgtgttttttgatgcgctctttttgctcggcttccacactgttccgagtcagaatccgatcgagcagttcctcactgattgtgtacagtggtaatgtagaatagatgcctcggcagccgcccggctttcctgcattggagagcagaaaggtagtcaattcattttcctgttcactgcggtaaatatccatcagtggataggcatttttcagcatttcctccgcccgttttcgataatactccacttcgcgctttgattttgtaagatagtattttccatcggaatggtatccggcaatggcttcacccgaaagagctgcagttccggacaccttcaaaaggtgcaggaagatgttattttgcgcattcttgaagtaatacggcgagatttgcccggtcatatacatcggaatccagctttcaagacccagcatcatctcgtcgaaagaacggtcaagattatggatttgattgagatgtaatccttttttcaacatcatcgccataccgaacatccactttttcgggaaatccggatctttcgccatctctttcatgggcatatcgctgtacatgattacaggagtcatggatttagatagtaccgtcgcttttaagaaatccagttcactttccatcatttcttcgattccccagtaggtcttagaggtcggaatctgaaacggtacggacggaactttcaatttatcaaatttgataaccttgatatactcattcagatcaaattcatccagcttatgtaggaactccgatatgctgtcacttccggtattctgcgcctgttgctccaaaagccagtctttaattttggaatggcgtaccgatatatcttgaattttgtcggcattacaaccaataagctccgccacggcagcaatttccggcggagttttattttcctttgccacaaaggaagcaaccacagaggcaaactgttcgaaatttcccggatttcttgtgccgtttcgaatacgaaaaatggcggaagcatcgtaatttatgtactgacacagtctcgtcaggttgatattcaggacggtaagaagcgtgttaaagttctgtcggagaatctccttgtcgatggatacaaaatcctcgcaggcaaggaaagacgctttgacggagtctgccgtaatgtccgtgaatcctttttgtgcggcaatttgtgcaatagcattgcataaaccctcaaagggctttgttcccaattccggcacacgctccccgtttctgtatctgctgaaagaggctgccgagattccggacaagctgcaaagctcttttgcagtacaggaaagacgctccatatattcattcagtttgtgatgaaagttcataaaccacctcgctatgcttcatttaatagtattataacggatttgttcacgaaagggaatagaattcctatatagatttccaaaagagtcaattgacgcttcgggaacgatgctgacattctctcttgaccaatggtaaaatgatactgcaaaacaatgtcttaaatacgcttcagtaggttatggattgttgccgtccattttcactgtggtcgtgggaacagacaattttagcattgatttttatgcggcgatagtcgcagaaaggagaaaattatatgaaaacaaaaccaaaaagactgtgggctgttctgctgactttgtgcttggcactatcctttgtgccgattacggcgtttgcggattccggagcgtatgctgttaaattttaccccggagattatggaactatgactaaaaacgaccagattccgtatgtgtattatggcattgactatgatgttaacaaaccctactactacaagctgaatatatccgaaacagagactctcagctttgccagcagcatcatcaatgttttgcttccaaattcaggctatgagttcgcctactggacagccaatgctaccgtctaccaagtcggtagcggtactgccattcccgctggcaccgctctttcttctgatcaactacagaacaaagttaccataaaaagtgacgtgacgttcacggctcactttaagcagatctctgaatatcctgacgattcagtaatcacctctgccgctgtccagaatgtgaaattcaactatcagccgggtgatgctccgaaggcaacggcacaggtatcggacgcttcattagacaaatacgagatcgcctatgaatgctgggaggaaatggagaacggagcgccggttgcgttctggtattctgatgaaagtaaatatacgccttccatgaaaaagattactcagtttgaagagggaaaaacctatatgtattccatcgagctgaagcaaaaagatggatatacctttgcggataactgctccgttatgataaacggaaacccgttagcggcaagtgccatcgtcgttaaaaccatggccggcctgttcgccatgaatgttgagacgattcgcccgcaagcaaccaaggaaatctccgttattgaaatcaataacgcaaccttgacctttaaggacggcgacaaacccgtttttaccggaacggtgcctgaaaacgatcagtatgcattccgttgcgagtggtggagcttagacgagaataccggcattgtttccgcagagccggagtggggcggcgacatttatactaacaagatcaccgcttttgagtccggaaagacctatcactacggcgtatatgtaactgcctatactgccgacatctctcccgatgctaagctaaagattaacggccaggaagtggagtacactcgcataggcgatgagagtgacacccagagtttttgggtcgaaaccgacctttccatgatgcctactacggcaggtgcttcggattataagattatcgaaggagcaaacggcgcttggacgcagaacagcgacggaacgctgaccttccgtgcaaacggtgatttcagcaaattcacaggcgtgaaggtggacggaacgctgattgatgcgaagaattatacggcagtctccggctctactgttattacattaaaagccgattatctcaagacactttctgtcggcacacataagctcacggttgtctatacagatggcgagtgcagcacgaattttgtggctaagcaggctacctcggagcagacaaagccaaccgaaggggacaaaactgatactacaacatcaacgggcggcaaggataccaaaaatccgcagacgggagataactccaatcttttgttgtggattactctgctgtttgtcagcggcggtgcagtaaccgtaacaaccgtttgcggcagaaagaaaaaacgcagtgtaaaataaaatcaaatgatcaatcaaaagacggctgtcggaaacggcagccgtctttcctgtcacaatataccgaaaaagattgacgaacaagcgttctatatgatataatctatatgctctcattggagagccacaactgaatatctgaatgaaactcaaggcagctgccaaaagggattgctgctgcgccgttcctgttgcagcgtctgcctgcgggacggaaaagcagacattgaaggtttctgaatttcagagccggtacatagtttcatcaaagatagagcgagagattatctcccgctgatttgatgtgctgtgtaccggctctttttatcgttatagccgccgttcacaaaagatttacaaaaattcttttgttcaaacggcaaaaaagttcccagttgattattgagggggttaatttacagctcttctcgctgcctacctattggggggcaaattgaaaactgaatgaccgtccgaatgggatatgactgagcgaagatatgagcttggcgacgctgcggtgagattccggggcaggcacagaaaaacgacattcggagaaaacg

SEQ ID NO: 1397 - DNA, 17677 bp, Unknown
  16S sequences of unknown bacteria
ctgaatttccagtatcgcaaagctttctgccggcaggcttattttcccgtccgtcggcttattgccgaaaatcggctttgctgctttaaattcatccggaacggtcacttcagacggctcatgccagcggttaacagccaccaaaaccgcgtttttccctttgcggcggatatacacaatatccccgaaattcgcgtaaatcggataaaattctcccgaagcaaaaacgggcgagcttcttctgaacgtgccgagctttttataaaactccaaaagctcggtattttctttgccccagggatatcccgcccggcagaacgggtcgccgtagccctgcatgcccgcttcgtcgccgtaatagacagacggcacgcccggcagcgtaaactgcaaaaccgccgcaagctttaaaagacgcacgccgcgggaatattcttcatcagtcagtttctgcgccgattgccatgcgcggtcgcccgtttgcccgttccccttacccaaaacggttaaaatgcgtgcagtatcgtgcgtaccgatatggttcattaaaagctttaccgcctgcggtgggtaattttccaaaatatcaagcacggtatcaacaagatctcgggaatttccgccctttacataatttacaatagcgcttgcaagcgggtaattcataaccgaatcaagctgccgcccgcgcaaaaacctgcgcctgctgccgtagcttatcttatttgtcgcgtcctcccatacctcgcccaaaaggtagttttccctgccctctgcctttattgcaaggcgtatgcggtcaagaaacgaatcgggcagctcgtccgccacatcaagccgccagccgcgtattccctttttaagccaatagcgcagaactccgttttcgcccgtaataaagtttgaaaaggataaatcctcctcgtccgtttcgggcagcgacggcacaccccaccaacaggcatagcccgtggggtaattaccgaatttgtaccagctgcggtaagcagaggtatcgctgttctgcgcgccgacagagttatatctgtgctttgagttaaaatacacgctgtcatcccccgtgtgggaaaaaacgccgtcaagaataatgcctataccctgcttttgggccgcgttaataaggcggcaaaaatcctcttcggtgccgagagagggatcggtctttaaataatccgccgtattgtagcggtggtttgagtgcgcctcaaaaatcgggttcaggtaaatgcagttaacgccgagcgattttaaatacggcagcttttcctctatccccttaaaatcaccgccgaaatagtcattaccaagggccttcggttccgccgtctgacggtattcgggttgtgcgtaccaatcattttgaataaaacggtcggcgggaacattacttttttccgccccgctgttataaaacctgtcggggaaaatctggtaaattattccgccgtcaagccaatcgggggtttcaaaatctgcgttatataccgtcagctgccattctgtaccattatccgatactatgcctaacgaatgctcggttttggtcaccttaaactcaccgtagtcgcttgtatatctgaaggaataccaataaagcccctctgcaagggttatgtcacagtaataataattgtattcgtcaatgccgccgtccggctgcattattgcctctctgtaagtttgttcatcatcccttttcagccttaaaaaaaccgaatggacatgcgcatccctatgcaacaatagctttagccgaagggtctccccttcggctaaagctcccaatttatttctgtataagctgctgcgtgaatcaaaaggataatattccatattactctaccggtgaaatgtgccaaatattctttgcatattcttctattgagcggtccgccgagaaaatgcccgactgcgcaatattggtaagcgacattttctcccaacgcgccgtgtctgcataaagcttgcttgccttctgctgcgcctttctgtaatcggcaaaatcggcgagcgccatataggtgtcgtgattctttaatgtgttgtagatattttcaaacggctgacccgctatgcccttgcctatgaaatcaagcgccgccttaagctctgaattgttgttgtaatactgcagaggagaataaccgtttttctgcagtgccaaaacctcgggagtctgcataccgaagattataatgttatcgtcgcccacagcggaatgaatttcaacattcgcgccgtcctccgttccgagggttattgcgccgttcatcataagcttcatattgccggtgccgctcgcctcggtagatgcaagggatatctgctcgctgatatctgccgacggaatcataagctccgccattgtcaccctgtagtcctcaaggaagagtattttaagcttatcatttaccgcgcggtcgttatcgataacgcttgaaagcttgtagatcatctgaataatttcttttgcaaagaggtagcccggcgccgcctttgctccgaaaatataggtcttcggaataaagtccgcattggggttattctttaaataaaggtattcggaaattatattgagcgcgtttaagtgctgacgcttatactcgtgcagacgcttaacctgcatatcgaaaatagaatcaggatcaagcgtgattcccacattttccttaacataatcggcaaagcgcaccttatttatgcgcttaatatcgcgcagctttgcaagaacctctttatcgtccttataagcgttaagcttttgcagctcctctgcgttctttataaagccgtcgcctataagcccggttaaatactcggtgagcgcggggttagcctggcagagccagcgcctgtgggcaataccgtttgtaacattggtgaatttatcgggggtcatttttgcgtaatccttgaaaagctcgtttacaagaatttcgctgtgcagctttgaaacgccgtttacggtgtggcaggcggcaacacaaaggttagccattcttataacgccgttttggatgatcgcggtgcgttcaactatctgtgtatcgcccgtaagtgccataacatcgtttctgaaacggcggtcaatttcctttattatctggtaaatacgcggtatgcgggtatttatcagctctaccggccagcactccagcgcctcgggcattacggtgtggttggtataagccactgtgcgggttacaatatcccatgccttatcccagccgtagccgcattcatcaagcaaaaagcgcataagctcgggtattgaaagggtcgggtgggtatcgttgatatggatagccaccttatctggcaggttatcaagtgtattatacttgcgcaaatggcggttgagaatatcctgcacggaagcggaaaccagaaaatactgctggcgcagtcgcagtgatttaccctctatatgattatcctcggggtataaaacctttgatattgtctcggtcatggcgcgctgctcaagcgctcttacatagtcgccctgattaaatgccgacatatcaaagtcctggcattcggcgctccacaggcgcagaacattgacggtcttgccgtcctttcccgccaccataaggtcataaggtactgcgtgcaccgtgtggtagcccgtgtgctcaatatggtggtaatttccgtcccaccattcgtttatcttgccgtcgaaattaacatcgactgccgccgccgagcgctgctcaagccatactccgccgccgggaagccaaaaatcgggcatttcggtctgccagccgtcaaccagcttctggcggaaaatgccgagctcgtagcgtatgcaatagcccattgcggaatagccgccggttgaaagtgcgtcaaggaagcatgcggcaagtcttccgagtcccccgttgccgagccccgcgtcgggttcgaaatcgtaaagcttatcaagctttaccttaaactttgcaagcgccttgctcatagtttcggtaagctcaagattataaagattgtttttgagcgatcttcccattaagaattccatggaaagataataaacggttttggtttcgctgtcatcgatactctttttaaactcggcacggcggtcgttcataatctcgagcagcaccaaaacgcacgccttataaaaaagctcatcagacgcctgtgcgggcgttactccgaaattgtgtgaaagcttgcgctcaatcatagaggcaagcgcggttacggtatattttcccatatcagcatctcccttaaaaaaaacaatttaacacatttattgtttactgttttataatacaatattcaatgctttttttcaagatgtatctataactattttatggagaaatattatgcataacaactaaataaatcgtcaaatttaaatataaaagctttattttcgttatttgtaacaagaaaaaccaaaaagtgcggtttaataaacaaaagatcctcccgaccgcaaagtcccccgaaagcaaaacgctttcagcggtactgaaacaggctcgggaggatcttcggtaatctcgatttccgcaatatgcgctgcgaattattcttctgtatcacactcaaggtaggccccgcgaatgcggtttttattaataatacggtcggcaagcaccaaaacgccgactgcagcggcaaacagcgcggaaacggtcagtacaaactttaaaaatcctttcatattaaaaaccacctttctgtgccttattatagcagatttattccgaaaagtcaatcattgcaacgctccgggcaattccgcggtcatcttcaactataagccagccgatacatacactgtcaccctatttaataaatgaaaagccgagcaccgccacgcctaataccaccaaaataacgcctgtggcgatattgagcgaacgcgggcttgctttgtttgctattttcgccgctatgcgggcgaatataagcgtgaacacaacgcaaagcacaaagggcagcatatcgggcagtccgcctattgcaaagtgcgaaacagagcctgtaagggcggtaaaggtcattataaaaacgcttgttcccacggcggttttaagctcgtagcccataacgcttgtaagcagcaggagcatcatcattccgccgcccgcacccacaaagccgcaaataaagccgaccgccgccccgcaaagagcggactttataattcgggttttaagcggtattgccgccatatcctcttttgtggtcataaccggctttactataaactttattccgagcagcagcgtcataaatactgagaaattgcccattgcggcagagggcacaaggcttgatacatagctgcccacaaccgtgaaaagcagcacgcttgccatcataacaacgccgtttttaatatcaagatttttatttttgccgtatgtataggcggaaacggcgcttgccagcacgtcagacgcgagcgcgattcccaccgcggtatacggttcaatccccaaaaaggttacaagtataggagttattaccgccgcggcgctcattccggcaaagccagtgccgagacctgcacccatacccgcaaataaacaagttaaaatcgttttaaatattatcatcctttttttcctccgcagcttcggcgcggtcagcccttatatcccgtatgagcgtataaactatatatgcgccgaacagtacaaaaactgcggtgagtgccataaaaatatagccgtaaggctttttatcggtctttttcgcagcgccctccccgaaggaaagggttgaaaaaaccttttcggcgtaatcggtattttcgcccgaagcggtataaaatgaaagggtatattccttttttgaggtcacggttatatactgaataagggtgaatttcccgccgctgtcctcagatagggcggtagccttaataaattttatgccgttttgcgccaccgtttcggtgtgaaagccatcgcccgctatttcgggggctaaagcggcaattttatcgtccgaaaggcttgtaagctcgcccacactctcggaaaaagcagttgagttttcataaagccttatctgctttgtgttttgttcgttgagagcaagataaattatgccgttgctatagcagtagttatcaagcgaatcggctgtttcttccaatatttccgcaattttttcgttcgactgcttatcgccgtagacaaaaaactccttaccggggttttcggtaatttcggcggcggaaagcgtgagagaaagcgttaaaaccgcaaatgcaagcgccgacagacgctttatgcccgccctaagcattattctgcctttttgcggcggtaagcgtgttttgcataagcattgcaatggtcataggtcctacgccgccgggcacgggagttatggcagaagccttttcctttaccgagtcaaaatccacgtcgccgcagagcttgccgttttcacggttcatacccacgtctatcaccacagcgccgggctttaccatatcctcggttacaaattttgccttgcctaccgcagctaccaaaatatccgcgtttcggcatatttctttaaggtttttagtttttgagtgacataccgtaaccgtgccgtttgcgtgcagtaaaagcattgccataggcttgcccacaatgtttgagcggcctattaccacgcagcttttacccgcaatttctatgccctcgtatttaagcatttccattatgcccgccggcgtgcagggtacaaaatcataatcgcctatcattatgcgccctacgctgtagggattgaatgcgtcaacatccttttcgggtgctatgctgttgattatcagcttttcatcaaggtgtttcggcagcggcagctggcagagtatgccgttaatgcttttcttgttattaagcgtatttataagtgctaaaagctcttgctcggtagtgccttcgggcagagcgtattcctctgaaataataccaagcgcctcacacgcctttttcttattcgcaacatatattttcgaggcggggttttcgcccactattataaccgcaagtcctaccgtaataccgcgcgcgctcagtgccgatacttcgctctgtatgcgcgcctttacggctgcggatattgcctttccgtcaattgtcctgctcatgggtttcctcctgtgtttcttcggtcggttcttccgcgttatcggcaaaaaccgcctcgtaatcatcgggctcggctttttccgccgcacggcggctgaaaactaccaataataccgcgcccgttatgcaaattgcaaaggaaagcagacaggagacctttatgttgccgagcataaggctgtcggttctcagcagctctattatgcccctgccgaagccgtaccacacgcagtacataagggatatttcgccgctgaatttacgctttttactgaaatgattaagtacgaaaaagcccgccaagcaccatatggattcatagagaaagcaggggtgaacaagcccctcgcccatttcggatattgttttatcgctctgcataccccaccagctgctgccggtgaacgcgccgtatgcctcttgatttacaaagttaccccagcggcctataccctgaccgataagaaaccctgcggacgccacgtcgaacatattgagtatgtttaccttgcgtatatagcacataattccgcccgagacaaacgcgcctataaccccgccgtaaatggcaagccccgcaaagcccgaggaattaccgaagccgaaaaagtccttaataccgtctaatttctcgccgtcgaatataacgtaatacgcacgggcggagagtattgcagcgggtgttgcaaccagtataacatcaagcattttatcggggttaagcccgtagcggccggcttttttgagcccgtaaataagcgccagcaaaaagcccgcggctataattatgccgtaccagtatatatcccagtgtcttgaacccagcggtattgtaaaagcaacgggcgaaagggtaaatttaagcccgaaaagcgttacattatagctcatataaattacctctgttcctctgtcggttcaattaccgaaagcaccgatttatccgcgtccagcaactgcagacgctttaaaacgtcctcggcagtaatatttttaagatatttaagctcgtcaaacaagccgcagtcgaacatggcacagtttacaagattcatcgtaatgctttccacgctgttaaatgagcgcaccgcgtcgccgtacattccgcagcgaacggcggaaaacagctttttatcaattccgtcggtcttaattctttcaatttccgccttaatttcggcggctactctctcggggtctgacgattcaccctcaaacatcactgccgcatagccgtggccagtgaaatattcaaagccgaactcatcgtttataagccccgcgtttatcagccttttataaaggggagaggcgtcgcccgctattatttcaagcagcagcgcggtggcaaccttttcctttacggtgcgctcgggcgcgcttacaggctctttaaagcctaagcagaacatagggtaggcgaccgccattttctgcgatacaaaattttcccgcaccgtatcgggctcatcacagcctatccgggtaatttcaacaggctccgagggctttaaggcgccgtttatctgtgccagaaccttttcggtgttcacattgcccgcaatgcagataaacatatttgaaaggttgtaaaacgtgttgtagcagctgtataaaagcttatcatctatttgcgctatcgactccaccgtgccggcaatatcaattttaaccgggtggtttttatacatagcgcccagcatattaaaggtaacgcgccagtcggggctgtcatcgtacattcttatttcctgccctattattccctgctccttgcttacggtctgcgccgtgaaatacggcgactgaacaaaatcaagcaaaatcgcgagattatcgtaaaatctatccgagcaggcgaaaagatagcaggtgcggtcaaacgaggtaaaggcatttgccgaagcgcccgtttcggcgtattttgtaaaggcgtcgccgtcctcgctttcaaagagcttatgctccaaaaagtgcgcaataccctcgggtacgctgaccttctcgccgtttaccgcaaagcaggtatcaatagagccgtattttgtgccgaatatggcataggacgaattatactgcggcttttcaagaatatatattttaagcccggacggatgcaccgctttaacatagctttcgcctatatcgctttcaaaaacctctttttgcattacttttcctccttcggcaaaagcttgtataccgtgtgcagttttactccgtttgccgcggcgattatttcatcgcgcgttacggcgcttattttctctgcaatatcctcgggtgaataaagatttttattaacggctttcagcgcgtaccataaatccaacagcggctgactgtcattataggaattaagcgaatcgcgtagacttttaaccgatgacgaaaactcaaaatcggtaaactcgccttttttcattatttcaagctgctccgaaattgccttttccgccttttcggcgttttgctcctcaacgcccgattcaacggttataagccccttgacccgcgaagaggaagccgagcaatagtagcaaaggctcattttttcacgaacgttatcaaaaagtcttgaatacggcccgccgccgaaaatatcggtcataaccataagcggcatggtattatcgtcatcccccgccgtatcggaagaaaagcccataacaagcttgccctgctgtatggcctgccgctcggtaacggtgcgcggcttgtcggcagcggctgtcggctggctttttgtgcaatcggttatattatacctttcggtattttcaaagcggcggcctatttcttcaaaaagcccctgcggcactgccgcgcctataacctgaacgcgtatatatgcggcggcaagcattttttgccacatttcataaagcgaggcttcggttatcgtctcaatatcccccaccgttccgcacttaggtgtgccgtagcagctgcccttatacatttcttcaataaggcggtttttagcgtatacccgcttttcgctcatttcgccctttacgtgctctatagccttgcgcttttctcttgctaaatcctcggcacaaaatgcgccgttttccgccttgggctcgaaaataaggcttaaaagcatatcgcaggcgcgctttataagcgactcgctctcaaaggtgtacttatcgtttataaccgacattctcagctttaaaagctggtaatctccgagcttttcggcaaccgcgtcaagctgagcgccgtaaagccgctcaaggcggtagttaagcaccgaaaaatcgggatacttctcaccgcaggtggtaagcacaaagggcagcagcgcgtaagacgcggcagtctctttttccagcggcaaataaaagttaaaggatatggatgtagtgttgaacctctcgtttttaacgaaaagcccctctacgccctctgaaatgcgatatactttagcagccattttttcctccttaaaatcagttaaaatcagtcccgaggttatcggagctgtcgtctcccttataggaatttatatagatagtaaccgcgccgtcggggcttatctgtgtgccgtatttcggctcctgctccagcaccgcgcccggctttttgttttcatcgtacttttcaagcacctctatattatcatacaaaaagccctgttttaaaagctcaagctttgcgttaatttcttcaagccccacaacgtttgcaatttttacttccttaggaccgagacttattgtaacctcgattttggtgtcccttacaacctgcgtgccctccgcaagcgattgggcgcaaatttgccccttggcgtatttatcgctgaattccttgccctttataacaaaggtgaatttttcataatcatcgttatcatcaagctcggcataatatttaccggtaagcgacggcaccgagaaaagcaccgcgctttctgcagccccgctgtcgatagtgcctatagaatcaacgctgggtgctgcggtggatacgctgctgctttgatccgacgcatttttattgccgaaaatatcctttttaaacacagtaaaaacaagtattgccacaattccgataaacactgcggcagtgcaagctgcggaaagtataacatattttgccgtgcttccctttttctgcggcctttgcgcgcttgatgcgcgcttttcgggcgcgacgctttttttctgcggctcgccggtttcggcataaaccagctcgtttttaaagtcctcgatatttcccgtgcggtttttcggcagcacctgcaagccgtttgcaagcgcctgcaaaacatgccgcggcagctcctcggcaaactttgcgggaatggtcatcgaatcatttttaagcctttcgggagcttcgggcggaaccgtgcctataagcacattgaaaagcaccgcgcaaagcccgtaaacatcggtatatgcgccggtctgcagtttttcggaattatactgctccactgcggcaaagccggggaaaagctccgctttaagaccgccgtcggctgcgcgcagccgctttaccgagtaacccgagatacgcagttttccgtctctgccgacaagcacggtgtcacaggagattcctccgtgaattaccccgatatcgttcattcccttgagagtatctataagcggcaggaaaagcgggcgcgcctgctcccacttaagagtaccgccgttacgctgcagaaattccgccatggttattgcggcgaagctttgagaaacggcataaaccgtaccgttttcttcaaaaacgctgagaacggggataagcgcgggcagctccgaggagcttattttgcggtttatatccataaactccattaagccctcgttgaagatatattccccgccgcctacaatcgctacggtcttatcgggatttctttctgcaaagcccgcgggaaaatactccctgatgctcactgcggtatcgtcggcagtatcccagccgatgtaggttatgccctctccgttgcgcttctttgcctgacccaccatatagcggttatcaagcgtaaagcctacgggaaggcagatatccggattgcggcttgcagagtcgtagccgcatatagggcatattttctccccgccgttatcattcatgcagcccgggcagagtctttcggtgtttatcataaacttcctccgagtagatatattaatgtattataattataccatatctgtcaagtcgtggcggtaaacgccgcctgcttgcgtttggcctttttgcttaccgtgcctcccggcgctatcggaatcatctctctgaacacgcaggtgtggcgttctgttatcagtctgtcctcatgcagcgagccgaaataccaatgtctgaatttacatgagcgccctatttcctcaagatagccgttaagcttatttatgcgatcggcgtcacccctgcgcagaagtatagcgcttttaacaagggacggcggctcgtgggttataatataatctacgctaagccccgccgcgtcaagccgctttgcgccctctgccatttccataggtgtcggctcttcctcgcgccaccagttgcccgacgctatgcgcatatccttatcgctgctttctcccccgccgaaggtgaaaaagctgttgccctcaatttcaaagatctgaccacgcataaggtggataagatttccctttattctgtgcaccattccgccgtgccagtaggtcacgcgcgctttgtttatggtagtgagattatcatgcgtaccgtccacaaacgcggttacaaaccgtcttgtcgcaaggtaatctattacctgcttctcggtttttccgccgtcaaatatatagccgaagtctccgcagactataagcacatctccgcttttcaattttctgaaatttttatcgtacagccgctcaaggcagccgtgcgtatcacccgtaatataaaccgtaaatttcacctgcttaaaaaaaaattaggtctttaaatttgaaaattatatgatataatagcattatactatatttcaaggaagatttccatgcaaaaaaaaataatttacttttttttaactattttaacggtcgtggctgttatttctccggcttttaccgcctcggcgtatgaaattacgggcttcgaggtatccgcagaagcgggaatgcttgtatctatggatacgggcgaaattctgtacgaaaaaaacatagataaacccatctaccccgcctcaataaccaaaataatgaccgtaacactcatgcttgaaagcgaaaaatacgatcctgccggcaaggttaccatgtcaaaagaggtagacaggctgataaccggcacgggcagcgcggtttccaaccttaaaatcggggaggaaataacccagcttgacttggtttataccgtgcttatgtcctccttcggggattgcgcgtacttagcggcgctgtattacggcggcagcgtggaagcgtttgttgagcagatgaataataaggcggcggagctggggcttacgggaacgcactacaccaaccccgtaggtctgcacgatgctcagaactacaccaccgtgcgggatattcacacccttacgacatacgcccttaaaaacgaaacctttaaaaccgtttgcgaaacggcgcgctatacaatcgaagcaaccaatatgtcgggcaagcgcaccatttccaccacaaaccttatgcaggaccccaatacaaactactattaccaatacgcaaggggcgtaaagaccggctttacggacgaagcgggcagatgtcttgtaagcaccgcgacatataacggctacaactatatgtgcatacttatgaaatgccccgcaaacgcaggtaaaaggtatgagtttatagactcggcaaacctttaccgctgggcgttcaacaatttctcattcaagcaggtggcggattccacagagcccgtttgcgagctgccggtcgatttatcgtttgataccgatttcgttccgctttactttgaaaagccttttgttacggtgctgccgaatgaagcggacagctcaacgatagttgtcaagccgaaactttatcacgaaagaaaggacgctcctataaaaaagggagaaatactcggcacggcggaaattatgtacgccgagcaggtaataggcacggtaaatttagtggcgggcagcggcgttaaggcaagtaaactgcttatagctctcagagccgtaaaaggctttttcggctcgttttacatgaaaataatttatatacttatcgcgcttgtaattgtgatattcatacttatgataataaggctcaatattgcaagaataagaaagcgaaaggtaaaatatattccctacgggaaaaagaaaggcgacgacagatatgaccgttaaaaaaatcatagcaatattatcggcagcgatactgacacttacattttgcggatgttcaaaaagacaaagcgagtttgacagtgataccggcagcggctacggcacccaccacgcagttataacaattaaggattacggcgacataaagcttgtgcttgacggcgacactgccccgataaccgttaaaaactttgtagagcttgcaaaaagcggcttttacgacggacttaccttccaccgcataataaagggctttatgattcagggcggcgaccccaagggcgacggcacaggcggcagtgataaaacaatacgaggcgaattttcgaaaaacggcgtggaaaataacatttcccacaagcgcggagttatttccatggcacgctcgcaggataacaacagcgcctcctcccaattcttcataatgcatgaggacggcgattatcttgacggctcatatgccgccttcggtcacgttaccgagggtatggacgtggttgataaaatagccgaaaacacaccagtcaccgactcaaacggcacggttttaaaggaaaaccagccgataatcgaaaaaatagttatcacagactgaaaaacctcccgccccctgttttgacttctgtctttacagggggcttttgctgtacgcggcggtgcttgacaccctgacatatccgtattcagacataaaaaatcatcctcccgtaccaataatacaggaagatgattttaatttaaatcggcataggcactttattcctttgccgcgtcgattattttctgtgcgagagccgccggaacctcttcataacgcgtaggcgtgagggtgaatacggcggtgccttgcgtaatcgaacgcatggctgtggagaaatccgacatttccgccataggcacttcgcctattatttcctgcattttgttctctgccgggttcatgcctataatgcgcccgcgccgcttattaatatcgcctataacatcgccgagcatttcatcgggcaccagcacattaagagtaccgataggctcaagcagaacgggggacgcctgcggtatgccgtccttaaaggctactgccgccgccattttaaaggacatttccgatgagtccaccgggtgatacgagccgtccaccagcgttgcctttattcccaccatggggtagcctgccaaaacgccctttgcggtgcaatcgcgcagtcccttttcaaccgcggggaagaagtttttcggaacggcgccgccgaataccttttcttcaaataccagctcatccgaatcgcagggctcaaactcgatccagacatcaccgaactgaccgtgaccacccgactgctttttgtgccgcccctgtacctttacaggctttcttatagtctcgcggtaggcgatttttggctttttaagctcaacctccgcgccgaatttggattttaagcgggatattataacatcgatatgctgctcgccgagagcggaaagaatctgctcgtgggtctcgttatcggtgtagaccttaatggtgggatcttcctcgcaaaggcggctgaacgcctgagttatcttctcttcatcgccctttgccttggggtaaaccgcaaccgaaatcgtgggggcggggaactccaccgccgccgcggcaagcttgcccgaagcggataaggtatcgcccgtcagcacattgccgagctttgataccgagcctatatctccggcgataatttcgcccgcgtcctcctgttttccgcctttgagccacattattttggaaagccgctcctcagcgcctgtgcgattatttataaggcgggaatcgttcttgattttgcccgaaagcacgcggaaatatgaaagcttacccacaaacgggtcagcaatggttttgaatacgaaaagcgcgttttcaccgttttcgtcaaaggctttttcctcgccgccctcaaagcggcaaacggcatccgccgcggagggcagaattttaagcagcgtatcaaccataagcggaactgccgcgcccgtttgctggatacctgcgaaaacagggcatatttcgccggaggcaacaccttttttcagcccttcgattatttcctcgggggtaaactcctcgcccgcaaaatatttttccataagtgtgtcatccgccgtggctatcgcctctaaaagcatgctgcgcatttcgtccgcctcgttgcttacgggcatacgcagctctttaagctccaagccgtcgcaggcataggctttattggttataaggtcaatataagatttaacctcgtcgttttcaatataaggaattacgaccgggcagataaccgcaccgtaattcgccacaagcgaggatattacgcggtaaaaatgcgcgtgggttgaatcaagcttgcccacaaagaaagcaacagcttttttcagcgctcgcgccttttggaagctctgctttgctccggttgtaagtcccgatttgcccgaaaccgctattatcgcactgtccgccgcggcaagtgcctcgcttactccgcccgcaaaatcgaaaagtcccggtgcgtctattatattaagcttatgcccgccgagctccaaagcgtaaacagaggttgaaaccgaggtcttgcgctttttctcttcgggatcaaagtccataacggtcgtactgtccgcaatcttacctatgcgttcggtcgcttttccgtagcacagaacggcgtccgccagagtggttttacccgatccgccgtgacccaaaagggctatattatgtattgattgctgagaatactgtttcaatttaatgcactcctttgaaaaatcgaccgacgccgatttgtgttatataatgattataacacacttcgttagcaaatacaactaatatttattataacggtatataaaatttataaaaatgtcataatgaagtgttttttgtaatttttttgtataaaaggtaaaaaacagcggagtaaaaaaatgctgatttttcggacaaaaaataccgaaataaattatttttgttatggtacaatagataggtaacaaaaaaagaagaaaattcatctcaaatatggtatgatgttaataactacaaaaacaaagtaccataagaggtgaattttctatgacaagtataacatcaaaa

SEQ ID NO: 1398 - DNA, 21277 bp, Unknown
  16S sequences of unknown bacteria
caccataaagccgctttatattaaattcgcgcgttatttgctctgtaattttaccatttttacatagaaacagcataacaagaaaatcaaaatatgaaatcaaggggctataggcctcttgttttctttttatataatggttaaaatagtaatatgaaaaaggtaaaaataataacaaaaattgaaaatataaatgcggtttgcaaaagacgattgcgaacaagtgccggtgtgcagggagaaagttatcgcaaaaagaaaaatgtgaaaagagagacaagtgcggccaaaagaataaaggcacttgggcgtcttcggtctattcttttactgattttgattgcgcttgtcgcgtttgtcggaattacggcagtggatgcggtgacatgcggacaagtgcatggtgacggtattatttgccgcaaaataggttttatcactaaggaagagcgttaccgagatgaagatggcgggctcaaatcggagcatcagtttactgatgtgcgaaacggtgatatatttatttctatgagtacgcatacactgggctggagacacgggcatgcagccgttgtgatagatgctgaacgcggcattacacttgaagctgcgctgtggggaaagccttctgagaaaatgcgtatgtggcattggtcatcatatgcaaacgcggtgcatttgcgtgtgagtgaagaggcggcggcaagcgcgcttgccgcaagcggcatagcgcgcgatacgagtatcgctgcatccgcgcagctcggatgccttgccgccgcttttgcggaagaatatgaaaatggtgttatgtacgggcttttttctggtatacctgataaagctcctgcaccttcagcgtttgaaaaaacgcagtgtgcgcatcttgtatggtacgcatataagcagtttgggctcgatcttgatgcggatggcagctggcttgtaacgccgcgagatattgccaagtcagataagcttgttgtgatcgaagcgtttggcgattacgagtattgaaacaagccgcaatcttgacaaaacggtgatttgtaatataataaaaggtaatcgaaaaatgggagggaaagatatggcaaaagagaagataaattttgaagacgagcaggtgagacacgattacaggcatactgcttctcatattatggcgcaggctgtaaagcatatttggccggaagctaagcttgcgataggaccggcgatagaaaacggtttttattatgattttgaccttgaacataaatttacagaagaggattttctcaagattcaaaaggaaatgaagaaaattgtgcaggcgaattataaacttgagaggtttgaacttccgagagcggaggctataaagctgatgcaggaaaaagatgagccttacaaggttgagctcataaacgacctgccggaagatgcggtgatctcattttataaacagggagattttacagacctctgcgcgggacctcatatggaatcaaccggccagataaaggcgtttaagattatgagcgttgccggggcgtattggcgaggaaattctgacaataagatgctccagagactttatgcgacagcattccctacccaagaagaacttgataattatattaaaatgcttgaagaagcaaagcagagagaccatagaaaaatcggcaaagagatggagctcttcgccctttatgacgaaggaccgggatttccgttcttcctgcctaacggtatgatcattagaaatgagcttgaaaatttttggagagaagagcacagaaaaagaggctacgttgaaataaagacgccgctcattttaaatgaacagctttggcgtacatcaggtcattgggatcattataaagacaatatgtactttacaaaaatagatgatgaagattatgctgtgaagccgatgaactgcccgggttcgattctcgtatacagagggaagatgcactcgtatagagaactgcctttgcgtataggcgagctcggccaggtacacaggcatgagctttcgggagctttgcacggacttatgagagtaagaacatttacgcaggatgactcgcacatctatatgatgcctgaacaggtagaagaggaaattgtgggagtagccaaattctgcgatgaagtatataagctgttcggctttgaatatcatgttgagctttcaacaagacctgaggattcgatgggtacggatgaagagtgggaaatggcggaaaacgctcttcgttcggcaattcaggcgactggagttgattatgtggtaaatgaaggtgacggtgcattttatggccctaagctcgatttccaccttaaagattctattggcagaacttggcagtgcggaacgattcagcttgatctgcaaatgccgcagagatttgatatcacttatgtaggcgctgacggtgaaaagcacaggcctattatgattcacagagtaatatttggctcgatagagagatttatcggcatattgactgagcacacagcaggaaaattccctctttggctcgcgcctgttcaggtaaagctgcttacggtaacggaaaaatttgtaccatatgcagaagaagtggaaaagaaattaagagaagcgggtctcagggtacagctcgatgcgagaaatgaaaagattggttataagcttagagaagcgagaaatgcgagagattcgtatatctgtgtaataggtgagcgcgaagctgaggcaaagacgcttacagtgcgttcaataaagtcaggagagcttggggaaatgagcgtcgatgattttacagcaaaattggtcgaagaaattagaacaaaagcaatgtaaagctgagaaatatggcgtttaaaattcactatgctgtataaaatgtggttataatattatgggacgggagaccgtcccatttaataagactgttaaaaagcctcttacggcttaaagcaggaaaaagcagaatggtaaatataaaaggagatttaaaaatggcagattgtaatcatgattgcgaaagctgcagttcaaactgcggagagagaacggttccgtttgattttacggaaaagcttaatgagtacagcagtgtaaagaaggttattggcgttgtttcgggcaaaggtggagtaggaaagtcgatggtaacatcgcttctcgcttctgctgtaaataaggaaggaaacagaacggctgtgctcgatgcagacattacaggaccttcgattcctaagattttcggagtcagcggcagcgcgtacatgagtgataaaggcgtagtacccgtaaagagcgcgggtgggatagatattatttccataaatctcgtgcttgaaaatcctgaagatcctgtcgtatggagaggtcctataattgcgggtgcggtaaagcagttctggagcgaaactttctgggataacgaggattatatgttcatagatatgccgccgggaacgggtgatgtaccgcttactgtatttcagtcaattcctcttgatggtatcgttattgtcacatcgccgcaggagcttgtttctatgatcgttgaaaaagcagtgaaaatggcgaatatgatgaatattccggtattgggaattgttgaaaatatgtcatattttaagtgtcctgactgtggaaaagaacacaaaattttcggtgaaagccacatagatgaaatcgcaaaaaaatacggtattaaggctgtagcaaaacttcctataaacagtgcgcttgcaagtgcggcggacaaaggcaaaatagaggaagaagaggaagcagaaattgcacctgttttggaagcagttaagaacctttaagcggaggaaacaaaagtggacggcaaaggcagaagatatatgagtgatccggatgaaaatggaatcagatattttgacgtcaaaggtgatatagatgcacttacagacaatgcaagtaataaagcggaaaatgcagccgcctcaccgaatgcgcagccggcagcaaattcgcaggccggatgcagctctggctgggtgagtacaaataagagtactgccacaaatgcaggaaacgcgcaaaaatcgttcgctgcaggaggaagcagcggaatgggcggcggcaattttggaggcggccgcggcggccgaagcggaggtgctggcagaaccccgaaattttggagaaatgttagcatagtgctggcaatcgtacttgcggttatctgtattacatcagctgtgaaaggtgctgtgcgcggcgtgctgggaataaacggaaatcaggaagcctactcatattctgagcttcctaattccccgtacatagctacgctttatgttgaaggtacaatacaggcagataatgtcgattatctcgggcgcagctatggatatcagcatacgtggacgctcgagactattgatgatcttatatatgatgatgataattacggactcattatatttgtcgacagcccaggcggtacaatatacgagagcgatgagctttatttcaagataaaggaatatcaggatatcacggagagaccagtatatgcagtaatgggaagcactgcggcatcaggcggctactacatatcggcgccgtgcgataagatttatgcgaacagaaatacctggacgggctcgataggtgtgacgataggtacaatcgttgatttttcacagtttctcgaaaattatggaataagaacgaaaaccataacatcaggcgcaaataaggctatgggttcaaattatcaagaaatgacggcggaagaagaggctatttggcaggagcttgtaaatgaggcgtacgagcagtttgtggaagttgttgccgacggcagaaatatgagtatgcaagaggtttatgaccttgccgacggcagaatatacagtgcaaagcaggcgatagatgctggtcttgtggatgaaatcggcggtatagaggaagcatattacaatatgtatgaagagattgcctcgagatacggcgatgaatatgttccggcttatatggagcgcgttgatgtagaatataaagcggacagcacaagtctttcatggcttttgggaagcgcgctttctgcgatagaaatgataaatgcagagagcggaaaggacagtgtagtagagctggctgaaagcataaattcacatcctgcaagctatatatgcgaaatacttgcagattaaaactgagtggattgaagcagcaggcagaaaagaggtgaaaagttgaccgaaaaaaataatttttcattttttcagaatagcaaatgcgagttttttccgtgtcatgatactgataatgaagaagatttcaactgtcttttctgttattgcccgctctatgtgctcggagataagtgcggaggaaatcctgtttttcttgaagatggcaaaaaggactgcagcaggtgtcttttgccgcacagccgcgaaagctacaaacttatagcggaacggtttgatgatatatgtgaaattatgataaaaaatacaggagctttcaagtgaaaatgcttgacagctccttatttttatgataaagtagttgaagtgtcaagcaaaaaggcttgccatattttcggtgaggtaaaacgatgttcgataaaattacggaaataagcttgctctatgatttttatgggcagcttcttacaccgagacagaacgaagctatgaggctttatcacgaagagaattattcgctttcagaaatagcgtctgagtttgaaatatcgaggcaggcggtgcatgacgcgctgaaaactgcggaaaagtcgctcaccgaatatgaaaaaagactcggattagtaaagagattttccgagagcagagaagctgtggctgaaatagaagctgaaataagtaaaatagagagcgagcatgtgagcgacaaagcgctgcaaaaaaggctcgatagaataaagaatataatcgaaacacttgagttttaacagtaatagaaagtaaaaaagacggaaaggaggcgggctatggcatttgaaagtttatctgaaaaattgcagggagcgtttaagaagctcagaggtaaaggcattttaagcgaagaagatataaatgaagcaatgcgcgaagtgaagcttgcgctgctcgaagccgatgttaattttaaggtagtgaaagagtttgtagctgcggttaaggaaaaggcgcttggagcagaggtgcatgccagtctcaatccggcacagcaggtaataaagatagtaaacgatgagcttgtcgagcttatgggcggcacgaacagtaaactgacctattcgccgcggggatttactgtgctgatgatggtgggcttgcaaggtacaggtaagacgacatcatgcggaaagctggcagcttatctcaagaagaacggcaagaaaccgatgctttgcgcctgtgatatatatagaccggctgcgatagatcagctcgaagtggtcggacagtcagtggacaccccggtgtttacgatgcgcgaatgtaaggaacctgaaaagatagcggctgccgcactcaaagaagcggaaataaaaggctatgatgtgctgattatagatacggcaggacgtctgcagatagatgaggcgctgatggatgagctcgtgagaataaaagccgcgacgaagccgcatgaaatacttctcgtcgtggacgcgatgacaggtcaggatgcagtgaatgtagcggaaggtttcagtgaaaagctcggcattgacggtatcataatgacgaagctcgacggcgattcacgaggcggcgcggcactttccgtaaagaaagttacaaacaagccgataaaatttatcggtatgggcgagaagatggatgcgctggagccgtttcatcccgaaaggatggcaagcagaattctcggaatgggagatatgctcagcctgatagaaaaagcccaggagggatatgacgagaagaaagcggaagagctgcaaaagaaaataaagaaaaatgaatttacgcttgaggattttcttgaagaaatgaatcaggtaagaaatatgggcggtattggaaaattgctcgatatgctgccgggtatgggcggaaaaggcatgaaggatattgatctcgaagagagtgaaaaggattttgccgatatggaggccataatactttcaatgacaaaggaagaacggcgcaatccgtcgatactcaatgcaagcagaagaaagagaattgcagcgggctcagggcagccggtatcaaaaatcaacagactcgtaaagcagtttgaagaagcgagaaagatgatgaagatgttttcgggcggtaaaatgaaaaagaagtttcgagggcttggcttctaaggcagcttgcataataaggaaagtttataaattcacataagaattttatataaaaataattataaaaacagcataaaaatgcaggaggaaattgaaaatggtaaagatcagacttaaaagaatgggcgcacacaagaagcctttttacagagtagttgtagcggatgcaagagctccgagagacggaaaattcattgaagaaatcggatattacgatccgatgaaagagcctaaagtaatcaatattgacgaagaaaaggcaaagaagtggcttgcaaacggagcacagcctacagagacagtaaagacactctttaagaagtccggtatcatcggataggaggaactctatgttaagtttggttgaagcgattgcaaaatcactcgtaaacaaccctgatgctgtggaagtcagagaaataccgggcgaaaatgaggttgtaatagagcttaaggttgctcccgaagatatgggtaaagtaatcggcaaaaaaggcagaatcgcaaaagcactgcgcactgttgtaaaggccgcagcaaccaaggcaaataagaaagtagcagtggaaatcgtgcagtaaatacgcgggattcacatgacagggcacatatttagatttagatatgtgccttttattcaaggaaactatggaaaagatacacgttggaaaaatcgtaaatgctgtggcgctgaaaggcgaggtaaaagtatatacatactcaaatcctgagcgctacgaggaaataaaagaaatttatgttgaaaacaagccgcataaaatagaaaaagtccggtttcagggcaatactgtaattttaaagctgtcgggaattgatgacagaaatgcggcggaagcctgtaaaggcaaggaaatatatattgcagaaagcgagctgccggctttgccagaggatacgtattatatacgtgatttaatcggtatggatgttgtgacagaggacggcgaaaagctcggtgtgcttatggacatacttcaaaatactgcacaggatgtatatgaagtgagaagagagtccggcaaggatattttgattcccggagtatcggagtttatcctcgatatagaaataaaagaaagaaagattacggtaaagcttcccgacggactgctcgatctttgatgcggagagaaataaagttatgaaaatagatattctgacgctgtttcccgagatgtttgcgcctctaaggcagagtatcatcggtagggcagaggaaaaaggaataattaaaataaatatcacgaacatacgcgattacagtgcggacaagcataaaaaaacggacgactatccgtttggcggtggtgcgggaatggtgatgagcgtgcagcctattttcgatgcaatgcttgctgtcggggcacgccctgctttagatgcggaaagcgcgcacagaactgcaggcgcaggcggcgccctggaagacagcgactgcttcggatgcaccgccgtcaaacgcattctatacatgtcaccgcgcggcaaggtgcttgacgctgataaggtaaaagagcttgccagagaagaagagctggtgatactttgtggtcattacgagggtgtagatcagcgcgttattgattgcttcggcgtggaggaagtgtcgattggcgattacattgtgacgggaggcgagcttccggcaatggtgcttgtcgactctgtcgtgaggatgctcgaaggcgtgctcgcaagcgaggacgcggctgttggtgaatctatatattcgggattgctcgagtatccgcagtatacaaagccaagagtatataggggtcttgctgtgccggaagtactcgtaagcggcaatcataagcttatagcgctgtggcagtttgagaaatcgcttgagcttacgcgtgcaagaaggcctgatattttcaatgcgtttttaaaaaatgaggaaaaaatcgcagctctcagcaaggaagaaaaaaagatactcgaaaaaatcattaaaaatccataacaggcacagtttactaaaataaatcggtgtggtaaaatacaaatgacggagtaagatatgagcagaaaagcaaaagctgtaatttacatatatatttttgtgatggtttgccttgcggtgataatatatgtcgtgccgtcagtgaccgggatgctgacgtccactttagtaattacttacggcaatcttacggaaacggacaccgcaacttgttattttgtgcgcaatgaaaaagtttatctggcagaagcatccggcacagttaattattattttgaagacaaaacaaaggtgcggaaaaattcgacgatacttacagtcacgaggcgcaacgttcagcctgaaggtgagtcggaattctcgcagataattacaaagctttccggcagtgctattacaaaatccgactataagagtgaatttaacggtatggtaagctacagtatagatggatatgagggctattttacgccggagactatacttgaccttgattatgatgaagtaaaaaatttgcagatagacgcgcctgtaaatctaacgcgcgagaccgcgtatagaggagagcctctatataaaatatgcgataatgataaatggtatataacatgctttgtcagtgcgggcaacagcgtaaagtatcaaaaagggcgcactgtcaggctgcagcttcctcttggagaactcaaggcaactgttactgagattgcagaaaagggagatatgtggcagatagtgcttgaaaccaataggtcgtatgaggattttccaactttgcgtgtctgtgaagtggagataataacttcggattacagcggtattatagtgcctaacagcagcattgcgacagtcgatggacaggtcggggtgtatgtaaaagagagaacgggagatttcacgtttacgccgataaagatcatagcaagtgatggggaagattccgcagtttcatcgtcatatttttatgatgatgagggacagagagtaaatagcgtagagatttacgatgaaatcttgaaaaatcccgagtaaaggagagcgcgatgtctattaaagaaaatattgaaaaaataaatgctgtgaaaaacgctgccgcaaggcgtgcgggaagagatggaagtgaaatacttctttgtgccgtgacaaagacgcatcctgcttccgatatcaatgaagcgatagacgcgggcataacggatatcggtgaaaacaaggttcaggaaatacttgacaaatatgacgaggtaaagcctgtgcgctggcatatgatagggcatcttcagacaaataaggtaaaatatattatagataaggtgtcgctgatacattctgtagattcatataaattggcggaagaaataaacaaacgcgcagctcagcacggaattgtaatggacatactgatacaggttaattcggcgatggaagagagtaagttcggcattacaacggatgaaacggacagtcttatagaagaaatattaaagaactgtccgaatataaggataagagggcttatgtgcattgccccgtttgcggaaaatccgggagatgcggcaaaatatttccgcgccgtaaaggaaatttacgacagatacgcggatgcgccgagagagggacttgattttaaatacctttcgatggggatgtcaaatgattttgaaacagcgattgcggaaggcagcaacctcattcgcataggaactgcgatttttggcgcgagaaattataataaaatcgtttaatgaggatactaatatattaggaggacaaaaatgggagtatttgataagcttaaagatctcgtcggcatagaggaaattgatgacgatgaaataacggaggaggaaatacaggaagcagcggtgaagctcgagcgcaagattatcgatccgaagcagcatcaatcagcggcatccaaaaatgaaataaatgaaagaaaggtgcagccggcgcctgcatcaagaccatctgttactgtaagcgatagaacaggatcttttaagctcgttgtgatagagcctaaaggttttgacgagtgcccaaaacttgtggacaaccttaagagccgcaaacctgtcatcattaaccttgagaagatagagtcggatacggcaagaaaaatatttgattttctcagtggagctacatatgcgctcaacggcaatgtgcagaaggttgcaaacaacatattcgtatttgcaccggaaaatgtggatattactgcaagtgtagagcataaaggcattgatttcggcggaaatcagaagaatatgtggaggtaaatgatgataacaccgcttgatgttcaaaataaagaattttcaaaggctgtaagaggatataaggaggaggaggttgatgaatttctcgatcttatcacagttgacctcgaaaagcttataactgaaaacgcgggttacaaggagcagatagcgcgacttcaaaaagaactcgataaatataaaacatcggaaacagctgtgctcgatacgcttgaagctgcgaaagcgctgatgggagatatttcggcgagcgcagaaaagcgcgcggagatacttctcaaaaatgctgagctcgatgcgcagataatacagcgagaggctaaagaagaagcagagaggcttacggaggaaaatatacagctaagaagcaggtttatagaattcagaagcaagtataagtcgcttttggaatcggagcttgagaagttcgatacgctggcaaatgaaatttttggtgattatacgcagggaaatgtgcagaatgctgcaggagaaagaagcacttccgcggcaaatgaagctttttctgagcgaggcactatacttatcaagaaaacggatattgagggtgcagcaaaggaaggggaatggagcaggacccgtataaatgagaaaataaacgaataataaaaaataagataatgtgactttaaaagagatactgaaaatatgaataaaatagtaaagatcaaatggtactgtgctgttatggcgcttgtggttgctgcagatcagattgtgaaagcggcggtagacaatatgcttactgttggtgaatcggtaccggtgattaaaaatatttttcacctgacatatgtcagaaacagcggcgctgcattttcaattatgcagggaaagagagtgcttttaacgctgcttcccttaattcttatatgcgtactgtttatatttctcgcggcaaaatgtgaaaatgagcaccccgtacttaagcttgcgctgtcatttatcatcgccggtggagccggtaatctgatagacagattggtgcatggatatgttatagatatgttcgacttccgcgtatggccggtctttaatgtggctgatattgcggtgtgcgcaggctgcggacttcttctcatttatgttttgtttttggacagaaaggagaaaaagagtgaagagcagcatgcgtgcggagcgcatgaagctgcagatgaacgagctaaagaggtgacggatgaaagagcatcgctatgatatatatatagaagagaagttaaacgggacccggcttgatgtggtcctttctttttctgtaccggaagtgtcaagaagctttgtgcagaagctcatagacggcggggcggtgtctgtggacggaaaagtatgtctttccaaaaaagaaaaggtgaagacgggacaaattgtgtccgtaatcgtgcctgagccggaagagcttgaaataaaagcggaagacatacctctcgatataatctatgaagacagcgatgtactggtagtgaataaaccggtgggaatggtggtacatcctgctgttggaaactacgaaggtacactcgtaaatgcagtgatgtatcactgcaaagacagcctttcgtcgataaacggcgtcgtgcgtcctggtattgtgcacaggatagataaggacacaagcggacttttgatgatagccaaaaatgattttgcgcacagtatgctggcagagcagctggcggagcacagcattacgcgtgtctatactgcgcttgtatataacaactttgcggaggatgaaggcacggtagatgtgccaattggacgcgatgcgaaaaatagactgcggcagactgtgtttccatatgaaaacgggcaggtgccgaaaggagctaaaagggcggtgactaattaccgcgtgctcaaaaggtacggcagatttacgcttattgaggcgcggctgctcacggggcgcacgcatcagatacgcgtgcatatggcgtatataaagcatcctcttgttggggatacggtatacggaccgaaaaaaccggagctgggagcggacaggggacagctgctctgtgcgcgtgtgcttggatttgtacatccacggagcggcgagtatatggaattctctgtgccgctgccggatgaatttgctgcgatactcgccaaactggaagcaaaataacgaataaacggaggattaaaatggccaaaataagtcttaaaccgggtactatgcttaatccagtgcccgtagtgatggtaagctgcggcgatcaagagaaaagcaatataattacgattgcgtggacggggattgtcaattccaatccgccgatgacatacattgcggtgcagcgctcgcgttattcgtataatataataaaggaacacggtgaatttgtcataaatctggtgacacagaatttggtgcgtgcctgtgattactgcggtgtcagaagcggcgctgcgactgataaatggaaagagacaaaacttacgcctgttgctgcagatattgtgaaggcgccgctcataagcgaatcgcctgtaaatatagagtgcagggtaaaagaaatattggaatatccgtcgcatgttgtctttgtaagcgagattgtagccgtgcatgttgacagcgatctcatggataaaagcggaaaaataagatttgaagatgcaggtctcatagtttataatcacggtttgtatatgcctgtgcagaaaaaggtacttggaacatttggattttcggtgatgaagccgaagacacagaaaaagcgtgcagcggcgagaagaaatgccagtcgtatgaaacaaaaaagcgaatgatgaaaatgcagaacccccaaatatgaataaaggggctgtatagagggaaagcagccccttggcatataattcaattctgccaaataacattaaatatcgttagattcttcagtatcgtgctgatgaagcggctcaagtcctgttatgtagccaaggcagtcttcgcagataaaagagtctctgtaattgatgcaaacattgggattattacatattgcacattttttagtacgtttcttattaaccatattataaaatctccttaaaattatcttagttgaattatagagctcgccggcaattaaaaatataatatatcggcagccgaatggcaagttgaatgtaaggaattgtaagaataaagactttaattgtaaaaatatattgaattgtagaaaacggaggatatttgcagtgtttgagaatttcagagtaccaagtagagtcagtattgcaggatatcgctgggattgtgaaaagcctgagaaggttgtatgcatcatacacggtataggcgagcatatgggcaggtacgaaagagttgcgaaagcgtttaatgaagaaggtattgccgtaatcggtatggatcaccgcggacacggattgtctgcgggcacgcgcggccacacagcgccgaggcgcgaggtgctttccgatatagacgcactcataacatatacagaaaataattttcaaaatatcccgattataatgtacgggcacagtatgggcggaaatataactttggattacaggattaggggaaataaatcgcacattcctgccgcctatatagtttcggcaccgtggataaagctctataagccgtttccgaagctggtggtgtcatttgcacatattatggccaaaatcaagccggaatttcaggtttcctccaaaattgatgaaaatatattaggtaatccactcaatgtacgcggttattataaagatcctctcgtgcacagctatataacagcagcatgcgctgcagacggttttgatataggagaggcgctttatgaaaacaagcttacaggcaattttggcggccgcggcaaaccgcttttgctgatgcacggagatgcggatatgatatgttcagttgcaggaagcagagctgttgcggaatatgagacaaactgccgttatgtagaatggaaagggtactaccacgagatacacaacggtggtccgcttgcaaatggcgacgaggtgataaatacggctgttgagttcgtgaagaatctgcagccggattgtcggaatgaaaaataatgcgcaaaaacttccaaaagatgattgacaagagggagtaatatgtgctaaaataacacgatgaaaaaaatctttaaattcagcacagagaggctgacaaggttatatataagagacgggcggcaagtgcgcttccgtatacaaagtttgtatgcgtgaaacgagcggcggccgcgtggataattgtaatatgatcttgcctctcggcaagattttctttttgcccgcaagcggcaggtacgaaagagaagactttgcaaaagcgagaggcggcgcagcataaaattaaaagcacgaaaggagaacaaaatgtatctgcatttggaaaaagcgttggtatatgcaaatggaaagtttgaccgtaagagcgattttctcatcaatataggcgagaatctttcctgcgctgcgaacggctcgtacggtgtatggaagacgctcgatttaaaagacggtaattatatagttgtccccggatttgcggatgtgcatgttcatctccgtgagccggggttttcttataaagaaacgatatcggcgggaacgaaagcggcagcacgcggcggatatactgcggtatgtacgatgccgaacctcaatcctgcaccggactgcgcggaaaatctgaaaaagcagtttgaaataatagagaaagatgcggcaatcagcgtggtgccgtacggaactatcactaagggtgaaaacggcgaggagcttgcggatatggcaggaatgcttgcgcttgcggaaaattgtatagaggagcgtactaaagatgcggacagcagcgtgcagaaagcttatgctcttgcgggcttttctgatgatgggcgcggtgtgcagagtgcggaaatgatgaaaaaggcgatgaccgaagcgaagaagctcggtaaaatcatagccgcacattgtgaggatgattccattccgggagaagaaagtgcaagtgaatggaagcagattgagagggatatagaactggcgcgcgagacgggctgcgcatatcatgtatgccacatatcgacaatggaaagtgcagagctcataagacgcgcaaaggcggagggcgttgatatcacatgtgaaacggcgccgcattatcttttgttagatgagagtatgcgctcagatgacggatgttttaagatgaacccgccgctcagaaaaaagaaagacagagaagcgctgcttgaagcgcttaaggacggtacgatagatatgatagcgacggatcacgcaccgcacagcgctgaagaaaaggcgcgcggttttgcgggaagcgtaatgggagttgtcggacttgaaactgcatttcctgtgctttataccaaactcgtaaaaaccggagcaataactcttgaagagcttgtaaagctgatgaatgaaaatccgcgcaaacgatttgggcttgaacagaccggcttcagcgtgtgggagcttgatgaagagtatgaaataaatccggaagagtttgtgagcctcggaaaaagcacaccatttgccggtaaaaaagtatacggcaggtgtatagctacaatcaacagcgataaggtcgcttgggtggatgaagcgtttctcgaatcgcacaagagaactttggctaaaaaattaaatttatatagataaatacggaggtaaaaaaatggcaaagagaacagacatcaaaaaaatacttatcatcggttcaggcccgatagtgatagggcaggcggcagaatttgactatgcgggaacgcaggcgtgtttagcgctgaaagaagagggatacgaggtagtactcgtaaattcaaatcctgcgacaattatgacagatacgacgattgccgataaggtgtatatggagcctcttacgctcgagtatgtagcaaaaatacttagatacgaaagacctgatgctattgttccgggaattggagggcagacagggctcaatcttgcgatgcagcttaagcgcaaaggcattcttgaggaatgcggagtcgagcttctcggaacaagcagtgaaagcatagagcgcgccgaggacagagagctctttaaggaactttgccagtcgataggagaacctgtaataccttcggaaattacatatgacctcgaagaagcgaaaaaagcggcgctggaaatcggttatccagtcgtgctccgtccggcattcacgcttggcggcactggcggcggttttgcaaacaatgaagaagagctcgtcgaaatcggaataaacgcttttaaactctcgcctgttcatcaggtacttattgaaaagagtgttaaaggatataaggaaatagaatttgaagtaatgcgcgattcaaatgaccacgctattacaatctgcggtatggaaaatgttgatccggtgggtgttcatacaggagattcgatagtagtggcgccgataatgacgctgaatgacagcgaccttaaaatgcttaacgatagcgccataaaaattattcgcgagctcaaaatcgagggcggctgcaatgtacagtttgcgctcaatccgaattcatcggagtactatttaatagaagtaaatccgagagtttcgcgttcatcggcgctggcttcaaaggcaagcggttatccgattgcgagagttacggcaaagattgccgtaggtatggcgcttgaggacatcgctattgccaataccaacgcggcatttgaaccgagcctcgactatgtagttgccaagttcccgcgttttccgtttgacaagtttgcacaggcgacaaataaactcggtacgcagatgaaggctacgggcgaggttatgggaataggctcaaccctcgaagaatgtatgctcaaatcggtgcgttcgctcgaaataggagtaaatcatctctatatgtcgaaatttgaaaatatgtcaaatgaggaaatgcttgcatacataagcgatttcagagacgatacaatttatgcggcggcgcagcttctgagaaacggcgtgagtgtggataagatttatgaggtaacgatgattaacccgtatttcatcgagtcgatcaagaagattgtcgattttgaagaggtggtaaaagctcataaaggtgacagcgccgtgcttaaggatgcgaaaactatgggattcagcgacgcgtttatcgctaagctctggggtgtaaccgagcttgaggtgtttgagatgagaaagcacgataatttattccctgtatataaaatggtagatacctgtcatacaggcgcatacattccgtatttttattcgacttacggcaaagaaaacaattcaattttgtctgataagaaaaagatcatcgtgctcggcgcaggaccgataagaatagggcagggagtagaatttgactattccacggtgcacgcagtgacgacgataaagaattcgggctacgaagctattatcataaacaataatccggagacggtttcaaccgattacacgacagctgataaactttactttgagccgctgacaacagaggatgtaatgaacattattgaatttgaaaagccggacggcgttatagcttcgctcggcggacagacggcgataaaccttgctgagccgctgatgaagcgcggtgtaaaaattatcggcacggattgtgaggcgatagagcgcgcggaaaacagagacgcgtttgaaaaggtgcttaaggagctcggaattccgcagccgcagggcagagctgtaaccaagatagaggatggcgtaactgctgctgctgagataggatatccggtgctcgtaaggccgagcttcgtactcggaggacgggcaatgcagattgtcggcaatgaaacacagcttcgtcactatttaaagacggcagttgaaatcgacgaagacaagccggtgctcgtagataagtatatttctggtaaagaggtggaagtggacgccatttgcgatggaataaatgtgtttgtaccgggaattatggagcttgtagagcgcacgggcattcacagcggcgattcgataagcgtttatccgccgttcagcatttcggataaggtaaagggcattatactccagtacgccaagaaactgggactcggactcggaattatcgggctttacaacatccagtttatagtggataagaatgagaacgtatatatcatagaagtaaatccgcgttcgtcgcgaacagtgccgttcctcagcaaggcgacaggttacagccttgcggatatcgcaacagaggttattctcggcagaaatctgaaagagcagggaatattcgatatttatcctgatgaaaaagagcgctggtatgtaaaggtaccggtattctcgttcaataagatcagaggcctcgatgcatatctttcgcctgagatgaaatcgacgggagagacgataggctacgatgataagcgcgagcgcgctatgtataaggcgctgcaggcttcgggaatgaaactgcaaaactatggtacggtgtttgtgaccattgcagatgacgacaaggaagaggctctgccgcttatcagaaggttttataatctcggatttaatatcgaggcgacagatggtactggcaagttcctcaaggaaaacggcatccgtacgcatgtgctggcgaagataagtgacggcagcgaggaaataccgcaggcgatacgtcaggggcacattgcgtatatcataaatacgagcagcatcggtagctcggataatactaagaacgatgggcacgagataagaaagctcgctactgagaacaatgtcaatatatttacagctctcgatacagtagcggcgctgctcgatgtgcttgaagagacgacactttgcatttcgacgatagatgcgtaagagtaaaaggacaaacgcagatataaagaaaataggcggaaaggtgagaaatgaaacaaggcttttttgagatagtatcaaatgaaagactgacggataatgtgatggaactcgtgctcaggggcgatacttctgagatagcggtacctggacagtttgtgaacataaagctggacggcttttttctgcggcggccgctatcggtgtgcaactgcgagcaggaagcaaatgcaggtgcaagctgtgacactatggcaggtaaaagcgagggtatgctgacgctgatatataagattgtcggcgagggtacaagagcgcttgcagagtacaaggcgggagagatgctcgatattttaacgggacttggcaacggttatgatataagtaagagcggcgatgagcccctcctcatcggaggaggggcaggcgtgccgcctatgttcctgctttacaggaacctcatcgccgctggcacaaaacctacggtaattctcggtttcaacagcaaagcggaagttttttacgaaaatgaatttaagtcgctcggcgcacgcgtgattgtcgctaccgcggacggaagctatggtgtccgcggatttgtgacggatgctatgaaagacatttcgtattcgtatacatatgcctgtggtccggagccgatgctgcgcgctgtgtatgaaaaggccgcctgcggaggacagtacagctttgaagagcgtatgggctgcggcttcggtgcgtgtatgggctgctcatgcaagacaaagtacggcagtaaacgcat

SEQ ID NO: 1399 - DNA, 20455 bp, Unknown
  16S sequences of unknown bacteria
cccctgccacattggctggtgcccctccggcaacacgagtaaatccttccacatctttcaatgcgcagccctttcgctgcgggataaagtcgatgagcgcttcaccgatcacgcaaagtttctgtttcatggcgattgcctccttttagctgatttgatatgcgcgcaggaaatgcagggtgatatcccggcatccttccgcctgtatcagtttaacacatcttcgtgcgtttgggtaaactctggtggtaaaaacttcgctgccgccattgaggaacagctccagagaggaggtatccgagaagatccgtaagtctttgagcgtattcagacgcaggctgcgggagatccgtccagatccagccttttggatatccaaggtgaatgtcccatccttgaagatgatgtgcatctcttcgctgagctggaggtgcagggaatggcattcctgaaagcgcatgtccagttcatagcattcctcatcgatctgcgccgcattcagcgtttcttcagtgaatacgcgggtgttgaagcgcaaagcctctaattccttcagcggctgctggcgcagctgcccgtcaatgaaggtgagctcgcgcggcagagtgagcgcgtgctgccagccgtgatccacggtcggattggtgtaatcggcatccggtatgcccatccatccgatcaggatgcgcctgccttgttcatcttcaaaagtctggggagcgtagaagtcaaatccgcggtccagctgatggatgtgatcgatatgcagcccctcttccaggcttccggacaatgtcatccaggtgaccgaatgcacattggcataatcatcgccctgagctgggacgccctgcgggcaggtgatcaggatcttctgtccgttcaggaagaagagatccggacattcccacatgtagccaagcggttcatcgctctggatgcgaatatgcggctgccagtgatgcaggtcactcgagcgaaacatctgcacacagccatgatcgtgcaagtcacggcttccttgcaccatgtaatagatcccgttttctttgcatagctttggatcgcggatgtgctgggtcaggtccttgggatagtcatccatgcccatgaccagttctttttgggcgaaatgccagccgtccgtgctttccagatggatcgtgttggccacgcggccgctgtggatataatcatggtcctcgcggtcaaacagcttgatgttgccggtatagaaataatggatgcgtccatcttccacaaaagcgctgccggagtagaccccatgggtatccagattgctgtcagggaacaggaatggctcttgttcctcatagcggatgaaatcacgggtcgtcacatgtgcccacagcttcaggtcgccattggcatcaaaaggatcatactgataatagagatgatagaggccgtgaaactgacacaggccgttgggatcattgagccagccgatgtctggcatcagatgatagtgcaggcggcgcggatcggctgcagctttttgtttcggctcgtcctgcagccgtttccatgcgtcatagtctttgcggcagactggttcgtattttttaaacatttgtatccttccttatcgtcagcgcgggctgtgcgatgtcagcgtcagtgctttccttgacctcgatctggtattgcgcgctgttggtgatgatcatcatcgtctgatcgctgtatccggcagccttgatctttgcgggatcgaagcgcatcagctgtgtgcctgcggcgacgctttcgccttctttgacaagggtctcaaagccatcgccgttcatgtttacggtgtcgatgccgcagtggatcatgatctccacgccttgcggggaaatgagtcctaaggcatggccgctgggaaaggtgaaagcgaccttggcgtcacatggcgcatagatgacattgtccttggggtcgatgcagatgcctttgcccatgccttcgctggcaaaagcgggatcagcggcggcagtgatgttgcgcacggtgcctttcagcggacagttcagcgtcatcgtgaatgcctctgtttcctgctggggagccggtgcttcgctcttcttggtctttgcggcatcattctctgcttcgatcttcttccagaagaagagggtgaccagggcagagacagccatcgataacaacagcccgatggcaaacatcggccagtcttgcggcaagacggagatgaagccaggaatgccggctgcgccaagcgcctgagcgaggatgtggaagagcgcgcaccatgcgctgcctacggccgaaccgatcatggctgcgtagaatgggtagcgcagcttcagcgtgacaccgaacatggcaggttcggtgatacctagcaaggcgctgacaccggctgcggaacagatagatttcagcttgacatccttcgtcttgaacagcacggtcaggacggctgcgccctgggcgacattgttcatggaggcagtgatgaagatgaagcttccgccagtgacggcgatggaagcaagcagctgcgtttcgatcgggatgaatgaatggtgcatgccggtcagcgtgatcggcgcatagacgagtccgaacagaccgccgccgatcgggcctaaggtgttatacagccaggtgatgccgtctgcgagcaagttgccggcaccgcgcatgatcgggccgacgaacaggaacgtgatgaaggcgctgatcatgatcgacaacaacggagtggtcaggttgtccagccaggtcggcgtcaccttatgcagacgcttttcgatgttggccaggatccaggatacagcaagtaccgggagcacggtgccctgatagccgacagcgttgatggtgaggccgaacaagttccaggtcggtacttcgacgcccgtgccgaggctgtacgcgttgagcaggtctggatggaccatgatcatgcccatcgcggcgcccagatatggattgccgccaaagcgtttggtcgcagagaaaccgatgagcaccggcaggaaagtgaatggcgcattggcgaagatattgatcatcgtcgccagatcgcggaactgtgggaacatgtcgatgattgactgtccgccttcgaacattgcggcggtgaggacgttgttgatgcccatgagcagaccgccggcgacgatggccgggatgatcgggacgaagatgtcggagaacatcttgatgaaacgctgtaccgggctgcccttgctttcttcggcttcatccggcgcgctgtctgcaacggctccgatctgtttctggacctcatcgcagacgaggttgacgagcccagatcccaggatgatctggaactggctgtgggtcatgaacgttcctttgacgacgtcgatatcagagatggcgtcttcattgcgaagatcaggattcttgagctgaaaacgaaggcgggtggcacagtgctgaacagagcggatgttgtcttttccgccgacctgttcgatgatctttgaagcgatcgatgcgtaatccataattacgtctcctccttattcccctttgtatggtaccggttccatattgtttacactgtcattataaaaccgcttacatgaactgtcaaccccttttgcgcattttttggaaccggtgccacatcttagatgaagatccgccggactaaggccggcggatcgatacgctttctccctcgatgaatgtgtaattgacatactgcggggtctgcactttttcgcccctgagcatcttcaagatggtccttgcgcagcatttgccgctgtactcggtatcaaagcgcaccgtagccaattgcggcgtgagcagctcactgacatcatagccgccgaaagagatgacggagatgtcttctgggatgcgcaggccgcgctcccgaatgactttataagcgcccagcgcctgacggtccgtggaacagatgagcgcgtcgatcgtatgctcatccaggatcttgccgacttgctcgcaggcatgttccagcgagaaatcgctgagataaacgcagatatcgttgacgccgctttcgtgcaggccgtccatgatgccttttcggcgtacgacgccgatcgcctcatcccatgtatcgacacacaggcaggcgacgctgcggtgatgacgctcgccgatgtaggtgccgacgaacttgccgccatagtagtcatcgttgatgatgcatacgccttcctcgtagcgctgtgccacgacgacgatgggaatgtcgatctgagcgagcagacggtgatgcgcttcgctgaggtgcgtagcgctgaggatgagcccgtctaccttcatccgccacagccgttctagatactgcagctcaagctcctcctgatgatcggtattgatgatcagcgtgctgtagccggcttcgcgcagatggcggtcgatgctcatcatcaccttgctggtcacggtcgaatccaggcacggggcgatgatgccgatcatcttgctttccttggctttcaggcgggcaaaggcattcggctcataattatatctggcaatcacatctgcgatcttctgccgcgtctcttcccggacatatccgccgttgaagtaacgggacacggtgctcttgcccacgccgcatttttcggcgatttctttcatcgtgatctttttggcaacactcatggcaagttcctcctgcattactttctatcatagcacaggaaagcggcacgcactgcggtttttcgcaccattttgtgtttttttcatagattggtaatgcgaggaggatggaatatgtgcggcattgccggtattgtggattatgagaatgaacggcagaccatgagctgggacatcctgaaggccatgcaggacaccatgcgccggcgcgggccggatcaaaacgggatctggcatgatcgctttgtatcgctggtgcatgcgcggctgagcatcatggaccctgagcacggcctgcagccgatgcacatgcaggaaggcagcatcgtctataacggggagctgtataatggcggcgagctgagagcagagctgaaacaggcgggctaccagtttcagaccaagtgtgacacggaggtggtgctggccgcgtacctgcattggaaagagcattgtgtggaacgcttcaacggcatcttcgcctttgccatctgggatggctggcgcaaggaattgttcgtcgccagggatcccatgggggtcaaaccgctgttttacaccgagcaggcgggcatgttcctgtttggcagcgagatcaagacgctgctggcgcatccgcagatccccgcgcaggtgagccgtgaagggctgatgcagctgatgctgctaggaccgggacgcattccgggggacggtgtattcgagggcatccgggagatccgccccgggtgctgcggctatgtggatgtgcatggtctgcacagctgggaatatgcgcctctcaaggaccgccggcatgttcagtgcatggaagagaccgttcagcatgtgcgcgagctattgctggatgcgatccaccggcagctgcaggcagatgtgcctgtagggacatttctctccggcgggctggattccagcatcatcagtgccgtggcagcgcgggaatttgcggcagaaggaaaggtgctccacaccttttccctggattatgaagacaatgagaagtattttcattccacgaagtttcagccggatgcggatacggcgtatatgcagctcatggccgatcagctgcacagcgagcatcatctgatcgtgctgaagccggaagatgtggcgcaggcattgtatgcggcggtggaagcccgcgatctgccgggcatggccgatgtggacagctcgctgctgctgttttgtcaacagatccgccagcatgtcaaggtggcgctttccggagagtgcgcggatgagctgttcggcggatacccctggttccgcgattcccagatcaggagccgctatggctttccatgggcgcagacgagcgcatatcgcagcacgttcatccgcgatgagatcctgcagggacaggatggggaagactatgtctcgttttggtatcagaagagcatcgacgctacagattgtgtggaaggcatcgatacggatgagcgccgcctgcgggagatggtgcggctgaacatgaagtggttcatgcagacgctgctggaccgtaaggaccgcatgagcatgtatgcgtccctggaagtccgtgtccccttctgtgatgtaagacttgcgtcttatttatacagtattccctgggaaatgaaagattaccggggctatgaaaaaggccttctgcgtgaagcggtgaagggcctgcttccggatgaagtgctgtggcgcaaaaaaagcccgtatcccaagacctggcatccgcgctatcgccagacggtcagcgccatgatgcgggaagtgctcgctgatcccggcgcgccgctgttcgatgtggtcagacggaaacgggtggaggagctgctcgatgaggagcgcagcatcccctggtatggtcagctgatgaccacgccgcagacgatcgcttatctgctgcagctcgatcactggctgaggcattatcatgtccagatcgtctagcgttcagtacggctttccagcagcgggagcatgatcgagaactcgacgcgctctccgctgtcctcacaggagaaggagccatcatagcgctccgcgatctgccgcaggatgccgagcccgaggccatgcccctctcctttggaggaagccatgccctctgtccggacatggagagaagcgggcttgtgattggcgaccgtgacgatcaggcagtcagccttgaccgcggcagagacgaggatcatccgcttttcgggcggcatgagcagggagccttcgatcgcgttgtccagcaggttggcgaagacggagatgaggtcgacagggctgacggcgatcctttcgggaagcgccagggcgcagctcatgtggatgccgaacgcgtctgcgcgggtcttcttgctgaagatgaccgcgtcgatcaaggtgttctcacacagctccatgctgcacaggcggctgtattcctccagcagctgggagatgaccacattgcgctgcatgaggctcagttcgctgagggcggggaatcggtcgatctgcttttcaatctccgcgcggatctcctccaggctggccgctgtggcttcatggctgcgcagatagttttcctcgacacattgccggcgccggatgcgccggttttccactttccgcgcacggtagcggtgaaagcagccaaacagcccgcagagcagaaggccatgcaggatcagggccatgatgcaccagggcagcaggcttcgttccttcagcagcatgctggaaaacagcagggcgaagaagagcagctggctcagcagcatcccatataagcgcagataaggatgttcagcgttcatcctgcccctcctctctttctctggcgacggcgatcgtctggatgaggttgatgatgtcgtggcgcatgcggcgcagctgtctgccatcgcgcttgcccatcatccggctgcgcagccgcctgccatatgccatatacatgcggctgagctgttcttcctcctgcgcgtgcaggaagagacgctgcaacagcggcaggagcgccatgtccgcacacagcgtgaggacgacacagcctgccgccagggcgaaggggatcgttgaaaacggcagtgtcatgagagagaagctgaccagctgcagataaaccagcagcatcatgagcaaggcgggcgccttgtcttgctgaaataccgcgtacagccgccgcagccatggcgcagccagaggcagagggatcatcagcgccgcgctgcacacaaatggaaagggcaggatcagctccaggtccagggtcagcgcatacagcgcgcagggcagcaggatctcgctgagcatgagcctgccctcgcgtgcctgtaacaggatgaagggcagcggcagcagcgttaggcatgctggcaggggaagcagcctgcccgcgcacagcagcgccgtatgcagcatcatgcgcaagcaggaatatcgcgaacacagcatccgttcgcagaacagcgccatcagcgcggcgctcatgcccatgcaggcgatgtcgatccagttgtccataggcatcctcctcgttatccgtattatacatggaaaatgaacaaaatctggcaaaatccatcaaaaatgaacagcaaacaggaagacgctgcatttcgttacattaactttgcacttcgtgtaggagggccgtgcgcgtttgcgatggaaatcaagctgtaatataataaaatcagcgaaaatgaaggggatcacagaatggggaaacggatggaagacagggtgaacaacacgcctgcattgccggcgggaacgcttctgcaaggcaggtatgagatcgtcgcggtgctggaggaatttgaccatgcgtccttttacgctgcgttcgatcgggagctttcacagcgcgtctgcatcaagacatcccttggcgcaaagcagagccgtccgagggcggaatggctgaaggaagcccgcatccagatgcagctgcaccatgagcacatcccgcgttgtctgaactatgttgaagaagagggcgtgcccttcatcgtcatggaggaactgtatgagatgcggatgagcgatctgctcgcgcgggagcgcttgggcatgcagcggatccacgcgatggcgatgcagctgatggacgtgctggatcatatccatcaggcaggctatgtgtgcctgaatgtctccccgaagcagatccgggtgaacgatcatgatgagatcatgctgtatgatttctcttttctcacgcgcagcgggcagcgcatcacgcatgtcccgcagccggagctggcggaccatctggcgcctgaggaatttgcccgccggagccatgcgcgccgcagcagcgatgtgtatgccttgggcgccacgctgtatgagatgatcagcggcaagacgccgctgtccgcccgccgccgtcagcgcatcaccgagcgctatcaccgcgagatcctggagaagctgtgcgccatcgacgatgaggtccctttgcatgtggatcaggccatccagcggtcgatgtcgctgaagccggatgagcgtttccagaacatggcggatttccgcaatgccatggagcacgaatgccacatccaggaagaaaagcgtcgcgcgaaccgccgacagtgcgtcgcggcagccatggtcatcctcaactgcttgctgatcgcctgtctcatcctggggctgatcctgcatgagaagagccgctttcacccatcgatgatccagggcgagctggaagtctggctgccttaccgcgatgcgcgcgaacaagcgctcaacgcgcagatctgttccctgtatgaacgaaaatatccccaggtggagctgcaggtgacccagcttgcgcaggaagactacgcgcaggcgctcgatgcggcagatctgccagatgtgttcttctatgcagaggggatcgatgaatcgctgctcgcagacctcagcgatctgcaggcggcgatggaccttgacgccttgttcggcatcgaggccggcgcgcatacgctgaagatgccgctggcctgggatgcccgcatccattatgtcaatacagcggcgcaaggcgaggcaaagacgctggaagactttttggcgggaaaaggcggatcctggacaggatcgctgctcgcgctgccgcagatcagcacgtcgcttgccggctactgggacatcgttcccacccagaccatcgaagtgtcctttgcggatgagatgtgcgtgaagcgcggcgagcgcaacgtggagagcgcaggcatgctgttcatctacgagatgctgggcgaacaggcgcagagcggctggtatctgcagcagcaggacctgcttccgctcaaccggcagatcctcagcgaatacgtcagcgtatggccgcagctgtcctacttattggacgatgcacggcagatcgagatcagagaagggggaggatgagatgatccgctgcatgcagtgtatggaagaatatgatgagcggctggaccgctgcccgcactgccatcaacagccgcaggcgcctgagccgttccagcttccttatggcacgatgctggacgatcgctttctggtcggcgccatgctgggccatggcgggttcggcatcacttacatcggctgggacacgctgctggatcagaaagtggcgatcaaggaatatctgccgatgaacctcgccacccgcatcgacgcccagcgcacggtgaccgtctattcggatgagcgccgcgccttgtttgagaaggggcgggagaactttgcgaaagaagcgcggcggctggcgatgttcaacgccgaagaaagcatcatcacggtctatcacagctttgcggaaaacggcacggcctatttcgtgatggaatatgtggaaggagagaccgtggaggaacgcgtgcgccgcaaaggaaagctgtcctgcgatgaggtgagaacgatcatggtcccattgctggacgcgctggaaaaggtgcacgagaaaggcatcatccaccgggacatcgcgccggacaacatctatgtgaccaaagcgggcaaggtgaagctgctcgatttcggggcggctcgcagcacgatcagcgattctctgacttcccagagcgtatcgatgatcatcaagcggggatatgcgccggaagaacaataccgcggcaatggggatgtctctgcggccagcgatgtctacagcgtcgcagcgacgatctacttcatgctcagcggcaccccgcccaaggatgccatggagcgcacggacagcgaaaagctggtcccgccctgcgagctcgcggacggggtcgatcataatctgaatcaggcggtgatgaacgcgctgatcctcgatccgcatcagcgcacgcagagcgccagggcattccgcgacgagatcatgagccggcggcgggtcagaaagcgccggcagcgggagagggaaaacgcctttacgatctccggacgcaccaggatcgcgctctccgtctccacgaccgccgtcttcctgcttgccatcgtccttgcgctgacgctgatgaacgccggaaagctgagcggctggagccagaacgtgctggcagcagagcagacctatgtgccaggcgtgctcagcctctctgagcgcgaagggagggaacgcatggaggacgccggattgtccttgatcgtgacagacaagaatgatgatgcccagatggcggccggactgatcttgagccagagcctgcagccgggatccatcgcggaaaagggcagcgtcgtgacggagccgagggccaagccgcgtgctcatcccggatgtgcgcttcatgcgtgcagaagacgcccgcgcgatgctggaagaagccgggctgaaggtgaacctgcgcgatgtgcaggatgcggatcatccagccgggacgatcatcgcccaggataaggtgccgtatactgccgcctttgcgcaggatgagatcaccctgagcgtctgtgcgggagaagaaagcgaaggcacgctcgatgtgctgcccgagctggagggcatcatgctggaagacgccatgcagcgtgtcagcgaagccgcgctcatcgtggagagctacgtgccggatgaacgcgcggcagggaccatattgcaggcgaagcgcgaacgaggatatgccgtcgtgcaagtgagcagcggccctgcgctcgcggtcatcccggatgtggagctgatgacacaggagcgttccgaagagaccctgcacgcgatgggctttgtcatcgagatcaaagagacacagaatgaatacatcgatgagggcaaggtgatcatccaggatcagccggccggcaccgtctgcgagcagggaagcacgatcatcctcaccgtcagccagacatcactgccgcaagcggcagacgatcccgtggaggcccatgcgcaggcacccgaagagcctggcgaatggacgtcgtggacgagcgacgatttcctgcttggggacgcgcgctatgaggtcatggagaagacccagtatgccagctacgatatccgcacagagcgcgcggcagaagccgatgtgccagcgggctacacgctcatcgacacccgtgagagcggcgaatacagctcatggagcgaatggtcggactatgtggatggcgcggccaaggaaaacaccgcgctgatcgaatacacgccgacggaatatcagtaccgttattataactggctttgtcctgaggagacacggacgccagactgttactgttatccctttgccggttatcgctgtcgcacttgcaaacaagactgcgacgtctatgaggaacggctggcctggaactcaccgccggaaagccatgtcccatattatctgacattgaataatggcagaggcagctgggccgtgcactggaacggggtcacgaacgacgactggttctataatgaagagtcactgatcgccgcccagcgccaccgtgaacgcacacgcagcccgctgtatgattacacttaccgcgccgatgcgccttcagcatggcaggatgagcagatcatcgcggacgagcatcatgaggtcatcaccaggaccgtataccgttaccgtctgaaatccaaataaaggcaggaaggggaaatgatatgtatcagtttgtgatctgtgaggatgacgcgcagcagcgcgatcatctgcagaaattgatcaaaaagacatacggcggacagccggtcttctgttacgacgatgtggacacgctgctggaagagctgccgcatatcccagcgccgcgcatcatcttcatggatatcgtgctgaagacgcgatccggcatcgaggcggccgcaaagatcgccccggccgatacggccatcatcttcatcaccgcatatctggacaaggtggtcgatatcttcgaagcgccgcacacctatttcatctataagcccgatctggaagtgcgtctggccccggctgtggaaaaggcgatgaagcagctgaacgatcatcgccggcggatcgtgctgcagatgcgcgacaagaaggtcgtggcagagaccgccgatatccttcggctggaacgcacccagcgcacgacggagatccgctgcctcaaggaaagctaccatgtctctgacgatctggatcatctgctggcccggctgccggacagcttcgtgcgctgtcatcgcagctatgcggtcaatctggatgccgtgaagatctaccggcgcaatgagctgatcctgacagacggcaccctggtgcccatcggccgcagctattgcgagcatgtccggaaaaaattccaggaacacgccgcccgcaacatgagcacagaggggatagagctgaacaagcaagaggaagaggatccagaagaaaaataggagatcttgcaggaaccgtcatcacggttctttcttttggcgcgtcttgcaggaaggtggttacagatcaggaggaaactaagagaaatcgacaacaaaaaagcggcagcgagagctagttcgcctcactgccgttcttgtcttgttcctcttccagcagacgggcatacgcctttgcctgccggcacagatattccgggacgccatcataagcgcccgtctccaataaagccgccgatacgcagatcttgcatacgggacggtatgcgcaggaaccgcacttttcattgaagcaaagcggctttgcgccgtcaacgatctgtttccaggccgtctcaaagccatgctcgaacacggacaccgcaggctctggctgcatcacgcacggcttcatgttgccttgccagttgaccgtgaaggagcagtgcgccgccatgcaggagatgttgcatggcgaagagagcggttcttggagctccttgcattttcgctggcggtactcctcgaagacctcggccgggtattcgttcttcatcgtctgcagctccgcccatgcggcatcctccggaagcaggcgggactgctcctcgatcggccgcccccggtcatgcaggcccggcagcatatacgtatccatatgcaccggcacatccagcgatctgcccagcgcatagatggcttccatatcatggacattctctttgaccacgctgccgttgatcttcacatccaccccgtgcgcgcgaagcagcttgatggcccgcacggtcttttcatagccctcaaagcggcagagcttccgataggtcttttcgctggccccatacagcgtgatgttgatccggcggggacgatgcgcgccaaagaaggccgcccactcctcatcgatcagcgtgccgttggtgttgaccgtcaggatcatgcccagcgcctgcagcttcagatataattcgcgaaagcccggatacagcagcggttcgccgcccgtcagcagcatgaagaccacgcccgccttctgcatctcttctgtgatgcgcatccagtcctcgagcggatgaagcgagcccatctgatccatctcctgacggctcagccgcacatagcacatccggcagttcatattgcacagcggaagcagctcgatgctgccattgatgggacgatactgctgcgccgcacgcgccatcagcatcttctccagagaaaactcattcgcttccataacactcacctcgatcaaaaaggacggaaacattccgccctgtatcatatcagatttttatgaatccgccaattatgagcggttgggatggccttctgcagtcgcaaatactgtacccatgtgattccaagttctgccatcagaagcagtggtggtccaaaaaatggtatcaccaacttttacggagctgacatctctgggctgggtaaaatttctatcccaaaaaatagaacactctaaatcacctaagccggcggtgccggtctcgatcatgcgatcacctatgttatcgccgttatcatcaaaaatgacctggttggaagagtttccgcagtgtgccgcatcatgggtgacaccattgtcgaaatctccttgcccctgctcataattattcgcccagtcaacattacattgtactccccagcaagccgcgatatattcatttgctgcaaatgtttcccctgccattctcggtgttacatactctctcatgttcaaaacccctttctgtcttgttaccgtatgatattgtattgcatgtcttccatgtatttgccgtagttactggatctcgttttgctgggatccggcggatgttttgtttcggtgcaggaactccagcatctctctgtcgttcatttcctggaggcgaatggtctcctcgggcgtgcattccacgcgctctgcgctgactcccggataagatttcttcattgcggcctcctttctgcttcggaaactgtctttgaaggtacacctttgcggatggacaataagagcggattatggtatgataacagtgtttagaaacagtgagattcttgtgattctcatcacagatccaccgttttcggttcggaaaagatgtgtatgtgaaggtgtacctttgcatacacatttttgtcatttcagacaagagaagcgattggattttggaaaagaaccatggcaaatgtgtgagattatgtaaaaattagcactgtagttgctaaagtgctaaaaatgtgtataatcattgacataaacgggaggtttgcggtatgaacaaacagaaaaagccattatactggtattatcttgtgatcctcattgtcttgcttttggtgaatatgatcatcggaccgttgtttgccaataatcatatcaaagaagtcacatacagcgatttccttgattcgatcgaggaaaagcagatccaggatgtagaagtacatgatacggagatctattatacggtaaagggggatgaagaaacggtctatcagaccggtgcgatgcaggatgctcagctggttgaccggctggatgaggcaggcgccaacttcacgaaggtgcagacggaagagatgaatccgctgctcagctatctcatcacgttgtttttgccattgctgatcttctggggactgggctcgttcctgttccgccggatgcagaagaagatgggcaaggatgccatgtcgtttggcggcagcggaagcttcggcctgggcggcttaggcaagagcaatgccaaggtctatgtgccggcgcagggcggcaagaccttcaaggatgttgccggtcaggatgaagcgaaggaagcgctgaaggagatcgtggatttcctgaatcatccggacagatataaggagatcggcgcgcagatgcctaagggcgctttgctggtcggtcctccgggaacgggcaagacgctgctggccaaggctgtggccggagaagccggcgtgccgttcttctccatcagcggcagtgagttcgtcgagatgtttgtcggcagaggcgcagccaaggtgcgtgacttgttccagcaggcgcgtgagaaggccccgtgcatcgtcttcatcgatgagatcgataccatcggaaagaagcgtgacggcgctggattcagcggcaatgatgaacgtgagcagacgctgaatcagctgcttgcggaaatggatggatttgacggcagcaagggcgtcgtcatcctggcggcgaccaaccggccggaatctctggatccggcgctgcttcgcccaggtcgttttgaccgccggatcccggtcgagctgccggatctggctggcagggaagcgatcctgcgtgtccatgccaagaatgtgaagtgctcgccttcggtcgacttcaacgccatcgctcgtgcgagcgccggtgccagcggcgccgagctggccaacatggtcaatgaggccgcgctgcttgcggtgaaggacggccgccgcagcgtcgtgcagaaagacctggaggaagccatcgagaccgtgatcgcgggctatcagaagaagggcgcggtcatctccaacaaagaaaagctgatcgtctcttatcatgagatcggacatgcgctggtcgctgcgctgaccaagggcagcgcgccggtgcataagatcaccatcgttccgcgcaccagcggcgcgctgggctacacgatgcaggtcgaggaaggcgaacagcatctgatgaccaaggatgaggcatattcccgcatcatgacgctgacgggcggacgctgtgccgaggagctgatctttgattcgatcaccagcggcgccagcaacgatatcgagcaggcgacgaagctggccagatcgatggtcacccgcctgggcatgagcgatacgttcggcatgacggcgctggaaacggtgaacaatcagtatctgggcggcgacaccagtctcgcctgcagcgcggagacagcggccaaggtggatgaagaggtcgtcaagctcatccgcaaggcgcatgatgaagccaaggaactgctgaagagcaacatgagcaagctgcatgagctggccaagtacctgtatgatcatgagacgatcactggggaggagttcatggagatcctgcagaagagcgcataaatgatcaaagggcggcatcggccgccctttcgtgtctgaaaagcgcttgcttgttcgctcatcgctgcggatgagggccaagcgagcggttgaggatctgggtgaagctgtcgtcctgacagtgcaggatgatctcgttttcgctgaatggatccaggaagcgcagggtgtctgcgtgcaggcagagccgggggatatcatcgcggatgccgtagatcggatcgccgagcagcggatggccgatggaggccatgtgcacccggatctggtgggtcctgccgctgttcagcttcagcctgaccagggaatggttttcgccatgcgccagacgcgtataggcggtgtgcgccgcttttccctgcgggctgcattccatatgattgagcgcatctggggtgcgtgcgatcggtgtgtcgatgacgccttgctgcgggcatatgccgtggacgagggccacatattctttttgcagctgatggcaggcgcgctgctgggtcagcctggctgcggcgatcgggttcttggcgaacagctggatgccggaggtgtccttgtccagcctgccgatggtgtgcaggctgcaggcgcgtccctgatcgctgagcagcgcgttgagctggacgctcatcgtgtcatagtaatgcccatgcgtagggtgaagcgtcatgccggaaggcttggccagggcgatccagtctgcacgttccgccaggatgaccagcgggatgcgggtaaaatcatcggatgtcgggatgaagcgcctgcccagatcgagggcggcgcatacggtatcgccgggatgagcaagcgcatcggtgcgcacctgcctgtgattgagcgtgatgccatcgggaatgtatttgaggcggctgatctgtctgcgggtcagccccattttcttttccagcacgtctttgacgcgcagcatcccgtcttgttcgctgatctggcagcgcaatcggtgttccatagcatccctcctggctctcattatagcagaaaaagaaccggcatgcgccggttcgcttcgggatggccccgtcttgggtcactgctccttgtagtagcagccttcttcctgagccggcgggaaacgacggcccttttcaacgtcgatgtcttcgcctacgcatttgccatcggcattgtagcgggaatatttcccggtcttctcacagttcatacccggacggtatttcttgtttgccatgaatagcacctcccagtagctagtatgcctgtcaggaccgggcttattcacactttctgcagaatgcaaaaaagcgatgattctgcatgggcactgtggtaaaataggaatgatctggaatggaggaagcagacaatgagagtactggcaagtgattatgacgggacgctgcggatcgaagagaaagtgacgaaggcggatctggaggccctggcgcgctggcgcgaggcaggcaatctgttcgtggcggtgaccggccgcagcatggagtcctttaccagggagatcgcggaaaatggatttgcctgcgactatatcatcgccaacaacggcggggtcatctatgatgggaagatgaaccggatgcaagtaaattatatggattttgatcgggccatggcgctgatcggctacatccgcacgctgccgtgtgccagctatgtcatcaatgatggatattaccgccaccgcatcgtggtgaatgaacaagaggaagacctcaagtatggaaagatgccgcaggagaagaatgaggcggagctgctggcgtccgggaagatcgcgcagatcgtgatctcgctgaatgatgacgcgctgtccgccgagatcatcgcccatatccacgaggcgttttctgactgtgtcgtcgcttatgcgaaccgtcactgtgtcgatatcgtgcctcgggggatctccaaggcgaagggactggcgttcgtgctggcggatgccggcgtatcggtgcaggatgccttcacgatcggggattcctataatgacctgcccatgatcgaagcatatcatggcttctgcatggacagcgcgcctttggatatccaggaaaaaagccgcggcgtctatcacagcgtcggcgcgtgcatcgcggacctgatgaaatgagatcaggctgacgctgcagaaaggagtgtctatgttcagtcttacgcttaacgatgtcttgaatgtggtgcgggcgcttctggacatcgggctggtgtgggccgtcatctttttcggcctgcgcatcgtccgcaacaattcccgaacggtgcagatcttcaagggcatcctgttcatcttcatcgtcaagggactggcgatgctgatcgggctgacgacgatcaactacatcgccgatatggtgctcagctggggcgtcatcgtcatggtggtcatctttcagccggagatccgcatgctgctggagaagctgggcaagaccagcgtgctgacgcggctggccgcgctttccagcaatgagaaggagcatctggtcgaagagctggtcaaggcctgcacgcagatgtccgcgtcgaagaccggcgcgctgatctctttggaacaggggcaggatctcagcgattacatcaagacggggacgagcatgaactcgatcgtctccagcgagctgctctgttccatctttcaatatggcacgccgctgcatgacggcgcggtgatcatccgcggcgtacgcatcgcctgtgcggccgcgtatttcccgccgaccaccaaggagctgccgaccagctacggcgcaaggcatcgggcggcggtgggcatcagcgagatcacggattccatcacgatcatcgtgagcgaggagaccgggacgatctctatcgcggaggccggcgagctgaagtcgtatacgagcgaagagctgcgtgattacctgatgacgcgttatcagatcgagcggcgggagccca

SEQ ID NO: 1400 - DNA, 17606 bp, Unknown
  16S sequences of unknown bacteria
agtcttccgacaagcgatttttataaaacaaaaaatcaaagtcggaggacaaaaatgaaaaaagtaacctacaaaatcgagcaattcaagagtatgaccattgaagttgagtcagatgaacaagtgcaaaaaatcgaagagttgaaccgggactttgagcgaacggacagacaaaaccgtagaatcaaagcaaaaaccgattctcttgatcaaatgtatgaagcggggtgcgagcttatagcagacactccaactccggaagaagcattacttcaatcagaagaagaaagcgaagtaaaaaagcgtgtccataatgcaatttcaaaactaaagccgcgtcaacaacaaataatctatatggcctattttgaaaataaaacgcaggaagaaattgcaaaagcgttaggtgtttcacaacaggcaataagtgagagcttaccgcggctgttggcaaaactgaaaaaaattttaggtaaaaaataaatttttttcaaaaaaaccttgtaaaacgatactgcaaatgtccattagtagtgaaggggtatgaacctcgcacgaaaaaggagcttgaatatgaaactgaaaatcaaagaattcaggacaatcgcaaaaagaaaaggatatggaaacgagaaaatattatatatcgcgctgggaggcggcgattacggaatcaatgctatcaaagctggatgcagagtcggatatgaaatcgtaagagaaatatataattttttcggctccgcgattttgcttgaaatagtagatatggaggaggaaacggttagtggacttgaaagtaaattcattaaaatcggaaacaagttgtactgatctcgtttcgcacgatgggtattcgctccgaatcaacgctttctttgcgtggctcagacgaagcggatataccctcgaatacatagccgaaagattagcaacaactcccgatgacattgtattaaggctaagacgacgagaaaaattcaatgaaagagaactgaggattctcatttatcttatgagagctaaagacgcgtttttcgtaatatattttccgtcgttcagattccgtaaatacgtttatcgttgcgtattcgggaagaagatgagatgccgaaagcggaggaggtggaagaaaaagtgagcgagattataagaaacgcggacagaaacagagcgatacaggcaatgatgacggatggggagaaactgaaaagtttttatcgtttcgtcgtaaacaatccgcatatcccgttgcacgacgcctgtcagatcgtaatctcaagaccgagcgcgagcgtatgcttttcctttgaagagtggaacgcacaaggcagacgggttacgaaaggcagaaagggtattccgtattacgacggcgacggaaataagtatttcgtattcgacgtaaccgatacgcacggcgaaaaccgttacagacgcgccgcacagcccgtgaaaaagattttggacggactcgaccttcttaacggcacggaaatagcggacagcaaccgcggggattaccgcattatgctttcgggagtcgtaacttatctcggacagaacgattttctgaccgaaaacgacgagataaggaacagactcattgcagaaggcgtggcgtattcgttgtattcgacaacgggttttccgaaagagcgcggaattacgctgaaaggctatccttacggcttgggagataacgcggatctgtttcgtgaaattcagagcgtaacgaaaattctgcaacaggacataaatgacgcggttttcaacaagaagaacgaagtagccgtaatcgatgacaccgaagaagactacgttacggacgaacccgtgcttccgaaagcggacgaacagcctgcaaaacaggaagaaaaagttgaaacgccgaccgtttcgccgttttaccaacggtatgcagagatacaaaaggacaaccccgattgtatcgtaacttaccgcatgggagacttttacgagattatgggcgaaaaggctgaacaagccgccgaaattctcggattaaccctgacgggcagaaacgtaggacttcccgaacgagtgccgatgtgcggttatccgtatcacgttgcggatacctacttggaaaaacttatagaaaagacgagcgtaatagtcgtcgagccggacgcggagccgttcaagattttatcgcgagcggaagcgggagtagaacatactcttgtggaagcgacgaaagaagaaagcgaagaattcgagcgcgcgtttgccgaaaaagaatcggacgaacagtccgagccggaaaccgaggatgacgaaccgaccgacgaagaaatcgaagaagcgtttgccgcagccgaagcggaagaaaacgatggtgagagtgattacgattcggaagattacgactacgaagagagcagaaagcctgtaaaagcggaaaagcccgaaaacaagggcaagcgaatgttcgagcggcgcaaccgtccgagtatgcaaaaatccttgtttgacgcgtttgaaacgaaaacgccggaacaagagctgacggaacaaattctcaaaggcggaagcggtgtgagcggaggaaaggtccgcatttataccgaatatctgaagaatccgtatgaaaaagatttcgtccgttttttaagcaaagaatacggaatcggcggtcgcggcggtccggacggaattgacgaaatgcacgacggcaagggcattcgtttcagcaaaaagaacacggaaacgggcgaaacagaagtcgcggtgaacttgaaatgggagcaagcggcggttaaaatcgcagaccttatcgatgaagaaaactacttaaacgacgaggaaaaggaagaatacgatactctcgtgagattccgcgaagagagaagttcggctaaaagcgacgacgaccttataaaaatcatcgcaaggcaaatcgtggaatacggcacttcgcatacctatggcgaaaaatacagcgattatccgcatttccttggcgaagccatgcagttttatacgcagcactacgaagaagtaaacgccgagcttataaaattcgacgaagtaaaaagcgtgggtaaaggcaatatttacccgtattcttcaccaaacctgtcgttcaaacttccgtattgtccgttgtggcaggcgaaagaagcgcgattgagagagtgcgacgagcgcataaaagagtatgcagataagtttacgcgaaaatgtgcggacgagtatcggccgacctatgacaaaaacgttgttttaaccgtaacgccggaagatatttcaagccgagagtatttgtttatcaaagacaatcgcgaagattttatcaaatacttcttaaagcaaaagggcgtgcatgacgtgaatctatctatgcaaaagatagaaataacgtttgacagacggtatatcgaatcgcttatcgcagggaaagagcaaacgccggaagaacgcggaaagataagaaaaatcgcgaacggcattattgcagagggtataaaagaaagcacggaaggtaattacataaccttctttgaagatttcgtggcggataaagatttcgttattgcccacagaaaagaaatagccgacgaactgtgtttaagggaagaagtctccgacgtggaaatgaccgacgagtgcttcgacgtcaattattacaccgattgcctttggaattacaaggacgaaaaagacgattcattgcctgttcgggacttggacgaagaagaggacgaagagtgggaaagtagtatcgcaagcggtgaaataaaacctatcgagcggcaaaacgaacccacaaaagaaagcaataccgaccttacggaaatcgggtttacgcagagcgaactcggcggcgcgaagcagcgtttcagaaacaacgtcgaagccattaaactggtcaataggttgattatctcgcaaaaagaggcaaccgacgaggaaaagaaagtgcttgcgaaatacgtcggttggggcggtttggcgcaagcgttcgatgaacacaaccttgcttggcaaagcgaatataaggaactgaaagccgttctcgacgacgaagagtatgcggcggcaaaaggcagcgttctcaacgcgcattacacgagcaaaacggtcatcgacgggatatataacgcgctttttcgtttcggcgtaaaaggcaacaaccgcatattagagccggcgacgggaacgggcaatttcttcggatttatgccgaaagagattgcggacggtgcgaaactttacggcgtggaactcgacaaaatcacgggtaaaatcgcaacgaaactgtatccgcaggcgaaaattcagattaaaggctttgaagagacggcgtttgcggataattcctttgaccttatggtaacgaacgttccattcggcggttataccgttttcgatcccgattataacaagtataacttctacattcacgattattttcttgcaaagggtatcgacaaggtaaagccgaacgggcttatggcggttatcacaagcaaggggacgatggataagcaaaatccgtctatccgcaagtatatcgcggacagagccgaacttgtgggtgcggtaagactaccgaatacggcgttcaagcagacggcgaataccgaagtcgtaacggatattctgttttttcgtaagcgggaagaaagaataaacgcaactatcgaaaataccgaatggctttcaacgggtaagaccgaagaagggtacgaaataaacaattattatatctctcatcccgaaatgatcctcggcacgcttgtaaaagaaacagggctttacggtgcggaagatataacggtaaagccggacggcagagatttatcggaagcgataaacacggctataagccgattaccgcaggatttctacgttaatcccgaacatgcggaagaaacggaaagcagagaagaagtcgaagtggactacgacgtaaagccgatgaatctgacggcggtaaacggcaaaatatatatgcgcgtgggagatagtatggtagaacaacccgtgccgccgttcccgaaagacgcatatcagagaattgccgaaatgatcgaaatccgcaagcaactccgcaaagtgctggatttgcaggtggaaggctgttcggacgaagtgttgttgaaagagcaacggcaactcggcgcgagatacgatggttttgttaaacgattcgggtatatcaacagcaagaacaatctaaggctgttcaaatccgacggcgacagcgcactgctatttgcttgcgaaaacgtatcggacgacgaagaaacggtaacgaaagccgacgtgttcacaaaacgcacgatcagaccgtatacggcggtaacgagtacggacgactgtttcgaggcgttgcagataagcaagaacgagcgcggctcggtagatatttcgtatatcgaagaactcacgaaaaaggactacgacaccgtaatcaaagaactcggcaacgcggtattccgtaaccccgcggcggtcaatcccgaagataaatattcgggatttgaaacggcggaagaatacctttcggggagagttacggataaactgcaaacggcggagcgaatgaaacaaagcagccccaatcttatcgactatgataaaaacatttcggcgcttaaagaagttcagcctacgccggtaaaagcttcggaaatcgcggtgagagtgggaacgagctggatagacaaagaactgtataaagagtttttctgtcagttaattgcgctcccgtattatatgcgcgacggcatcgaactgtattacaacaaacacgacggtagttggcgcgtagaccgcacgacggggtatgtgcgaaacttccgcacgatgaacgtaacgagcgtatacggcacagaacgggcgaacgcatacaggctgtttgaagattgtctgaatcagcgttccacgcagatttacgatacggttttggatgcggacggcagagaaaaacgagtgctgaacaactccgaaacggtcgcggcgagagagaagcagaacaaaatcgtggaagcgttcaaggactggatattccgcgatcccgaacggcgagaagaactcgaaggcgtatacaatcggctgttcaatcagatcagactgccgaaatacgacggaagttatctgcggtttcccgaaatgaacccggagatagaacttcgtccgcaccaaaaggacgccgttcacagaattattacgagcggcaatacgctgcttcatcatatcgtgggtagcggcaaaacgtatacgatctgcgcggcggcaatgaaacttcggcaatacggcttggcgaaaaagccgatgatcgccgtgccgaatcacttggtgcagcaatgggcgaactcgtttcggtttctttacccgacggcgaaactcctgattgccacgaaagacgatttggacaaagaccacagagaacaatttgtgtcgcgtgtagcgatgggcgattgggattcggtgattatagcgcaatcgagttttgcaaaaatcaatatctcgcccgaacggcagatagcaaagatacgcgaagaaattgaggcgatagaacgcagtatcgaaatgcagtgggaagagagcggctcaccgtccggttcggtaaagaacttggagcgtatcaagaaaggcagagaagcgcagctcaaaaaactgctcgacgaaacgaaaaaagacaacgttttaatctttgaaaaactcggcgtggactacctgttcgtggacgaagcggacgcgtataaaaatctgtttctgtatacgaaaatgaacaacgtagcgggaatttccaacgcggcgagcgcgagagcgagcgacttgcagttaaaaatagagtatatcaacgaactgcacggcggagataaaggcgtggtgttcgcaacgggtacgcctatttccaactctatgacggaaatgtacacgatgcagacctatttgcaaaagcaaacgcttgcaaggctcggtatcgattacttcgacgcatgggcggcagacttcggtgaaacggtaacggcgctcgaacttgccccgtccgggaaagggtacagagcaagaacgagatttgccaagtttacgaacttgcccgaacttttaacgctgtatcattcgttcgcggacgtaaaaacggacgtaaaactcgacgtgccggaagcggagcgaaaggttataaccttaaagccgtctgatacggtaatcgacctgaccgaagagatagcgaaaagggcagacgcgatttacgcgggcggagttgatccgcatatcgacaatatgttaaaggttacgggcgacggcaagaaacttgcgctcgatccgaggtgtatagatccgttgctttcagacgaaagcggaagcaaactcaatttctgtgcggacaacgtttacgaagaatggaagaactcggcggatattaagggaacgcaacttgtgttttgcgatttatctacaccaaaaaaaccgtattcggaatatgagtacggcaaggacttcgacgcgtataacgacttaaagcacaaacttattgagcgtggtattcccgaaaacgagattgcgtttattcacgacgcaaacacggacagggcaaagcaagacctgttcgataaaatcaacgccggtgcggtgcgagttttaataggcagcacggaaaagtgcggagctggaacgaacgtgcaaaaacggctcgtagccattcatcacttggacgcgccgtatcgcccgcgcgaccttattcagcgtaacgggcgcggtatccgtcagggcaatatgaataagggcattcgcatttacacctatgcgacggaacggacgttcgacagttattcctatcagatactcgaaaacaaacagcggtttatttcgcaggtagaaaaaggggatatgacggtgcgcgaagccgaggacatcgacgaggcaacgctttcttatgcggaaatcaaggcgattacttccgccaacccgaaaatcaagcgaaaaatggaactcgatatggaaatggcaaggcttcgtgatttggagagccgttataagaaagaactgtttgcattgcaagacaaagtgcgaaaggaattccccgaacaaattcaacgtcaggaactttatctcgaaagggtaagaaaagacatcgaacttatcaaggtgcattataaccccgacagattcgagattaacgtaaacggcacggtttattcggacggcgtggaggacggaaagaagaacggcgggcttgcacttatggacgcgttgtttcataacaagacgggaacggtcgtagcggaatattgcggtttcaaaatctctctgaacccgatagaactgatcgccaacgagcggagcattacgctttcgggcgcggggcaatacaagctggacatcggcgagagcgcgagcggcaacctcacccgattagagaattttataaaagatttttccgaaagggaagagcgtgcggtaaagcgtttggaaaccacgaaagccgatttcgagattgcaaaagagcaagtaaacgtgccgttcgagcataaggacaagattatagctctgaacacggaactatccgaactcaacgccgaactcgacctcaataagcgcgaagaagtggtaatcgaggacggcgaagaggatagcgaaacgaatgaaaccgaagaggtttacgcggcactgccgaaaaaacaaacaaaaacaaggaaacagaaaaagactatgcttacagaaaaattatatcgaacgtataagcagacggaagagaagaaccccggcgcgatggtgtttgccgtaaagaacggagattatacctgtttcgacgatacggcagaagaactcacggcactatcgagcctgtcgccatcgtatttcaaggcaggcgaaaaggaagtaaaaacgcttacgatagacgaaacgctctttcaggaatttgcgcaagcctttatgaatgcgggcttgaaaatcgcattgttcgacgaaccggaagaagagaaaacgtttatcgacgagagcgataaagtcgccgccatgcaggtggacgttttgcccgattataccgtaaccggggagcaaatgcacgaatacggttacacttgggacggaatgttgcccataagaatccgaacggcgcgaatgctttacggcgcaggcgtggaactttataggctcggcaaaaacgataccgaagggaaagtagaaagcggcgagtttgaagataccgacagtttatacggcgtggaaaagcccgcatggcaggcgtttattgcttccgaaaggggcagagcgtatctgacagcgtggcacagcgttgcagaaagcgcgggaaaagtcataaacgaagaaatgagttacgttgacggagcgtatgtcgatccgctttcggatagattcttcgaagagcgcgaagcgatagaagcctatctggacggtaactatgctccgagcgaagaagcggagccgtttataaagccgcttctcgaaaggtatcataagcgtttcccgttggatattcttctcgaatactacggctgggataacgacaacgtgtataccgcgcttgcggaaaacatagccgatacgaaactcaacgactatgccgtggataccgtgaacgacatcaatttcgacgagtttatggatgaaaagctcaatgaaatcaattggctcgacaggctcggcagtgacgaggaggacaggtttgaagatattgtctgcgacttaaagccggagttcgaggattcgtatttcaataagagcgacgatagttacccatatgacgaatggtatgacgattttgccgaagaaaaactcaaaccgtatctcgaagaaaagttgcaaaagtcgggctataagtcgataaacgagcctgtttccgtggaatcgccgaattacaaagagcttgtagtaaacagcgtcaagaaagaatttgaagagttcaaagcaactcttatgagtaaatcggcggaagatattttccaaagcaactacgagattcacattaaaacggaactcttcgatacgctttgcggcgaatatgacgatttcggtgaagaatattacagggctttgtacgaagaagtggatcacggcggaattttgcaacaactttacgacgactttacaagctcggagaatgcaagcgtttctacgggcgaggatacaattttattcatcaaagattattgcgagcattatcattcggacgttatgaaagagtttatcggcgaagagaattttgcatatttcggaacagacgaagaaaatacggcttactactatttcaaagacagtttaggcgttgataatctgaatcgtatcaaggaacaagccgatgaatatatcattgccgcgcctgtcttgtatatgtcgcaggaatctttggaagataagaatattacttttttgaaagtggacagggatgtggacgaatccgaactgaaagtaaatgaagaaatagcgaggtttgcaatgaaagcggcgtataacaaaaaatatccgctcgaagcgacgatgataagccgaaattgcggatcggatattgaaaaaggtatctcgacgcactttgacggtgtgcacttaaataccgattttatcgcaaatttgtatgcgttatacggcgaagagcgtatgaattacgttcttgcaagcaccgtgcagatgtcggagagcgacggcagattcaatcccgataataaagcgtgggcaaagggaatttccgtcaataacagcgacgaggacaggagaaagttctacgttacatcgcacccggcgttgctcgacggatttattacggcttatagaaaatacgttaaagaattcaaagaacaattagacaaggaggacaaaacattgagcgattttacgaaagtaaccgcaaggggagataaagtcgtaagcatctcgaaagacggtaacggcagagatattgcgatcatcgaccgcacggcgagagaaaacggagattataccgtagcaatcggctaccatatcgaaacgggcgattgggaacaaggcagatacggttttgaaacgcagaaagcggcggaagagtggcgagagaaagagtattccgcagaaacgaagccgaaagccttatatacgaaaatcaaagtggcgagcgacgcgtttattaaacggtcgggcatgggcagcgtgttcagaatgccggaaaaaggcgagtatgcgggctttgcctactttatgttcaacgacaaaatcaaaccgtcaaggcagattgcggacttaaagagcgattcgcaggaactctgctacgaattgtccgtaagggataacgcggagatcgatattttcaaacgccgcggcgacgacgaagaagtcgttacgcttaccgcggaagagtttaaaaaggctgtagacggcacgacgaataaggactacgaaacgaggagaagcgacgatacgaaatggtttactacgagcatcccgcaagaagcgttcagaagggaatacgacaacagcatgctgttcgttctgccgaacaaggacgatttcggcggtatgacgtatttcattccgagcgtgttcgtcggggaagataaaaatagcaacgacggacgaatcgagatccgcttgccacaggatttcgtggtaaaagcgcaaacgcgcggcggcgagaaaaagattgaacttaccgcttacgatttttgcaaactgacggacaaaacgaccgccgaggattataaacgtctgaaaaccgaaatcgttacggaaaacgaaacggaatggaatcacgtttccgttcccgaaaaggcgagaattgcgagcttcgacgaaagcaccttattcagaatgcccgacggcgaatacggcgattatacctattatttgccgaataaatgcgtgaaagacagcgaagagaacggcactatccgcctgagtttacataacaattacaaggtgcgccttacgaacaataagggcgagaaaaagaaaacggcggaacttacggcgaaagatttttgcttggcggtaagagaaaaagacgaaagtgcatacggcgtggaatacaaacgaccgagcgaggaagcgaaaaccgcttttgccgaaagagaaaaagcgttgcgcgcagcagtccccgacgagatgaaagcgcgtaaaaattgggttgccgtaagaacgtggaagagtgcagaaaaggataaactcagcaaacgtccgatcgattgcaatacggggaattacgccgaaagcgacaatcccgaaacgtggacgactttcgataaagcgttggaatatgtccgcgaacacggcggaacaaccgttgcctatgcgcttgacggcaaagataaggtttcttgcgtggatatagaccgctgcttcgatgaaaacggcgagctgtccgaaacggcgaaagaagcgttgaaacgaagcggcgcaacttatgcggaacgctcggtcagcggtaacggcttgcatattttcggcaagacggacggtatggatttacgcactttctcaaaaggcggcgacttggaattttaccaaaaggaacagtttatagcgatgacgggagacggtgcaaaaacgaaagaccttgtaaacttcgatagctgcggaatgaagccgtatttagagagtaaatgcgaaaagcgtatcgagtggaaaggcgtatgcaagggcgagaacgggctttcttcgatgtcggataaagacgtggtggaaaaggcgagagaggcgaagaacggagataagttcaagcggctttatacgggtgaagatttgcagaataatcacagtaattcggatatgagccttatgaatattcttgcttattggtgcaacggcgataaagaacagatgcttcgtattttcgcaacgagcggactgtttcgtccgaacaaatccgccgattattacgagcatacggcaatcaaggcattgcgcgaaatacccgttaaatcgacctatacgccgactattccgaaaaacaacggcggcaacggaaagagataaagagtatagaaaaaggctacggcgagtagccgtagccaaaagaaaaactatttcaataagtcgaacaaatatccttcgtcggatttgtgctttccgtgggtgcgatggtattcagtaatagcggaagttaaaaggtctatgcggtcttgaaaatactcttcgtaaaacgcagtggaattgtcgtatttcttgcgattatatacgacgttttgtttgcagaagtcttttggctttttcttagccttaactttttcaaattcggatactttgttctccgcaatgataagcaacatttcaagttccggcttcgtgcagaatttcgcttgggatttgatggataaaagcaattccttggggattttcaatgagtccgtcattttgtccccgatccgataaatcgcaatctcgccgtgatatgcgtcaagcgcgggttttaattgcggcgaggtgagctggcgagcatgaaaggggcgcatatcgagcaaatcgtcgcgtgtgaacttaaatttgcctttatcgagcaaaagatttacgattttcagttcgttcgggccttcgcacattataaggattttcatttcaaaaactccttcttaatgttcataaggtcgtcgtagttgacggaagtcttaaatgcgtcgttataaaactgacggctctttgaaagttctacgcgaatatcgaagttctcatacatattctcggcaacgattttcttatccgcacggcaaacccagatattgtcctgacgattgaacaaatcgagcagttcacaataatgtgtggagaaatagagcgtggcattgaacttgttgacagatttatccttatacagattgatgatattttcgacgagcgttttgtggaaatggttttctatttcatcgatgataaggtcgaatccgtatttaagcgatgcgatgacggtaacgtaaagaagtaatcctttggttgtgccgctcgataaaaagtggacgagttccttattcgaaacaatctttttgcccgaggcaagagaaagttcgtaattgtgttcgtcgagcatcgtgagaccttttacgttttcgtcgaataagtgcaaaacttttgctaaaacggaaggggacaacttatacagtttcagcgcattgaacattaagcgataggtgtttgcgccttcgccgtccgaattaaaatatacggctcgtgtttctttcttctttaatacgaaaaacacgatagacgtatcttctggcaaaatgccgatattctcgactgggacaaaatcgtcgtctgagaaaatcgttttcgctttggacttatagtagaccttttcgagaagttgctgattagaaaacgtcgccttatcgtttaaggtttgcgatgacgaaatatcggtggaatacttatagattttcccttcgtgatagaaaaacagggttaagtgaattccgtcataagaataatctttatcttcgagcgaaaagttgccgagtatagaataagcgcaatcgagaagatcgaggaaagaagttttaccggaagcgttttttccgataaacgcgacggtgttatatacgaataagccgtctgcgatttcctgaagctcgtattctttatcttcggttgttttcttggatttggctgtgaagtcgagtacgcaatcgttttgaatgtttttgaagcccgaggctttgacgtaaagcaatttcatgttctttacctccgtgcttatattatacacgataaaacgaaaataaacaagtattttgtttgagattttatgaaaaatatttttgaggcgattttataaaaaaataaaacagaaatttcgacaaaatcgaacgaggatagagtgagttgagggacttttgaaatagtaaacacaaaaaatttttttcaggaggtaaaaaatgaagaaaaacaacatacgagatacttccgtcatcgtaattccgaaaggttacacgatagacgacctgatggacttcgacgacgatgggtacgagaacggcgagccggcaatggtagaggaggttaaagttgtctttgagcagtgaagaaaagaatacggcgtatgagaaacttacgccgcagagaaagcaactcgttgataaggtaatggaaaaccttgaaaaaggcaatctcttttggacgcaaggttgggtatcgtcgggcgcgccggagtctgcaattacaggtaaaaaatatcgtggaatcaataacctttttctgtcgcttatagcgatgagcgaaaactacggagataaccgttgggcaacgttcaagcagatggaagaaaagggttggactttcaagaaagacgaagaaggcaacagccttgcaaagggtaagggcgcaagcattgagtattacgaaatgcgagataaagaaacgaaaaagcgttttgacagaagcgttctcgacggaatgacggcaagtgaacagcaagagtatatggataaaaatgtgttttggctacgcaaattctaccgtgtgttcaactgttcgctgatggacggcgtacccgtaaaggagaaaccgcaaatcgacgtcaacgaccgtaacggcagagccgaagctatccttgattattgggataaaaacgaagcgaaaatcgtttacggcggcagtcaggctttctaccggacggatacggacgaagtgcatttgcccgaacgcgcggactttaagagtatgcaggaattttactcgaccgcattgcacgaaatcggacacagcacgggacacgaaagccgacttaaccgagatttatcgggcagattcggtagcgaggactatgcaatggaagaattgcgagccgagattgcttctatctttatggagcaggacttggaaatagagccgagcgagggacgattgcagaataacgcggcgtacatacagtcttggaaagaagaaattagggaaaacccgaacgcgctgtttacagcgattacagacgcggacaaaatcgcaaagtacgtttcggaaagaacgcaagaatatcggcacaccaaagacgtgcagtattacgcgattatcgaggaaacgaacgcttattcggagcaggtatataaatgctgtatctgcgacgaagaaggcagagtaaaaccgcttatcaattacggctttgccgaccgcgacgcgctcgaaaaagaaattgacaaaatcaaggaactcgacctttggaaagacaagacgtttgaagaagtgagtatcgaagaactcaaagaaaaaggcgcgacgggcaaagtggagcaagagaagtcaacggaatacatacgaccttccgaacttgttgcgacggaagttgcggcgcgagcattgcccgtcagtatggacggcaggggcaaggcgagccttacgcggatgagcgacagagaaacgcttgaacgagcagaaaaacatttcggaacggacgcaaagttttccgatctctacaacgggaaaaccgtgttggggagcgaagaaaagagcgaatatgcgttgatgttgcgccttgccttattctgcggaaacgacgaagagcagctacttcgcttattcaaatcgtcggggcaattccgcgacgaaaagccgaacgcttactatatgaaaatggcagaaaacggcttgaaattcattgcagacaaacggagtgctttcggcggagcgaacgaagcgggcggctttaccaaaggcaaagtcggtatcaattcaaaaagatgaagtatcaggcgaacagaagctacgtttcaaacgacgttgtaatgacgccgaaatctttggcaaaggctttggtcgaacattttcagccgaaaggaaaaggacttgagccatgcgcaggatgcggaaatatgcttcaatttttaccgaacgccgagtggtgcgagattgaaaaaggtcgtgattttttcgactatgacgggcgagtcgattacatatttactaacccgccgtggagtcagattcgtaaatttttagcgcactcgatggatgtagcaaacgaagtctacttccttattacaatcaatcatttatggacaaaagcgcggctgaaagacatcgaaaacgcaggtttccgaattgctgaaatatgcgttttcgatacgccgaagaattttccgcagagtggttttcaagtggggatgattcatttgaaaaaggggattcagggcgatataaaatacactcggataaattacgaaaataaataaaaaacagggagtaaaaaacaatgagaaacaaatttttcaaattcaacgagaactatgcaaatgtcatcaaacatctcgatgacaaacaggcagggcagtatgtaaaagcaatttcggattatgctttcgagggtaagacttacggcggcaaagacacggcggtgaaaactgcgttcacgcttaccaagcagatgatcgacgacgaaaaattttatcgcgaaaagggcaggctcggcgggcagaaaatcgcggaaagaaagagaatcgatgacggacagatcgaatccgatacgatgttgaaatcggttatcgaaacggtggttgcgagcgaacttttgaatagtcttctcggcggtcagggcgaaaatactgaagccgagaaagcgtgaccacgaataaaatcttgatgcattctgcctcaaaaacataagaccagctattaaaagtcaagcaaaaatacgcagaaaaaataaaaatttttta

SEQ ID NO: 1401 - DNA, 2328 bp, Unknown
  16S sequences of unknown bacteria
tctcttaggaggcgtgtgctctatccagctgagctactgagacatggctggttttatgactaagcccgaagaaactcgaacttgaatcctgtatgaagtttttctaaggtgaccgcccaaacgcaaccttagggggcgtgttatatccatttaacgaagggagcggatatggtttcccttgcgtgcccggccggactgtcggcgcggggtgcggtgtatacattactatactataaacaatattgcgccgcctgtcaagaatcccgtgcttttttgcaggcggctgcatatactgacctgtgggcgaaaaaacttccagcgctggcgccgcgagactgggccgatgccggggcggggcgtttttgtgcgccgtttttgcctgccgtgcagggcagggagaggggcgcaggcttgatttatcgctgcagggcaaaaggggggagcgagatggagcacggatttggctgtaacgactgcgaggtgggggatattgacgatctgatctttgcagaggaggaatactgcgtcagcgcgcgctgaggacgcattctgcgcggcgggaaagaaattcacgatttctctttacagcggggcgtttttattttatactaataagaaatgaagcaggaaagagaaggatagtatgatcgaatttgaagaatacaaaggaaaactgcacgatctgcacccgaagctggatgatttggggcagtctttgaatatcgaaggggcgaagaacgaacttgagcgctaccatgcgatgcaggaagcgccgggcttctgggatgacccgtcgaaatcccaggagattgtccgcaaatgccgccagctggagacaaaatgtgagcgctatgaaaaaatgtgcgccacgtgggacgacctgatgacgatctgcgagatggccctggaggagggcgacgactccatgctgggcgagctgcgcgacggctacgccaccctggaagagcacatggagcaggcccgcctggagacgcttctgactggcgagtacgacgccaacaacgccctggtctccttccaggccggcgccggcgggacggaggcgcaggactggtgccagatgctctaccggatgtacacccgctgggcggagcagcacggctatacctataaaatcatggactatctcgaaggcgaagaagccgggctgaaatccgccagcatcctggtggaggggcccaatgcctacggctttttgaagagcgaatccggcgtgcaccggctggtgcgggtctcgccttttgacgcggcggggcggcggcatacctcgttttccgccgtagaggtcatcccggagatcgacgactccatggaggtcgatatccgcccggaggatatcgagatgcaggtctaccggtcctccggcgcaggcggccagcatatcaataagacatcttcggcagtccgcctgatccataaggcgacgggcatcgtcgtctcctgccagacacagcgcgaccaattccagaaccgggaatactgtatgcggatgctgcggtcgaagctcatcgagatcaaggagcgggagcacctggagaagatttcggacatcaagggcgtgcagcagaagatcgagtggggcagccagatccgctcctacgtcttcatgccctataccctcgccaaggacacccgcacgggctatgaggtcacgaacatcaatgccgtcatggacggtaatatcgacggcttcatcaacgcctatctgacctgtgccgcgacgggcaattgggctacaaagtaaaaattgcaaaaattccccggcgggggcggcttttttaaaaataggccttgattcccgcgggaaaacatgctaaaatagcagtggtttttgagcgaatacgaaagatttttgccaggctatgccgcagggcggtcggcattttggaggaatacgatggatactttgaaaacggtcttactcatcatccaggccctgtcggcagtcgcgctgacactggtcgtgacgctgcagtccggcaaatctgctggtctgtccggcgcgatcgcgggcgcaggcgagtcctttatgagccgcggcaacgccaaaacgatggacgctaagctctccagagcgacgaagtggatcgcaatcgtctttatcgtcctgacgctggcgattgacctgctgctcctgaaataagaacggcaaacgccgggcggcgcgcaatgtttgtttgcgccgcccggcgtttttgcgccctgcgggcgccggatcggatcgaaaaacccgccgccgggggcctggaatgtgaagtgccccctgtcaagtagacagtgaaaaaataaaaaatgttttgttggaga

SEQ ID NO: 1402 - DNA, 4385 bp, Unknown
  16S sequences of unknown bacteria
gggtgatgttgtcggttgtggcattgttgtcgaatgtaatgaccacaacgccttcgtccatcgcttcttccagaacgtcattgaggccgtcggcggtaatgcaggagacgatgatggcatcgcagccctgggttaccagagaacggatatcgtcaatctgctgtgcctgatcgttgtcggccatcagcatcacgtagtcggagatgacgccttcagccttgagctcgtctgctctgtgaatgaattcggcctccatttgctggcgccaggagtttccgatggagaagttggaaaaaccgatcttgtagccgccggacgcttcgccgccgtctccgccgctgctttcctccgagctgctgcctccgcaggcaaccagagacattgccattacaagtgcaagaatgagtgtaaatacttttttcataccgtacctccacaagtcacgttttctgaattcgacagatcatagaagcgatttctctttcaatctaacatagatcttgcgtgaaataaattactataatagctaaaatttacgtataataatttatgttctacacaatgctgttacgtaaattttcctgtttctggaattcagatttgggtattttgtgctaaaacggcatacagaaagagggcgcgttttaggaaaaatgtgatgtaatcgtttttacggcctgcgatcgtgaccggtgaaacagaaggcagaacgagaaagataaaatcgcggcggaagatgggaatttggaatggccagtactccgcacacaaaaaatttcacaagcattccgttttggcgggagttgcctgcagaactgcttatacctccggctgggcggacggcatgccttgtccaacatcagggaggagccggagggggttcttggggctgacaggggcgcctgctttccaggctgtgcgggagcgtgctagggaggcggggcatgttcggggaagatccgctataaaaatggaacacgggagtccggcagagacggatctgccggactcccgtgtgacgtttcgggggtgtccttattcagcggcatcttccacaaattccagattggcaaaaatcttctgcattcgcgtatccggatagtggttgtccatccacacttcaaaagcgctgtcggcaggttcccctgcacgccgctcggtccaccgcaggaccgtggccgcagtcatgaaacagttgaagatcataaataccagcagcacccaagtgaggggtttgccgattttgttggggatttttaaaatccacttggcggcccggggatagaattccttaatccagaggatgcccagcacgccccagaacagagaatacaccaaacagatccggccgttgaggttaaagggcatggcgctgtaatcccaggaggtagagccgaatacggtttcctgaaaccaggaacagaggtactcgatgatgctgccaataaaaaatccgccgataaaagaaaaaatgggattgcggttgcggtatcggtacagcgcggcggacagtgcccaggcacccagaccgtagaccggattcaaaggaccgtagatcagacctacccggctttcatagtgcccgcgggtgatgaagcaccagagcacttccacaacaacgcctgcaaaacagccgataaagaaaatccagaacaatttgtaaaaggtgatcccctgggcgaagtgccgggtcttcttttcttcaaagtcaatttgcgcattggtgggggcgggctgaatcaaatgtgcccggctcgaccttttatcatagaggcgggattcccgcagctgtgtttcaatttcgtccgccagttccgcacagcttcggtgcagtttttgatgcagctctccggcccgcttgagactttccgcttcacttttgagcgtagcgcccaggccgctttcttcaaagaccccttcttgtgtgtctgatgccaaccgctccagctgttcggaaacaattcgtttggagtcccgttccaacacggtcaaatgtgtttccatggcagaaagccgttcttccagtttcacctgtgggcaacctccttgtcgattgttatgatgaggatccggcaccggcagcttaaaatcatggaagaaagagcaggcgggccgtgcgcagatatgcaaccgttataccatagatcacaaaggagcgcaacctgacgaaaaagggctttcgctgtgctgcataaaggcggcaaaggacggggctttcggaggggctggagaccgatggctttgctgatatgcaaatgcctgcaaatgtggggcgggagtatccggcacggtgtaaaaatttgataagaaacgggaaagcaatcttgacaaggttctgcattttttttaatatcaatttacaagccattttgactcacggtctgcccgggccgcgagtcgtttttttgtgatgaaatggcatgattggaagagaatgagagaaagagggagttgcacaaatgggaatggagtctttgttcaacctgctgggaggactggcgttgttcctctacggcatgcagatgatgagcagcggcctggaaaacgccgccggcaaccggatgcagagaatcttggaacggctgactgccaaccgcttcctgggagtagctgtgggtgccggcatcacggcggtgattcaatcttcttctgcaacgaccgtcatggtagtggggtttgtaaactccggcatgatgacactgcagcaggcggtatggatcatcatgggcgccaatattggcaccaccattaccggacagctcatcgcgctggacgtcggcgccatggcgccggtatttgccttcctgggcgtggtgatgatcgtctttttgaagcggcccattttccatcactacgggcagatcattgccggtttgggtgtgctcttcctgggcatggagatgatgagcggagccatggttcccctgcgggagtccgaggcgtttatcggactgatgacgcgcttcagcaatcccgctctgggaattttggcgggcatgatcttcacggccattatccagtcttcctctgcctcagtgggtattctgcaggctctggccggcagcggcctcatcggcctttccagcgcggtatatgtgctgttcggtcagaacatcggcacttgcattaccgcggtgctggcttccatcggtaccagccgcaacgccaagcggactaccatcattcatttgatgttcaatctgatcggtacggtgatctttacctgtgtgtgcatgaccacgccgctgaccgatctggttgcgggactgacgcccgacaatgcgccggcccagattgccaatatgcataccttgttcaacatcaccaccacgttgctgctgctgcccttcggcaccaaactggcccagctggccaccgtgattctgcccgagaagccctcggaagagccgcagccccgcaagctgctgtttatcaagcccgtggatgtgctctccgacgcccagatgggcaattccgccattaccatcaacggtattcagcaggaactggaccgcatggccggtatggtgcgtcaaaatgtggatgccagttttctggctgtgctggagggacgctcggcgcgtctgcctgaggttgaggaaaccgaggagtatatcgattacctgaacaaggaaatttccaagtatatctcccgggtcattgcctatgaacagaatgcgcaggactctgccctcatcagctcctatctgaagattaccaacgatcttgagcgcatcggcgatcatgccatcaatatctgtgagtacacccagaccatggaacgggaacagctgatgttctccgaaagtgctcaggaagagatccgccagatgcggcagacggccctgcgggccatggatgttctcaacggattcgagacggtttccgtggagcagctgacgaaggcctccgcagtggagcagcaaattgacgatatgaccgtgaatttccgcaagcatcagctggagcggctgcatcagggaacctgctccggcgagacctgtatcctgtattcggaaatgctgacggatttcgagcgcatcggcgatcatatgctcaatatttcccgggctctggcggctccccagctgagctgatgcgtgcagcgccgctgtgctgcgggcctgcatgccaaatacagggaattccataatttggattttcctgaaagcggccaaccaaaaatttcaaaaaaacaattgacacgcgcccgatcttatgctatattttgcgggaatttgactggagtttatctggccaagaatactgggaccactcctgcgggagtcaaggccatacggacagccgggtccactgccgattggcgggttaccgccttattgattgagttaaaagctcaaattttataagttggttactttata

SEQ ID NO: 1403 - DNA, 11655 bp, Unknown
  16S sequences of unknown bacteria
tcttgtcgctttcaaaatgcaatgaagacagcgaggtcgaggcgaattcgctgcgctgcagcctgcaggacagaaactgcaggcttttatgcgtgcagttggaaaagccggattccttgagggagcacgcgtgaaagcggcagcgggaaaactgactgccgccaaagccggcatagtccatggcgcactcttcgaaagagacgtcgcgcagcgcgctttggatcaggtcgacgccgatcatgcggcagtgcaggaactggcagcggaagaagcgggatccgctgaggtcagcgctggaaaagtcgcagccttcgaaaatgcagtccagaaactcgcttttgccttgcgctgcggagaagtcacagcggacaaactggcaggaatcggcgtgcaggggctctgcgggcgcctgcagggcgtgaaatgagcggccatagagcaggccgtgttcattcagcgcgccggcaaagctgtcggcctgcgcatgggtgcggcatcgcggcgcctgcgggagatcatcttgttttttcatatcgttcccctttccgtttgtcttcattatataaagcggccgccggaaagaaaaggaattttgctttaggcagcgcgcagaatcatgtataatgggtcttagagtctgaggagagatgaacatggaactgatggaaacggtggcacgccggctgcaagtgcagcgtgcccaggtgcaggcagtgatgacgctgctggaggaaggcagcacggtgcccttcatcgcccgctatcgcaaagagcggacaaaggggctggatgaagaggccatccgccagatccaggagatggttcatgcgcagcagaagctggaacagcgcaaggcggatgtgctgaggctcatcgatcagcagggaaagctggatgaggagatcaaagcggctgtcgaagcgtgcgaaaagctctcgcaggtggaagacctgtaccgcccttatcagcagaagcgcaagacccgcgccggcgtggcgatcgcccggggactgcagccgctggccgagcatatcttgtcgcatggggatgcgtcagatctgatgacgcaggctcagcgttatgtcggggacgaggtcagcgacgcgcaggcggccgtgcaaggggcgcaggacatcatcgcggaaatggtcagcgatgatgcgaaggtgcgcggcctcatccgcaccgagatggagcgcttcggcaccatcgtcaccaaggaaaagaaggatcacggggatgaacggcatgtctatgcgatgtattatgcgtacagcgaaaaggtgaatcgcatacagccgcaccgcatcatggccatcgagcgggccgagcgggaaaaggtgatcacggtcagcatcgagatcgatgaagcgcggatcgctgagcgagcgctgcgcatgtatgccaaagggcatgggtcgatgcgcgcgatcatttcggacgcggtgaaagacggactgacgcggctggctttcccggcggtggaacgcgaggtcaggcgcacgctgtatgcgcatgcgcaggaatccagcatcgatgtcttttccatgaacgtggagcggctgctctctcagccgccgctgcgggacaaatggatccttgggtttgaccctgccttccgcaccggctgcaagctggcggtcgtcgatccgaccgggcgcatgtgcgaggtgagcgtgatctatccgcatccgcccaaggcaaaggtgaaggaagcgcaggaggagctgtgccgcctggtgcggaagtatgggatcgatgtcatcgccatcggcaatggcacggcgtccagggagagcgaggcatttgtcgctgaggtcatccggacccatcagctgcatacgtcctttaccctggtgagcgaggccggtcccagcgtctattctgccagtccgctggccaaggaggaattcccgcatctgcaggtggagcagcgttcggccgtatcgatcgccaggcgcatcatcgacccgctggctgagctgatcaagatcgatccgcagtcgctcggggtagggcagtatcagcatgacctcagccagacacggctgaaggaacggctcgattttgccgtcagcaaagtggtcaaccgcgtcggggtggacatcaatacagcgtcggcacagctgcttcggcatgtctcgggcctcaatgccgtcagcgcccgcaatatcgtcgcttaccgggaggagcacggttcgatccgctctcgccgggagatcaagaaggtgccgcgtatcggagagcgctcttatgaacaggccgcgggctttctgcgtgtgcgcgatggagaggaacgcatggatgcgacggccatccatccggaaagctatgccctggcccgccaggtgctgatacagatgggtctggcagaaacggacatgggcacggcagctgcccgggaaaaggcggcgcaggccgatgcgcggcagctgagcgaagcgctgggcagcgacccttatacgatccaggatatcctggatgccatcgccgccccggccagagattaccgcgaccgctatccgcaggcattgctcaagagcggcgtgctggagctcagcgatctgcatgagggcgaagagctgcaagggacggtgcgcaatgtcgtcgatttcggcgcatttgtcgacatcggcctgcatgaagacggcctggtgcacatctccaagatgagcaagaagcggatccggcatccgggcgaactggtgtctgtgggcgacatcgtcaccgtctgggtgtgccatatcgatgaggagaggggaaaagtgcagctgtcactgctgccgccccgggaggaaagaacatgaacatcaccgtatcacagccgttccccttcgaaatcgaaggcttagggacgatcatggattatgtggaggatcgtttcctcttcatcgtgaaggatgagttctggagcgaggaagaaaaagcgatgctcatgcaagagccgatggaagtcgctctctattaccgttatgacgtcgccgtgttcctggtgagcggcggcgatatcgacaccagcgatttttatttcaatgtgcaggagtgcgaatggaaggagcagctgctttcctcaacgacactgcaggccagcctcatcctgctcgatcaggacaatatcgtgtgctgccgcagggatgtaactttcccgaaggcagactcacagcagatcatccagctgctgcgggaacaaaatgaggtgcattatcacgaaggggaattcgacgtcaacgcacaggggctcatgagcgcgctgcagccctttgagatgcaggaaaaagcgacggtcagcatgaagttttgaataaggcggggaatgacctcgcctttgttgtgtttttgtccaaattaaagtatactgtattcaatctgaaatgaatggaggtacggtgatgaacgctgtggtaagtgtaatcggaaaggaccgtgtcggtatcctggcacgggtgagcacggaatgtgccaacgccaacgccaatgtgctggaggtgacacagacgctgctgcgcgatacgttcgcgatgacgatgctggtggatatcgatcacatcagcatggagctgagcgaatttgttacgcatatggagcaagtcggaaaggaaatgggtctggtgatccatgtgatgcatgaggatatctttaattccatgcaccggatccaggggtaaggcgcatgatcagttcaaaggatgtgctggaaaccatcaagatgatcgatgaggagtatctcgacgtccgcacgatcaccatgggaatctcgctgcttgactgcgcagatgcggacatcgaccgttcctgtgagaagatatatcgcaagatcaccacgatggccaaggatctggtcaaggtaggcaatgacatcggcagggaatatggcattcccatcatcaataagcggatctcggtcacgccgatcgccatgctcgtcggcgtgagcggcggcgatccgctcaagtatgcgctgacgctggagaagtgcgcgcaacagaccggcgtggatttcatcggcggcttcagcgcccttgtgcagaagggcttttccgcaggagacaaggcgctgatcgaagccatcccgcaggccatggcgcagaccgatcacatctgcgcttcggtcaatgtgggcagcacgaaggccggcatcaacatggacgcggtgcgcatgatgggcgatgtggtgaagaaggcgagcgagctgaccgtggagcgcaactgcatcggttcggcgaagatcgtcgtcttctgcaatgcgcctgaggataacccgttcatggcgggcgccttccatggcgtaggtgaggcagactgcgtgatcaacgtcggcgtcagcggcccgggcgtggtgcgcgcggcgctggaaaaggcgccgaaggatctgccgatgaatgaactggccgatctcatcaagcgcacggcgttcaagatcacccgcatgggccagctggtgggcagcgtggcgagcgagcgtctgcaggtgcctttcggcatcgtcgatctgtcgctggcgcctacgcctgcggtaggcgattcggtcgcttacatcctcgaagagatgggcctggaaacctgcggcgcttatggaacgaccgcctgcctggccatgctcaatgatgcggtgaagaagggcggcgtcatggccagctcctcggtcggcggactgagcggcgccttcatcccggtctctgaggatgccggcatgatcgccgctgcggaaaaaggcgtgctgacgctggaaaagctggaagcgatgacggcggtatgcagtgtcgggctcgatatggtcgtggtcccgggcgatgtgagcgcagagctcatctccggcatgatcgcggatgaggcagccatcggcatggtcaactccaagacgacggcggtccgtgtcatcccggccatcggccgcaaggaaggcgatcagctgaactttggcggactgctgggctatggcccggtcatgaagatgaatccggcagacaacagtgtcatgatccatcgcgggggaaggatccctgcgccgctgcagagcttgaaaaactgatctcatggacagtcggagcatatccgctgtccttttttatgcggacggatgatcgtttgcgcgccgcaaaggccgttgaacaggcggcgatgtgtgcgtgcagggagagcttttgcatattgcgtgtcattctgctttatttttacggggattatgctaaaatgatgtggtcaaaaaaggatgtgaaactatgctggaaatcagaaatctctccttcgaggtcgaaggaaagaagatcctcaacgatatcagcctgcagtttaccgaaaatgccttcacggtgatcaccggaccaaacggcggcggaaagtcaacgctggcgaagctcatcatgggcatcgaaaagcctacggcaggcgccatccttctggatggaaaggacatcacggcgtgcagcgtggatgagcgtgcccggctgggcatcggctacgcatttcagcagccgccccgctttaaggggatgagcgtgcgccgtctgctcgagctggcgcatggccgcccgctggaggaagaaaactgcatctcttatctgagcgatgtgggactgtgctcccgcgattatctcgaccgcgatgtggatgcctcattgtccggtggagaagtgaagcgcatcgagatcgctacgctgcttgcgcgcgaactgaaggtgagcatcttcgatgaaccggaagccggcatcgatctgtggagcttctcccgtctggtggacacgttccgcgccctgcatgagaagaagaaacaggatatcctgctcatctcgcatcaggagcgcatcatgcagctggcagatgagatgatcgtcatcgagaatggcgcgcggcagccgggaagagatcctgccgacgctgctcatggattttgagccatgcggcatcaacagaaaggcaggtgcatgaacatgctgaatcagacggaaaaaggactgctgcaggaaattgcgggcatcagcggcttcatgccgggatctgccttcaacctgcgggccaacggcatgggcgtggaacgtcattccaccccgaatatccagatccgccagaaggccgacaagcccggtatcgacatcatcgtcgcgccgggaacgatcggggaacaggtgcatatcccggtcatcctgacggacagcggcattcacgatctggtctataatgatttttttatcggggaaggcgcagatgtggagatcatcgccggctgcggcatccacaatgacggctgcgacccctcgcagcacgatggcatccacacgttccatatcggtcgcaatgcccgcgtggtctataccgaaaagcactatggcgagggcaatggcgaaggggagcgtatcctcaatccgacgaccaatatctatatggaagagggaagctttgcccagatggacatgagccagatccgcggcgtggactccactgagcgcaagacatatgccaagctggggccgaaggccaagctggtgatcaacgagaagctgatgacgcatggcagacagcatgcgctctctgatgtgagcgtcgatctggatggggaagacagcgtgctgcagatcgtatcgcgttctgtcggcaaggatgactccgtgcaggtgttccatccgatcgcccgcggcaacagcaaatgccgtgcgcatgtgcagtgcgattcgatcctgatgggcaatgcgaagatctcctcgatccctgagatcgcggcgaatcatgtggatgcgcaggtcatccatgaggcggccatcggcaagatcaacagcgatcagctgatcaagctgcagacattcggcttgagcgaggaagaagcggagcaagtcatcgtagacggattcttgaaataacgggctgtgtgcgcacagccttttttgcgagggggatggacatgaagcatcggcggatgatcgtttttatctacctgctgctcagtgttgccgcatatgtattgtttgcccactggatgtgggacggcggcacattgggcatgctcgatccggctgaggcaggcatgctgctgcttctctattatctgcttacggcaagcatcctgactgtcatcttgctgtgggcgagacggctgagccgatcgccaaaggaagatgtgcggatcattgcggaactggaagcagagatcgaacatgagcgtcagtatctgcggcaagtgcgtacgcagaaagacaaggagacactgccggcatatgtccatatccatcagacctattgcgcggacccttatctgaatgcactgctcatcctcaaacaggcgcaggccgaagaaaaaggggtgaagctggagatcagcggcggactgagacaaggcacgcgcatctcctgtgatgatctcatctccttgttttccaacttgctggacaatgctctgcgtgctgcggcagatgccgaaaccaaagtcatcagcatgcagatccatcaaagcggcaatatgctttcgctgtccattgccaatcattttcgtgcgcagcacggtgagcgagactggcgtcatggctttggcagcctcatcgtacaggagatcgcggaacgctatgatggctgggtgaggcgggaagtgcaggataggcgctatatcgtgcaagtgaccctgctgctggaaggagagcatgatgatgattgagacgatcgcggccgacacgatcttgtcggtattcagcgggatctattaccacattctctgcgtagagcatggtcggcaggggaaaaagctggcggcatgcgtgctgagcttcattgcgctcaatatgatccttgatcttgttctttacggtcaagatgtttttttcgcattgatgagcttcgtgctcactgtgctgtttgtcttatgctggatcccatggctgtacaatgtccccagaggcagggccttgttgtatgcgatgatccagtatggtctcgtggtcttgatcttgctgcccttatcgatggtctttccttgtctttttctttctgatctgatcctccctggatacttggtcaaaggcgtgatctatgtgatcgcctgtccgatctgtctgcgtttcgtcaagcgcagacgcgaatctgggatcttccttctgccggtgctcctgccgctgagcaatgcaatgttattgactgcttttgtctatccgggaaagatcgaggtgctgtggtatatgctgttctcgctgatctatttcgtggtggcggcattcaatgggtatgcgctgtatcgttttggcgggaagatgcagcgcgggcatggcgaagggcggcggaaaacgcttgtcgatgagtatgagcggctgcggctggtatcgcatgatgtacgcaatcatcagctgacgatgcagatcttgaggagcaaaggagagcatcagctcgcgcaagaatatgcagagaagatcgatcagaagatcatggaggctttgaaataattttcagaaaatagaatgaaaatcgtgcgtacttttgggcgaatggtattgcaattatcgcagagttgtgtataatagtcgtataaagacggtgaacagaaggagtaatcctgaaaaagctgcttcagagagtccgcggatggtgcgagcggatgggcgagtaagggtgaacgtgtctgggagtcgatcgggcgaagcgaagcccgtatccgtgagcctgacgttaaaagggaagagtgctgctgcatttgtttgcagtggaagcagggtggtaccgcgaacgatttcgtcctttgcattggcagagggcgttttttttgtagatgcagctctgtcagaaccgtcagcggatcatcgatccgtcatgaatttgcgagagcgcaacagtgaaaagggaggaaatgaagatgaaactgaagaagatgatgatgagcggcttatgtgcatgcctgatgctcggcacgctggctggctgcggaagcgcgcagggagacgatgcgcagagtgaagatccgacggtgatcctggtcggcgtatctccagattatccgccgtatgagtcactggacagcgacggcaacatcgtcggttttgatgccgacatgctggtcgaattggaaaagtatatgaatgaggacggcggaaattatgatctgcagttccgccagatggaatttaacgcgattctttctcagctgccggccaagcagctggacatggccatctccggcttcacgtacgatgaggaacgtaaggttgcctggtctgatccgtacacggcgacggcacaggtagcagtcatgccgaaagatacggagatcacgagcgtggatgatctgaagggcaagacgatcgcggcgcagacggcgtctaccggtgaaaaggcggccaatgagatcgaagatgcgaacgtgcagtcgatctcggatgtcaaggtcatcttcagcggcctggcttccggacagtatgacgcagcagtggtcgaccttgccgtggcgaagaactatgtggatagcggcgactatgtgatgctggatgagacgctgatggatgagaaaaactatatcatcacctatgaaggcaatgatgagctgctggagaaggtcaacgcggcgctggagaagttcatggcatccgatcgttatgtggagctgtgcgaccagtatggcgtaaaggcgctggaagaatagttcaaggaaaaatcagaaaggaaagggacagcaatgtttagtgcaatgggtgaagtcctcacttccgagaacctgatctttctgttaaaaggggcaggactttcacttgcgatggcagtgctgtcccttttgatcggtctggttctggggacgctgggggcatcggcgaaaatatccaaaaatcggatcctgcgctgtatcggcaatgtctacgtggagatcatccgcggcacgccgatgctgctgcagatcctcatcttgtttgcggtggtgccgctgatctacatggagatcaccggggaacgcctggtcatgaatgtgtttttgatcggtgtcatcgccatgggcatcaacagcggcgcttatgtgaccgaactgatccgcagcggcatcaacggtgtggacaaaggtcagtgggaagcgtgcgagacgctcggcctcacgcgcgggcagacgatgaagctggtcatcctgccgcaggcgttcaaacgcatcgtaccgccgctggtctctgagtttgtcactttgatcaaggattcatcgctcgtgtccaccatcggtgtggtggagctgctgaagagcgcgcaggtgctgggcggaaattatgcggacctgatgagcccgctgatcattgccggcgtgatgtatctcatcatgacgctgagcattgcctacctggcgcgtcatctggaaaggaggctggcagaaagtgattaaggtagatcatatcaccaaacagttcaagcagctgaaggcggtcgatgatgtttccctggaaatcgaaaagggagagatcgtctgtctgatcggtccttcaggcagcggcaagagcacggtgctgcgctgcatccatggactggagaagccggaaaagggagaggtctacatcgatgggcagctcctcgatcccagcaagccggactatatgaccttgcgccgccgcatgggctttgtgttccagcattttcatctgttcccgaacatgagcgtgatggataatctgaccctggcgcagatccaggtgatgaagaagacgaaggaagaagcggagaagactgctgcagatttgttgaagcgtgtcggtctgctggataagcgtgatgaatatccaagcaagctctccggcggacagaagcagcgtgtagcgatcgcccgcgcgctgtgcatcaatccggaagtgatgctgtttgacgaaccgaccagcgccctcgacccggaaatggtcgtggaagtgctggatgtcatgaaggaattggcgcatcagggcatgacgatggtcatcgtgacccatgagatgggctttgccaaggaagtggctactcggatggtctttttggaagatgggaagatcgtggaggaaggaaacacgaaggagttctttgaacatccaaagagcgcgcgtgcgcaggacttcctcagcaaggtgatgcactgatgaagatcgatcagtttgccgtcgagggctggatgacagaccacgaaaactgctgtgaatacaatatggcggacagctgctgcgcggcgctcaccgtgcgctcgctgttggatcttgcgggcgatgaggaaaagctgaaggatatcgtgctggattatggcccgatcaccggctccctcgcgctgcgccggcagatcgcgtcgctttatgaatatgacgatcccgacagcgtgacgctggcgcatggctgtatcaatgccaatgagctggtgctgatgaccttgctggaggcgggcgatcatgtggtgacgctcgttccgacttatcagcagctctattcgtttccggagtcgatcggctgtacggtcacgaaggtcgcgctgaatgaggaggatggctggcagccggatctgcaggcaatctgcgaagccgtgacgccgcgcacccggctcatctgcctcaactttcccaataatcccacgggaacttgtccggaccgcacttttctgaaggcgctgtgcgcgttctgcgcgcccagagggatctggatcctgtgtgacgaggtgtatcaggggctcgttccggaagcggaatgcagcgtctctgatctgta

SEQ ID NO: 1404 - DNA, 2553 bp, Unknown
  16S sequences of unknown bacteria
ccaatagttgccaccgcccaaatttttcaagcgttcatcgtccatcgtgaagcccttgatcatatattctttcaggcgctccgtggcccaccggcgaaactgggtggcaatcaaggattttaccctgtaccccaaagaaatgatcatgtccagattatagaaaggcagctctctggttacttgccggttgccctccattcgaacctgtcggaatttccgacaggttgaaacctcatccagttcgccttcttcatagatgtggccgatatgctccacaatgttgcttctggacgtgtggaacaattccgccatctgctgctgcgtcagccaaacagtctcgtctacaaaccggcactctacttttgtgagcccatcttcagcctgataaattacaatctcgccctggctctggtccggtctattcttgtcttccgccatttgttcacgctcctatccgattacattttctatgtttcaagagagcgaagaaaatggccgtcgccctcttgtttggactcttatatcacgtctattatatcatgcagcaattttgcctgcaactgcttccggcttgaaaacagattcttttttatctgctgccgcgctgtcctgatcctcaagcggaaccgccggagcgggcaggttctcgacatccaactccgaagcgtacttctcaatcaggttggccagcaggtctgcaaaaccgctccattcatcgatcataggcagtttccctttcttttttgtgaggctgtttgtaaaaatccaatacttctgccggtatctgctccaaaatcgccacagcactgtcatagtcgcgccgcagcttgaggtcttcaatctgctttagggtgctgaccttctgcgccgatgcaagagattcttccagttcagcatttttcgttttcagctttttattttcggatgctgttttcgtaaaagccacgccatatttccgcagcagcgtgtccatcttctccacgctgggaagataggtatccaaaattttgcaaatttcctccgcccggcttttggcgttgaaaggattgattccggcgagcagatcctccagtttgtccttctgtttggtcagccgggtcatctccttgaacacgcggggtgggatatggtcgcgcccggtctggctggcactctcaccgcgctccaaatctggaaacctcttgaccatgtgtttccaaaactcatcctgccaccaggtcagcttctttttattgcccataatatctttggcgctaagcctgccatcctcggtcagcgggacaaaacaaaggtgcatatggggcgttttctcgtccatatgcaccacggcagatataattgtctctttggattgatgctgttccagaaagtgcagggcttcctcgaaaaacacccgaatctccgcccgtttcttccccttgaagaactccgggctggcagtgaacagcgtctcgatcatacggatactatctttccgggtacggcatccggcggcggcaatctgccgttccgattccgtccggtacttgccgagcggtttgacaagatggaagttgtacttacttcggctggtgtccacatcgggattgctggcgtacttttcctttgtgcgctcgttatgggcctcgatattgccgatttcaggccccttatattttgcaaatcgcataatcgcgtactgtgctttttccatgctcaatccctccgtttctgccagacaatgtcatatcccaacacatcagccaactccacggcctcacgataccgcagtgattcccgctgcaatttcccggaaagattggatatgctgtcgctccaaccatattcatcgtgcagctggtcaacgacttcctgcatggtgtaaccggcgcggatgatctgcgccttgatttcgtttcggatacttgatttcatggtaatcctccattttcgcaagtgacgccctttgccacttgacaactaaaacatgattttctgttgcgtcataaaaagaaccggctacgctggggagcgcaccggctttggtcaatggtgaaatttgtgcaaatgctgttttgcgatagaaatgtttccccgcgcaccattggtcaacggcggaatattcggctttgcggaaatgcggggtttttcactgttctggctgtattggcgcgaaacggtgcaacctgtactctgttccgtgagccgctgtccagcgaactgtatgcggagcatagagaaacatttcgccgttttgcgattgcttcaaaatatgcctataaaattactgcgtttcctgtccgttttggttattccccaaatgggcacgaccactttaagcctgtgaagcaccagcgcaatatatgaggtaacagggtgaatcgctgcgtacatacgtaccggcgaccagagcgaaaatcaatctcgccagtcttccggtacgtacgtacactgtgaagcgtccgtaaactcgtttatatgcggtcttgccactgcctcaatgcccataaagccccacacccggcgtcctgccgaattggtaatcgtgttgcagtgttccagattgtacttgcc

SEQ ID NO: 1405 - DNA, 2828 bp, Unknown
  16S sequences of unknown bacteria
aagagaaagaatatcccccgcgttttgctcccaggaaacgtcataatcttcgaaaaatgtcgtcgctcccctgtcgagctggcggcactcataatctttaagcagcgaaagagcacattcggggtccgttttcgaaagctcctttaaggtatagaaaagcagatatgacgaaagtcccttcaccccgccgtcctttatgacctttgcggcctcattgtcggaaagaaggccggagagagccgcaacggccgccgtctgcttttgattttggtgctcgggaggaagttttgcgagagcctcggccttttcgccgcaaagagccgacagctccttatcaccgagagcggaacacagcttttgcccctttgaaagggcgattttaagcagcgcccgcaccccgcttttttcggaaatcggcttttggtgggtgggccaatcgagaaaatagctttcaaggcagtcgccgccgtcctcccccaccttgccgcacagctgcttcaaaagggaccttgcgtattcaccctcgcttttgaggaaatcaatatcccctgtgtagaaataccagtcccacacgattatgagccaccaaagggagtaggatgccataccgttcatgtaaaggggcagcggcgcctgatcccttgcgaaatcgaggctttttgctattatatcaagggggccgaaaaccgagcggacggtgagcatttcggggtgcatatccccaatccacacaagacggtcgcgctttatgccgtcccacaccatgtgctgaagattgaggtggcaggtgtaggcggcggtgtcgtatattttgttgattttttcgtcgctgcagcgaaaggagcccttatattcaaggtctcggtatatgaaaacggcaagggcggatttaagggaaatgcccgcgtcctgctcgcaaagttcgattttaacaaaccgaaaaccggtctgaccccattcctggtcgctgtaggacggaagggggatttcaaaatcccgcaccgaatggtcgttgcaggcgcccttttgaccgacggcggacattgcctcggacagcgattcgccgaaggtcagccgcacgcggggataggcggttttttccgaaacaaaattaagaagtcttatacctccgtgaatttcccgcccgaaatccagcaccaaaaaggcgttttctcccccgtcgttcgaaagggtacaaaggtcgttttcattaaggccgatttggaggggttttgcccttaaaagggcgtcggtatttttcacgtttccgcccgttttgacgattttttcgggcagcagaaattttctcaccctttcgtcggaggcgacaaagggcatattttccataatactcataaaaacctcatctaacaaaaaccgccgcggagagaaagactgaccacggcggttttgtgttttaacttaaattatttaagctcggagaaatacttaatggtacggaccatctggctggtgtaggagttctcgttatcataccaagaaacaacctgaacctgggtgttgccgtcctccatgggagcaaccatggtctgggtggcatcgaagatggagccgtaggtggagcctacgatgtcgctggaaacgatttcatcggtgttgtagccgaaggactcggtggaagcggccttcatggcgtcgttgatctgctccttggttacctgacccttaacaacggcaacgagaatggtggtcgagccggtgggggtgggaacgcgctgagcagaaccgatgagcttaccgttgagctcggggataacaaggccgatagccttggcggcaccggtggagttgggaacgatgttcacggcgcctgcgcgggaacggcggagatcgcctttgcgctggggaccgtcgaggatcatctgatcgccggtgtaggcatggatggtgctcatgataccgctcatgatgggagcgagatcgttaagagcctttgccatgggagcgaggcagttggtggtgcaggaagcggccgaaataacggtgtcctctgccttaaggatcttatggttaacattgtaaacaacggtgggaagatcgttgcctgcgggggcggaaataacaaccttgcgtgcgcccgccttgatatgagccgaagccttttccttggaggtgtagaaaccggtgcactcgagaaccacgtctacgccaagctcgccccaagggagattttcggccttgggctctgcataaatggtgatctccttaccgtcaacggtgatggagccgcctgcagcgccttcgttttctttgtagcttacggtgtcggcaagggcatatttaccttgcgaagaatcgtatttgagaaggtgagccagcattttggggctggtgagatcgttgatggcaacaacctcataaccttctgcaccgaacatctgacggaaagccagacggccgatacgaccgaaaccgttaatagcaacttttaccattttaaattcctcctaaaatgttttacacttgtattttaataccgaagcgcgaaaaatgcaacccctttgttaaaatattaacggttaatttgcattttctacggaactgacggtatttttaacatcaaagatacttttttataacctctaccaccttatttcccacttccctgacgccgtatttattaagatgcacgcggtcgtcggaaatatactcgaaaacgtggggtttcaaaaaggaataaaggtcgtttatttcaacatctttgtccgaaagccaatcggtcatcgccctgttgtattccgcaatgtcctcctggcggcggtcgcatccgactaaaagcggaaatataaaaatggattatagctgtc

SEQ ID NO: 1406 - DNA, 3375 bp, Unknown
  16S sequences of unknown bacteria
ctcctttcggagggaacgcagagaggttcaggcgccacccctctgcgagttccggctttctgccgcggtatggtcagctgaagaatatcttttgcatttcgcacccgtaacgcctcggtgcagtagtggagttttgattctggctaaccgccgtgggaatacgttgataaacttcacttgacagcggtattttcagcttaaatttctgcaccatcaccaatcttgttaggtttaaacttccagttcagttcgatatctgctgccgcactgaattgttcctacgttcgctgacggaagcaaaacgaaattggatgttcgctatatttcaacgcacaaactcccgcccatccgcggcagcctaatccaattcacgtatgatttggtattcaaccctccgcgcgaaagcaaaagcaatgatttagaagcatttaccgcgtctaactctcccgcgcgaacatgctaatgccactactaaggcttatgctaaaccgcgcgactgagctattcaaatgtgcggagacaaaagctcatcatatcagccaaactccaccggaagccggtactcgcagagggatggcgcctgaatccctctgtgcgccccacgcgtagtggcagccttcgaccgcagtcgatataataaaattcaaaagacggcagtcttttcttcttattcttcggaagactcaacctcatcagaagtttcttcaacagaatcttctaaatcagaagtttcgtccacagaaccttcgtcagcggagatctcttcaggctctttctccataagagcaaagttcacaatccggctttcttcggaaagcttcattactataacgcctgcggcagctcgtccgtataccggaattccatccaccggtgttcttatcatcgtgccgtcgttcgttatcatcagtacgtcctcgtcgtcgcggcagaccgctaccgagcatatctcgcccgtcttgtccgttatcttctggattatcatgccctggattccgcgtcccttcgcttcaaattcgtcaggcgataccctctttccgtatcctccgtccgctatcacgaggagcttgttctctgccgcccagctttcgtcacgctctattatgcacgcgcccgcaacatgatctccctctcgcaggcttattccgcgcacgcctctcgcgcttctgcccattaccgaaaccttgtcttcattgaatctcgcggcaagtccctgtgcggttgcgatgagtatgtcgctctctccgtgcgtgcgggagacgaaaatgagcttgtctccgtcgtcgagtgagagagcaatcttgccgcccttcctctgcatacggaattcttcaagcttcgttctcttgataacaccgccgcgcgtaaccataacaagcgtgtcgttctccgtcgctacgatatcctcttcgtccgcgatgccgtcgacaacgtgcgattcctcgtagggtacggagactatcgctgttatcctttcctcgggagttatgtcgatgaggtttatgatgttagtgccttttgcggttcttccggcttcgggaatgcggtatgccttgagcgtatgcacctttcccgagtccgtgaacagcataaggtaggagtgcgagtcggaggtaacgaccctctcaacgtagtcctcttcctttgtcgccatgccgatgattccgcgtccgcctcttctctgtgcggagtaggtgtcggtgggctgacgcttgatatatccctcgtgggtgagagttatgacgacgttctcgcgctctatgagatcctcgagcattatctcgttctcgacctcttcaatggcggtgcgtctctcgtccgagaagcgggattttatctcgagcatttcgttcttgattatctcgtcgatgcggctctcgtgcgaaagtatgtctctaagctcacgtatgcttgcgtaaagctcctttaagcggttctcgaccttctgccgctccagaccggaaagcctgcccagcgtcatctgaacgattgcctgagcctgctcgtccgaaagtgcgaagcgttccttcagtctctctcttgccgtgggtgtgtcgggagaggaacggattatcgagataacctcgtcgatattgtctatcgcaatcttgtagccctcgttgatgtgcgcttccttgagagctttgtcgaggtcaaacttggttctgttctttatgacgttctgctgatgctcgatgtacaccccgagaagctgacgcagaccgagcaccttcggctcaccccctacaagggagagcatgataacggagcaggtgtcctgaagctgtgtgtacttatagaactggtttaaaataacctgaccgttcgcgtccttgcggtactccacgaccactttaagaccgtcacgtccgctttcgtcacggatttcggtaacgccctcgatacgcttctcatggacgaggttcgccatggttttgataagctccgccttctgcaccatgtagggtatctcggtgatgattatgcggtggtgctcctcctcaacataagcctttgagcgtacctgtatgcgacctctgccggtggagtaagcctcgtagatgcccgctgtgccgtagatagtgccgccggtggggaagtcgggtcccttgatgaactgcataagctcgctgacgcccgcgtcgggatgctccatgaggtagatagtgccgtctatgacttcgccgaggttatgcggtgggatatttgtagccatgccgactgctataccgaccgctccgttgacaagcaggttagggaagcgcgagggcaataccgtaggttcgcggcgggtattatcgaagttggggtcccactttacgacgtccttttcgatgtcgcgcatcatctcgccggaaagacgggaaagtctcgcctcggtataacggtaagcggcaggaccgtctccgtcgatattaccgaagttgccgtgaccctctacaagcgtatagcggtaagagaacggctgagccatacggacgagagatccatagacagcggtatctccgtggggatggtatcgaccgagcacgttaccgacggtagtagcggacttacggaagggtttatcgtatgtgaggttatcttcatacatagcgtagaggatacgtctctgaccgggcttcataccgtcgcgtgcgtccgggagagcgcgagagacgataacggacatggagtattcgatgaaggatttagtaacctcatgctccatattgataggcacgatcttctgatccgggaactctatatttgagtaatccttttctttctttgccatagtttgaccttttcaattcgcaaaatttttttagtataagtttatttttcgcccaagaaagagcgaagcaattttcttttccttagactactatattc

SEQ ID NO: 1407 - DNA, 5629 bp, Unknown
  16S sequences of unknown bacteria
aaaaacggcagcagcttccataatatatgaaagaacacgccaagcaccacaagtacgatcagtatcaccaggataatccggatccagtcggacacgcccagtctgcggacatggatctgagtgccaaagtcatcctcaaaaggatccgccccgacatcctggcggtaactgcccgacggctcatcctcggtatatacggtattttgataatacggatctgccgccccctctttttgctgatctacctgcaggatcgtccgcgcgatcaggcgcggatcgccaagctccgagagcacctgttcttcactctccccggatgctacctgctgctcaatataattccagtaatagttaatattatctgcgacctcactttccgacaactcacgtgccagcgcgcggcgcaatgtatccagaaattcctgttttgacatgccgtctccttttcctgcacctttagctctgtcccggctcccctgacagcctgtcgacagctcttttctgcttaccaaatgatgttgaagtcaaaaggtattttgcttctgacccttgtatcatcaatataacgtagtatgcgcagatattcaagcactttccccggatttttttctgccggccttttcctgcacgttttttcagcaaagcggtctttcgcaatccgctttcgccacccgcaattttctgtgacaaaaaaagggccgccctcccggacagcccataaaaacctgtatattttttagtttgccttcttcttgctcatgatggtctgaacaccttcaactgcaagcacaattgccaggatgacaagcagagtaccaagacctgcacggatccagcaccacagaacctcaccggttcctgcagttgcattcttgaagtttgtcagaatcgtctgacagagggaaacgatggtaacaataagcataaatgccatcgggaacaggaacatcttgttgttcttgcccatcgtgccaagccatgcagcgacagccagaagtccgagtgctgccagcagctggtttgccgctccgaacagcgcccagatctttgcatatccggtcataccaagcgcaatgccaagtactactgtgataagtgttgccacatacggattggtcagaacccgcttaaagccagtcgcatccttccaggtctgtcccggctcaagccagaactcctggaacatgtaacgtgccagacgggtcgcggtatccagagaggtcaggcagaatgcagataccgcaaggatcagcattgcataaatgacattctctgcgcctgcaaggaacgggatcgtcgcacacatgcgggagataccggttgcaaatacagcggtcggtgtggtaattccattcggaacatattcagaccagatatatccgactgcgcacagagagatcagagccagcgcacactcaatgagcattccgccgtaagcgatcggctgtgcatcactctctttatcgagctgctttgccgtcgtaccggaaccaaccagtgaatggaagccggaaatcgcgccgcaggcaatcgtaacaaacagcgccgggaacatacttccaagagaaacaccggagccgtattctgccttgtctatgaagccggtaaatgccggaatcgacagagtcggatgtgctcctactataccaacaaccgcaataatcatcataccataaagcaggaaagagcttaaataatcacgcggctgaagcagaatccaaaccggggtaacagatgcaaccgcaatgtagatgcctacgattaccatccaggtacttccgtttaagtaaatcggatgccagttgtagccaactaccatacagacaacaattgctgccacaccgacaacggtagatacaaccagagatgcatttcttctgtataccatcataccgaaaatgattgcaataatgatgaacagaatggaaatcatagcagtcgatgcatttgccgcactcgccacctcatccagtgcaccgctctccgtataagttgccttgaacgtatttgccacgatcgaagcaaaagctgcgactaccagaatcagggtcagataagagaacgtcaggaacagcttctttgcacggctgccgatgctctctgcgataacctcaccgatcgactgtcctttattgcggacagatgcaaacaacgcaccgaaatcgtgaactgctccaaagaagataccaccgatcagtacccagagcataaccggcacccagccaaatacagccgcctgaatcggcccgttgatcggacctgcgcctgcgatggaggaaaaatggtgacccatcagcaccggggcctttgccggtacatagtcatttccgtcttccagttcatgtgcaggtgtggttcttttcggatcaactccccactgctttgccagccatccgccgtagaagatgtagccaagcacaagaatcacaatacccacaagtaaaattactactgcattcatgtgttttcgccctcctttttctctttacatgaacttagtatatttttcataaatttcgcgttgccgcgacccatccggtttgtcatgacccggctttccttacagatcacggcggccgtatgaacattcatccagccataccacgaaaaatgaaaacttttgtaaatcctgcaccgcttcagcgctttttccgcttccggtgtacaggtatcacagataaagaccggtgtaatgtagctgtacatatgccccggcttcggatcaatcagcttcatgccatcttcgtatgcataattcttacatatctcgtagagctcctttgtcagctccggcacggaaaatatgtaaacatattcattgctgtccgcatcccagagctttgcttttttcacaagcacatacttctccgaatgcacataaaaccggcaatgcgcagccagcggaagtccatccttcccatcctcatactgctcaatatcaaaataggcctgatagcctttaagcatccgggtcaacacctgagctctactgactgcctctttcatgccatctctccttattgtaacgcattcattcacaatcaatccctgtctgctgtctctgttgctttaccacgctacattgttcccggcaaaaaaaacgacatccataaggatgtcgacaaggacagtattgttcttctcttaaacctcattgtctaaaaatcacataaactttcttaacaaattctaaacgacatgggaatgattgtatcactgtttatctctgatttcaatctttttttacatttttttacatttttttgcataaaaatctttttttatttttttgaaaaaaagtgttgacaaatgcagaatggatagttataataacgaagcatggttcgttggtcaagcggttaagacgccgccctctcacggcggaaacacgagttcgattctcgtacggactgtcaaagcctgttgcttatcgcagcaggctttttttctgtcctttttcttctgctttacagaaaagttattttctattatactttctatttagaaatataccaaagacttaaggcattttcgaagccctcagcggaaaatgcataaaaggagcattgttttatgaacacgattgatcttcatgtacattccacctgctcggatgggacgctgaccccggctgagctcgtgacactggcatcttcgattggcctttccgcctttgcgctgacagatcatgacagcacggatggcattgcagaagcactccgttcttctgccgcgctcccggaagcaaaacgtcccgaagtcattccgggcattgaattttcgaccgaatacctcggaagcgatattcacattgtcggactggatatgcagtatcaggctccggaatttcaggcaacggtcgcatcattccgggatgaccgtctcatccgcaataaaaaaatgattgcccgtatggctgccgaccatatcgatatttcttacgaagagatggcaaaggcatacggcgaacaggtatggacccgtgcacattttgctggatatctggtcgcacacggatatgtcgcttccagaaaggaagcgtttgcatctctaatcggtgaaggctgtcgctattacgtaccacgcagccggatccgtcccgaagaggcagtcgatctgatccgtcgttttgacggcattccgattcttgcacatccgctgctctatcattacgatgatgccggactgcgaacactgctcgctctgctaaaggagcatggactgcttggcatcgaggtctactattctacccatacaccacagcaggaagcatatgtcgccgcgctcgccgcagagctcggtctgcttccatctggcggttctgattttcacggcgataataagccggatatctcgcttggcagcggtatggggaatctcgcgatttcccatgagcttctggatgcattgaagaaagcacgaaaccgcatgtaaaagcccgaacatacccaaaacaaaaggaggagactatgacattccgagaacgatttatgaatcacgagacagaatttgatgaaatttttgacttaacggacaaatggaatttcagcgacgagacatgcacgcttcgcgagtttctcggtctgaatgccgaggaggaagacatctggatcagcgagagcgacgaagctttagaagcttttatggagcaggagcgcagggaggcatccaaaaaatgaacaaaaaagtattttttaccgatctggacggaactttattaaatgatcagaaagaaatcacaccgggcaatcaggcagcaatcgatgaagcacttcaccgtgggcacaaggttgtcatcacgacaggacgccctctcgccagcgcacggattcaggccgaacgacttggcctgacaaaggaaggctgctatatcgtgacctataatggcggacagatctatgatccgtatcacaagaagactctatatggaaaacctatttcccgcaagctcatcacaccgatctttgcggaggctcaccggcgtggtctgtatatccacacctactccccgaccgaaatcttcacagaaacggattgcccggaattacatcactatgcagccaacacactgatgtcctacgagatcgtcgaaaatgtcagcgaagcattgccggaggagccgtacaagcttctggcgattcatgagaccgacattgcccatctggaagcgtttcgcgactacataaagacggcttatgccggaattcttgacagctttttttccagcgctacctatcttgagatcgttccgaccggtatctccaagggattcgccgtcaagtggatgtgcgactttctccagattccgattgaaaattcggtctcggccggcgatgcccagaacgatatcgccatgctcgaagctgctcatatcggcgccgtcatgtgtaacgcttttccgggtattgcagagcacggaaactacgttacaaccgctgataacaatcatgacggagtcgcagagatcattcataaatttatcctggatgactgagtaaaaccgcccgtcgggaagtaacagtaatactgcaactcccgacgggcggttttactcagttatttattttatgatgttacctacgaattgctccgctgcgaagcagctcccgcaattctgcaaacattcgaa

SEQ ID NO: 1408 - DNA, 32759 bp, Unknown
  16S sequences of unknown bacteria
gcgctgatgattgttattactatcccataagcaagccagaagcttactgtttctattgctgtcattgtgtttcacctcctgctaacatctgtcttaatatccttactgctacttccggcaagtcatcaatcgttatctcgtaaccgtcaaggctatctctgacttctccatttttcataatgtgtttaactgttacttccctaccgttaatcatttttttcattaaaatcacctctgtataaggtatgcttttgtacttgtctccttttacatattgaaactctctttaatctctgcataagtattcttgctttaagaagcaccgctccccttatccctgtatactgtaccgttacagggatattttttaggggagtaatgtttttctttttttcgcactcctcataaagacaaaccctcacttttgtaaataaattaaaagtcagtgtcatgtggtatttcttatcactgagcgtaaacttaactgttactgtcttaattttcccatcactccttaactaacctctttgttgctatcctcttgttttgtccctaaaatcctactatacttacgttataggtaccgccacactttatactgagaaaggagaatactcatgactttagagctttatcgcattttaatttgtattacacgccatcaagcattgtcagctaagagcataagcgctcttatggggaagagcactgattacttcatgaagctgtttgattatttagaagaaagaggctatattgaagaagtcagccttagtcctattgttgatgctacaattaatgaaaatgcggaatattccgtaacgcagtctggcaaaattgccatttctgattttaagtacgttttggaaactcgttttatatcatgggcggctttggcagtatccatagcggcaataattatttcgatatgtcattaaagctttatatgccacacaagagaattaagtatagcgataatacttaagactattgataacaaagccagcacgtcataaaatgtaaagccgtacttctcgagccagtttaaaaacttatttatatattttctcactcgttcatctcctactcgtttatctcctgtcgggttcttcgtttactcctaactaaccttatccgatataagctcgtccaccgttacaccaaggaagtcagcgacttttttaagtgaaacaactgacggcgagtgcttactccatttgctaaaactgctccttgcaaagcctagctctttttcaacttgatttactgaaatccccttgtctgtacataattttttaatattttcgtacagcattattgcacctcctaacgtaatatatttcgcaaaagtattgacaaagtgtttgtattgttataatattaaattgcgtaaaatattccgacaacacaaggcaatcgtttcataactttgcgttatttatttcgttcacatctattattatacgtaaaatatttcgattgtcaatatgtattgcggtgtttttttcgcaaatttataaagatggtgattttatgatttacgaaaatattaaagcgttatgcaaagccaagggcattactatttcaaaagcagaggctgacatgggatatgcaaggagtactctttgcaaaattgacaaaaacacaccaagtatagacaaactccaaaaaatagctgactattttgaggtatctattgaatatttaaaaaatggtgaaaactctaaatcagcaacaagcaatattaaagttgtagatgaaaataacaatgtagttgtattagatgatgaagcacttgaactaatagacagcctgcgttctaatcctgaaatgcgtatgttgttttctgttagcaagaaagctaccaaagaggatattattaaagcagtaaaaattattgaagcactgaaagatgaaaacgagagtgattaatgatggaatattgtgtcagatatattaatctgccagtaagcattagagggattaccgttcttaataacgggttctataacatatatatcaacgccaagttatcatacgaagagcagcaacgtgctatacaccatgagttgacacatattaggaggaatgatttttattccgaggcagcaatagaggaaattgaggatatttgagaaaaaggaggttttgttggggtaacttttaaacatattcatatataaacaaaagaaaaggggtaatattatgaaaaaagcaagaggctttaaagctgtgttcttactatttgcaacgataatggtttttacttcgtgcggtcctaaaatagacgatcctgaaactgttgtaaacaaagccttaaccgcaataaagactttggattatgaaacggcttctacatacttcaattcagatgactttcaggttgacgaaacaacttccgaagaccaaggtttaaatgatgaaacaatttcaaaattattcgaatccattcaatacgaaatagtttcttcagaggtaagcgatactactgcaacagttaatgcaaccattaaagctataaatatgtcagcggttatatcggattatgtaagtgaagctatgctttatattttctctgatcttacagaagaagagttaaacacaaagtataacgaaatactgttgaattccatgaataaaaacgctgaaaatttgattgaaaagaatgtagatatatctttaactaaaagcgataccggttggcttatagatgtcgatgacagtcttcttgacgcaataacaggtggtacatattcattaactcaaagttttaatatagaataataaaaatcccctgtgcaaccaacacaggggaaagaaaagttatgcggtatatgaatactacgaacaatttaagtatatcatatgaccgcttatttttctatatattttagaataaaggaggtctttatatgccccaaaaaacactagtattcggatatgttcgtgtttcgactgaaaatcagcttgaaaactacagtatcgaggaacagatttcacgacttaaatcatattgcgccgcaaaggatatgatacttcttaaaatatatacagacggcggctattcgggcggaaacactgacagacctgcattgaaacagatgttagctgatattaaaacggtaagggttgacgccgtactggtatacaagcttgacaggctttccagaagtcagaaagatactcttacactgattgaggatgaatttctcgcccatgatgttgattttatttccataaacgaaaacttcgacacatctacacctttcggaaaagccatgatcggaatgttgtctgtattcgctcaacttgaaaaagaccagataacagaacgatttacaatgggacgtataggaagatgtaaggcaggatattttcatggcggcggcaatgccccatacggttacacttatgaaaacggagaccttgttattaactataccgaagccgagaacgtcaaaaaagtgtattccatgtttctttccggaaaaagcattaacgccatttacagggaaatggagaatataaacggtaaaggttggagtgcaagaaaggtatctaacatactatccaatgtcatttacataggcaaggttaagtttgctaaaaacgaatatgatggaaatcacgaacctattattgctgctgatacgtttgaagcagcgcaaaaacttcttaactctcccgatagagaaaacgcaaaaacatcggcacagaaaacgcctttccgtgcaaactatctactgagcagtcttgtttattgcgctcgctgtggtgccagatacagtgctaatcacgggtattataaatgctattccaggtcaaaaagcagtaagcagttcattacagatcctaactgcaagaatgacaactggaaaatcgaagaacttgataagctcgtcttatcagaaatatacaacctgattaaaaaaccgcagcttatcaacaagcttgcctctaaagcaaaacaaaataatacttcgtatgacagaaaaaaacttgaaaaacgcctcagagaacttgaaagacaaatggagaacttattagacttataccaactcggtaatatccctatggaattgttatccacaagaattcacaatattgatgtggaaaaggggataattcagaaacaacttgaaacttcaacaggtaacagttcaacctccgttgaagcattcaaggcttctcttgcttcattttcagaattatttgatatatctcctatagaaactcaaaggcttcttgtaagcagtttaatacaagctgtcaacgtggacggtcagcaagtgtctgttgtttggaggatttgattttacaaaattatacgcactatgcacatagtaagcgcctgtttaccgcaggctttacattttttaaaacacttatcaagattaaatgcaaccctcggcagatatcccgaatcttccaatatagtaaacagcggaaagaatattgccataggaggcagcataacggaaactacccacgctaaaaccttatacattccgaaaacaagcatatttacaatagtttcgggcaagtgtacggcaagcagtattgcctgcaaatcgtcctccaacccgaaaagaaattcactgagcattttcgatggaaagttagcccctgttatcgtaatccaaaatataatagccaacataatcgccattacgggaaatccggtaaacctgccggtaaatattctatccagttttcggtcatgggcgttggcgtcttttgttttaacctttaccgtttttcccgccaactcggcagcagccgaaaccaaggcgcccgctatcaaatcctctgacttgcttttatctatgccgcattgggacaaatactttacacctgcgctgtcggtattataactttctattgctcttaaagctttacccctgttttcaccgattaattctatagctttattaatatactccccatagtctgtatggaatttaacctttgtttctccgtttaaaacatcgtccagtttatcgagaaattcttcaactcctataccgtccctagcgctcataggtataaccggaacgccaagttcagcgcttaacgcttcgcaatttatatctattcctttgcttttcgcctcgtccatgaggttcacacatacgataagcctatccgtaacctcgcttatctgaagcacaaggttcagattcctttccaggcatgacgctccgcatacaacggcaactgcatcgggaacatctgaacatataaattcaccggcaacttcttcctcagcggaatgagcagaaagtgaataacttcccggcacatcgacaaatatatatccatgtccgttgtgttctctgtatccctgtgcatttgttacggtttttcccggccagttgccggtatgctgtttcattcccgttacggcattaaacaaagtactttttccgacgtttggatttcctgccaaagcaataactttgtcgtcatagttgcgtttttttatcacaaggccgctgtctttcgcatataatcctgtggaagtattagtcagtcccattttccgcacctttcgacacatatatttttgacgcctcttctttgcgtattgcgataaccgctccgcatatatcataggcaacaggatctccgagaggacttttaagaagacatttgacggcgtttcccggcacaagaccgatatcttgcagacgtcttcttatgcttcctgccgattcaagccttactacatcggcttcatcgccttcgctcagatcattaaggcggcagatcgtcatttttatcattcctttcaaacggtctttttgtaatgcagtatatgaaagttctccgtactttgttactctgtgtttacatacaatatatttaaaattataataataattgaaggagatggtaatatgccgaatattcttgactacgtcgattggcgcggtgatataacctttgataaatcaccttttaacgatatagacaatctgatttttacacagctgtcgtatataaactttgacggtattgtgccctcttttaacgaaaacggctccattaaattatcatatgcggcagatcggttttttcatgtccacggcgaaaaaaatatcgatatgggaatccttattcccgacagcattatcactcttttaaaaaaggtttcatgcgcgcctcgttttaaagaccttgcgctgacaaaatatataaacaaaataaactatgaaaatccccagcagttttccgccgttacaacgctactcggagacggaagctttcatattgcttttaggggaacagacgatacaatagtcgggtggaaagaagattttaacatgggttttatgtctgccgttccttcacagcttgacgcagtaaaatatgttaattccgttgccgatgaaattgacggaaaaataattataggcggtcattcaaagggaggaaatcttgccgtatactcggcggtatattgcagcgataatatcaaaaaccgtattataacggtatataataacgacggccccggattttccaaaaaaatattggattcagacgaatatgcggaagtatcggataaaataaaaaccattataccagaatcgtccgtagtaggtatacttctggagcatgaagaaaaatttataatagtaaaaagtacgcagaaaggattattgcagcatgacgcctttagctgggagcttatcggaacacaatttctcgcagccgaagaacgtacccagtacagtgaaatttccgacgctgcgctgaaaacatggctaagtcagatggatacggaagaacggacgcttttcgtagatactttatttgatatactgcaaagcacggacgcaaaaacccttatggatcttaatgcaaacaaactggaaaccgccatgtctcttatgaaaacaataaaaaatcttgacgatgacaaaaaagccggaatgaataaaatattgggagaactttttaaagataacgtaatggctgccgtaaacacggtttttaagaccaaggaaaagcaagaaaaaaagaagaaaaacggcaaatatattgttcttaaaagaaaaaaacaggcggattaaatccgcctgtcttttatcttataaccttttccgcaagtaatttaagcgctattgcctttgaagaaagttccagaacgccgttttcctcgtctatttcatttatcataccgccaatgtcttcatttacggcctttttaaaactccttacaaagcaattatatgtttttattataccctgctcatcatcaaaatcaggcagcatgtttttaatcatcgaaatgctgtaaatttgtttcataacgcatactataaccaaataggctatatgcgttttggaatattttttctttatgggggcaggcacaactttcatcttcacataattatttatcatgttttttgttatttgttcattctccccgttttcgtcttttatcattctcaaatatccgttcagcaatattattacctgatccatatatagatccaatgccggcaaatcctcccataaaggtattccggctttttctatatcatcgcttacttccgaaagtttcagcgccatattgtcatgcatattatcatctcccgttcagtttagtataacatgtgctttttacatctgcaatacatagtattaaatatcagtttattgggtattttatattgacttatggttacaatagctatatagtattaattactatgtgatatggtttcattgtttagattctactttttaagttttgtccaaaacatattgatataattttataaggagtgtttttcatgacagtaatcgcacttaaatcaagagcgttgccaaactatacaaaatccgaagaaatagtaaacagcgcttctcacgctgtcggagttgttttcggcatattcgtgcttataacatgtttaataaattcatcgaacattgcaggcagaacaggaagcatagtatatgggctgtctatgatacttttatacgcaacatcaagcatataccacggtatcaatccgaaaaatctgcttgcaaagcaagtattcagaataatggatcactgtacaataaacgttttgatagccggaacatatacccctgtaatacttaatgtcatatatccctctaacccaaccgaggcgatattgatacttatcggaatatgggcggcggccatattcggtattgtcttaacggctgtcgatcttcaaaaatacgccaaactgtccatggcttgttatatagtaatgggttggttcgcaatttttcttatgaagcctcttttttatgctatcggaattaacggcatactgcttcttgtcggcggcggaatcagctataccgttggcgccgtactgtatgtaataggaaagaaaaaaagatatatacattctgtattccatgtgtttgtgcttttgggaacacttctgcattatatttgcataataaattatgtaatatcttgatatagcttaaaagccgatgacgaccctatttgtgttcaatcatcggctttcttttaattaaattccgctcgctccgtagttagacaatacccttgccgaaggatcattaacatcgcagcctttccactcgcggttcggcatccaaaaatcctttaccatttcagcctgtccctcataatacttttcgaaaatctctctatacagcaacgcttcctttgtaaaaggtatagcgaaattatattttttgcatttttcgtcaaactgttcatctgtataaatcgattccgcatattctttaaggtcgtcgaccatagaatgtcccactgcatcggaaaatgcagctttttccctgtataatatattatcgggaagaatattgccttcaaaagcatgtctcagcaaatatttacctttgttatatttgttcatctttatttccggatcaatgctcattacatatctgacaaaatccaaatctccgaaaggaacccttgcctcaagcgagtttacagatatacatctgtcggcgcgaagaacatcgtacatataaagttcgtcaacacgtttctttgcttccttttggaattcctctgcattgggcgcaaagtccgtatacttgtatccaaaaagttcgtctgaaatttcacctgtaagcaaaacgcggatatcagtattttcatggatatatttacacacaagaaacatacctatgcttgcccttatcgtagtaatatcgtatgtacccgttgcggatataaccgtttccaaagcgttaataacgtcatcttttgatattattacctccgtatgctcgcttccgatataatcggcaacctctcttgcatattttaaatctattgcgtctttatccattcctatggcaaaagtttttatcggtttatctatcattccggcggaaacggcgcacacaagagaactgtccaatcctccgctgagcaaaaaaccgagaggtgcgtctgaatccaatctttttttaattcccatctctaacttgctgcggatttttttacaagccgtttcaatatcgtctccgctatattgtttaacagaagttatatcgctgtattttataaactctccgtccatataataaaaacccggcggaaacggaaataccttttcaacaagtccgacaaggttttttgcctcactggcaaacactatggaagaatcttcactaagatagccgtaaaataaaggtcttattcctataggatcccttgccgcaatatacttatctttttctccgtcatagattatcattgcaaattccgcgtccagcattttaaacatatctactccgtattccctatacatgggcagtattatttcacagtcagagccgcttttaaatttatacttttcactcagtttatcttttaaagaacgaaaacaatagatttctccattgcaaacaacagcgtcttttcccattgtaaaaggctgcataccgctttctgtaagttccattatcgcaagacgatgaaagcataagtatcctgtctccgtttccattatacgagacatatccggtcctctggaaacagtcctgtcaaaaaactccttaaaatcatcacactttaatttttttgttgtaagtcccattatcgagcacataaaaaacacctccgaattattacgcagcttcatactaaaagaactttaggacgaatagctgctgatccgcggtgccacctaatttactgtcaaaacagtctcttcggattctgacaaatcctaacggcttaacgcgccgtatacgcctcgcctacttataaaaatgttcggctaagtgctccgaagtgttattcatccggtatcttgcacggagtttccactattctccgctcactgtggcagaccctccggattacttctcttcatcttggcatttaaaaatttaagttggagtatttattgttgctgtgtatgatacaccactgttttcatcatgtcaatacattttttaaataaaataaatattaatatttataatacttctgttgcaaaatatttttacataaagcatatatttctcttatttcatacagcgtaaatttttaatttttatatattatctgcatattgacataagtttgttattaatatataattagttcattattaagcaaaggcgcttatcaaaggataggtgtactttgctcttttttatgtaaaaaaactgtcatttgtaaaagagttataaaattaaggagtgtttaatttgcctaaattcacaaaggaagacattatcaaaattgttgaagacgaaaatataaagtttatcagacttcagtttacagacattttcggacagcttaaaaacgttgctattatgccgtctcagcttgaaaaggctcttaacaaccagataatgcttgacggaagctctatagaaggttttgtgcgcatagaagagtccgatcagtatctttaccccgatctcgatacttttacaatacttccctggagacctcagcacggaagagttgcaagacttatatgcgatatacataatcccgacggtactccttttgtcggcgaccccagaggcgcgcttaaaaaagttcttaaaagagcggctgacatgggttattctttcaacgcaggtcccgagttggaattctttcttttccagacagacgatgaaggaaaacctacgacaaaaacaaatgacgaagccggctattttgacttaggccctcttgaccacggcgaaagcacaagacgcgagatatgccttacgcttgaaacaatgggctttgaaatagaagcttcccaccatgaggttgccgcaggtcagcacgaaatagactttaaatatgcggacgcccttacagcggcagacaatattatgacatttaaaatggcagttaaaacaatagcgcagaagaacggcctccatgccacatttatgcccaaacccatttacggagcatgcggttcgggtatgcatacaaatatgtctctgttcaaagacggtaaaaatatcttctttgatcccgacggagaaagaaagctttcaaaggaagcatacagctttatagcaggtctccttcttcatgttaaaggaatgacggcaataacaaatccccttgtaaactcttataagagacttgttcccggatatgaagcgccttgctatctcgcatggtcggcaggaaacagaagcgcccttataagaataccttccgcaagaggtaacagcacaagagtagagcttcgttgtcccgaccccgcatgcaacccttacctttcactggctgtatgccttgcggcaggtcttgacggtatagaaaaaggtcttactcctcccgatgaaataacagacaacattttcgatatgcctaaaaaggaaagagaagcaagaggcatagaaagtctccccggttctctttttgaagccgttgccgaatttaagaaagacgacgtagttaaagaagctctcggcgagcatatcgtaaatcagtatcttgccggaaaagaaaaagaatgggaagattacattacaagcgtaagcagctgggaagttgaaaaatatatcgtagcattctgataatctgaacattaaacttaaagaacctcaaaagagcctattcatactttatataagtctcggtcgtcttttgaggttcatttttatatatttttaagattaaaacggtcgtaaatgtgctaaaatatatttattaaaaattttattttttaattaataattattgtcatttaatagttattatgttataattaaaacataataaagaatattaaggaggaagtaaaatgaaaagattaaaagacgtttaccgttgtgtagtctgtggcggagatatgcaggttgtaaaatataatatggctgaaagaaaagtttattatcactgcgatcgctgtggatatgaggaaactcttacatttgaggaagccggcattgatgatgaagagtatgcttacttcatccttagagaagacggaacaatgacatgggagtgtccggaaagcggagtaaagacagaaaacgttgacgaaaatacggacttttctccatattataatatcgaacatctttgccccgaatgttgtgaagattgattatattttgcccaaataatctgaatttttcataatcataaagcctgaccttaaaaggtcaggctttattttcagttttatttataatataaccgttaatttcttcttcagatatataaaacttatcgtgattgaatactccttttaaagtcataatacacggctgttccgaattaccgctatatatttccgcatactcgccgttctcaatatttttattaatcagatggtacagctgcaatcggttcaccccgtcgcatattattctatgcaggtttaccgccacataattaactccgtatttttccttatcggcttccacgcactcctttgttataacaggcaaaaaactaccgctcagcttgtagaccgcacgtccgttatccgtatccgaatatgtcagacctatagaaaaatatctttcccaattaagatattcttcctcccagtcggcatagtacggaaccatattcatcttctgtacgtcctgaaatgacaattcttcgttaattttagcagatttaatataatcctccgatattttcctcggaaatgttatatatatgctcataaaaacacctctgacaatttttacggtttatgtatgatatataaatcgtttttctctgtggaaatataaaactttctgttgtcaaaaatttcttttaaacttaactcatatgtgtgttcgggcggtccccatatatcgggtgcgtcccagtccagccactgtgaatatatttccacactttctccgctttcaatattatcgtttatgaggtgatataattggtgtctgctaatgcaatcaattgtaatatgctcaagaacgacatctatggctttttccccaaatgagcgtttataatactctgccttgccatgtgtaaaagcatccgacatgtcttctacaagcgcatatgcaaaaaaattccttacaaacggaaatctctcgctaccacctcttttaaataaagtaagcgataaatactcattttcggaaattatactttcattccatttggcaaaccaaggtgtaaatcccatattatcagctttttcatagcttatattatgaatataacaattgcttaaatatcgtgggtcatcgacttcacgaggaaagaaaatataagtaaaaatgctcataataaatctcctttaaaaattagtaaaattaaatgcctcaccgttatgatactatttaataaaaacgcttacagcgtttatcaccatatccctgagtcataaaaaatatgagcttttccaatgtcgccatcaatggtagcatgataatgttctaaattatatggtttattaccatgttttgtttgtatgtgcgcaaaatgaaaatatggaactccatcttctgaagcagctgtagccagtgctgaagcagcattggcagaagtgcagaaaacatcgtacttaaattttacgttttttttcacccttgcaattgcctctgcctctgatattggttctccaacaattattcctccgagtccgtcagtatcagtagtaacacattcaaagtactcatattctcttctatttctccagtaatctgccgatgtaattacagcttctcttgcattacttttagcttcagatctatttgtggtaacactattaccaacctctgttactacagaagaaaccttagaatcaagttttttaactcccgaactagaaaggtcagctgtacatgcagcatatgtaacacctaaaattatgcatacaacaataactgccggaagagctgagcctatgccagctaagcttcccaaagaagcagccagttccgcaaaagaagaagcagtaattgcaaatcctgccgcattaagataatctattgccatattagccgaaatgtatagttcaacatcataagacggatattctccgtgctcttgataataatcataatattgttgcgccaactcatcaagttccgcaagactggcttgaaattcttcatcttcaagtagaatttcatagctttcgtcaactatataatcgtcagatatctggctcgcaaacgcaggaactgcagcttgaaacatcattattatggaaagtaacagcccaataaaacctttaaattttttaatcattgtttcatacctttcctttacagtaacggcaaggcattatgtgctgaatccactgatgtataatataaatatatcaaatagttttcctaatgtaaacggcacatttgcagattatacataatagaatttgttatatattcacaatccgttaatgcaaacatataaaatttttgtctaaaagcaatttgttttttctatttactttagcgtgctaatatggtaatataataaagacttaatcaataatacgatttaggaggagatttatatgaagaaatttttagcggcagccgttgctgctgttatggcattaggagttatgacaggatgttcaagcacatccgaagaacctgcggaaaataacgaagctaccgaagaaggagccgaagcaggtgaaagaactacttttacagtaggctttgacgcagaataccctccctacggctatatggctgaggacggaagctatgtcggctttgaccttgaccttgctcaggaagtatgcgacagaaacggttgggaacttgtaaaacagcccgttgactggaactcaaaggatatggagcttaactccggttcaatcgactgtatatggaacggttttacaatgacaggccgtgaagataaatatactttcagcgacccttatgtagataacagtatcgtatttgtcgtacttgccgactccgacattcagacaaaagatgaccttgccggaaaagtagtagttacacaggctgactcatctgcccttgctgctctcacatctgaagaagataatgaagaaaaccttgctcttgcagcttcattcgcttcattggaacaggttgcggactataacacagcgtttatggaacttgaaagcggagttgttgacgctatagcagttgacatcggtgttgctcagtatcagcttacatcaaggggcgatacgttcagaaaactcgatgagccactttcaacagaacagtacgctatcggttttaaactcggtaataccgaactcagagacaaggttcaggctactctcgatgaaatggttgccgacggaacatttgatgaaatagttgcaaattatacagactacaaccttgaccagatggtttgccttggcaaataaaactcttaattcagctcaaaatacggcgaagatttttcttcgccgctttgtgcgtttataacatactttattttatttttgaaaggaatgatttttatgtccttttccgctatgcttactcagcttacagcaggtttcgggcagaccgttctcatattttttctgacgcttctgttttcgctgcctctcggtcttcttgtaatgttttgcagaacgtccaaatttaaacctttaaataccgtagcaaggatttttatatctattttaagaggcactcctttaatgcttcagcttatagtcgtatttttcggaccgttttatctgtttaaaataaagctttcaagctcttacagatttatagcgcttattctcggtttctcaataaactattccgcctattttgcggaaatataccgttcgggaatacagtccatacctgtcggtcaatacgaggcggctaacgtgctcggttacagcaagagccagacttttatacatataatattccctcagatggtcaaaagggtaattccgtcggttacaaacgaagtaataactcttgtaaaagacacgtctcttgcatttgcaatatcctatgcggaaatgtttacaatcgcaaagcagattgccgccgctcagacaaatatcatgcctcttttcatagccggtgtattctactttgtatttaactttatcgtagcgcacgttatggaaaaaatagagaaaaaactgaactattatcattaaggaggtcaatcgaatgaacgtacttgaaatgaatcatgtaaaaaaacatttcggcggccttgaagtgttaaaagatataaatctttctgtcagtgaaggtcaggtcgtatcaataatcggcccatcgggttcgggaaagtcaactcttctcagatgcgcaactcttctggaaacaatggataatggagatttaatatatctcggaaactatgccgcaaaaaacagtgaaaacggttctgtttacgcttccgcggacgagctgaaaaaaataaagtcgaacttcggtcttgtatttcagaactttaatctttttcctcatcactcggttataaaaaatattaccgaagcgccaatacttgtgcagaagagaaataaagacgaggtatacgaggaagcaaaagaacttttgtccaaaatgggtctttccgataagggcgactactatccttatcagctttccggcggacagcagcagagggtatcaattgccagagcgcttgccatgaagcctaaaatgctttttttcgacgaacctacgtctgctcttgaccccgaacttacaggcgaaatattaaaagttattaaagaccttgcggcagaacacatgacaatgataatcgtaacccacgaaatgtcctttgcaagagacgtctcgaaccatgtcatattcatggacggcggagttatcgttgaagaaggcaatcccaacgatgtaataaacaatcctaagcaggaaagaacaaagcttttcctgaacagatttcagcagtaaggtgatataaatggaattggattttgtaaagctttctcctaccgaaaacatgactgttcttataaaaagccgtgtgccgagggaaaaacaagctgaaataggctcggaaataataaaatataattccgtatatgccgaacaggcaggttttatcgagaaatcgtcaaatcctaatgcgtacgccggactgcaaatggcaggcggagagttttgcggaaacggcacaatggcggcagcttcatatattgcccacaaaaaaggtatacggtgcggtgaaacaatgaatattccccttgaagtatcgggagctgacggaatattaaactgcaaggtcaaggctttggaacacggctttaaaggtacggttctaatgccttctcccctgggtatatataatgaaacctatttaataggcggaaacgagtatacacttcctacagtggttctcccggggatacgccatataatactgcctgttgagtatatcggaaataattttaaggaaatcatcgaaaacgaagaaaatgttctaaagtcccaaataagcgacgacgctttcggaataatcgtatttgatgaaaccaatatgagaatacatcctttcgtagttgtaaaatcaataggaagttcctgttgggaaaggggctgtggaagcggaagtgaggcagtcggatattatttatgcaataagtataaaaaagacgtccgtatattgcttaaacagcccggtggagaaatagaagttgacgcaaactttataagcggagaaatttatattacgggaaccgtatacatagtgtcggagggaaaagcctatctgaactgttgatatacggttcttttttaatattgcggctttcgatatcatggtgatataatcatttgtaagggtgattttatgaggaaagtatattttgataatgccgccaccacttatcctaaaccggaaagagttgcggaggcggtttacggctatataaaaaataacggaatgaatatcggcagaggtatatatgataaggcatttgaagccgctgaagccgtatatgaaacaagggaattattatgtaaattttttgactgggacaaacccgaaaacgttgtgtttacatcaaatgttacggaggctctgaacgttgtaataaaaggttttttgaaatcgggagatcatgtgcttgtatcgtctttggagcacaacgccgtcatgcgtcctctaaaccagctgacaaaaataggcgtttcctttgaccgccttccatgcgattccgacggaaaaactatatttgacaaaaacatgataaaggaaaacacaaaggcggttataataaaccatgcctccaacgtgttcggcacagtttccgatatagaagaaataggaaaaatatgttcggaaaacggattaaagtttatagttgacagcgcccagagcgcaggaacaatacctataagcatgaaaaaatgccatatagacgccttgtgctttacaggacataaaggtctttacggtcctcagggtataggaggatttataattacagacgatatggcagaaaaaacggaaccccttataagcggaggaacgggaagtcagtccgacctggaaacggttcccgactttatgcccgacaggtttgaggcaggaacattaaacatacccggtatttacggtcttagggaaggtctgaaatttataaacgaaacaggtataaaaaccatagccgataaagaactgctccttacaaagctttttatcgaaagtattgaacagatacctaattataaaatcataggttcaaaaacagtaaaaaaccgaacggctacggtatccgtaacggcaaatacagatatggcaaacgcagcctttattctggaaaaacagttcggaataatgacaagggtcggtatgcactgcgcccccaacgcccataaggtcatgggaactttcccaagcggcacaatacgtttttcattcggtttttttaataccgaagaggaaataatgtatgccgttgaagctttaaagtcagatattatgctttctgaaatacaaaatcgaaattgttaccgacagaatacttaaccctaccataacgggatatccatacggagaattatactccggcatatcaaaattcatgccgtaccagcctactatcaatgtaagcggcaaaacgactacggaaatgactgttaaaactttcattgtcttatttagggacaattcaacctctgcctgataggcgcttcttatctccgatatatagtccatcaggcttattgtttttgtataaagtctttccgtttttcttgacagtattctaaactgtttaacggaatgtttgtcaaagagtccgttttcgtttgcctctatatcgttaagtatatttaaaaactgctcataataaagttttatgcgtctgatttttttccttaccgatataaattcatgtatataatcgtcatttcggtcgtcatcaaataccctttcctcgatttttgtaaattcattttcaaaactttccagatattttaagtcctcgtttatctgcatattcataaattgatatacaacctctcccaatgacattatgttactgctgttctttgacgccgtatcaagtctttcttctattctctccgttttaacggcatatattatcaggctgttgcttttcagaaaaatataaatcggaaaatcttttctggaaaagttgtctacgcttttcatcctcatacacaacaaatcaaaaccgtcgcggctttcaaaatgaaatgaatagtgtgaaaaaacgtcgttaaatactgatgaagctatgttatgcttattttttggaactgtaccctccttatattcttccagaactatattggggtttccctctataggttctacgcatctgataagcttattgttttcaatcgtataatacaaattgacaccgccattctgacacaataatttttaatctttatctatttacttttttaattcgtataccaaatctgtaattccgttatagttttccgacgaaataaatttaagaccgtatttttccgtacgctctccgaaaaggcgtgttcctccgccgattaatgcagggatgatactgacgcatattatatctatcagccccatgtctataagctcgtttacaatttttgcgccgccgcatatccatatattttttccgttgttatttttcagttccgtaatagcctcttcgatactgccgttaataaaatttacatttttattattctcaatttttctatgagttattacgtatgtttttaatccttcataaacccatttttcgggagacagttccgttactatttggttataggttttataacccataatgaccgtatctacagtatcaataaattttccatagcttccttcgtttcccttattgctcccgtctccctctatccagtccactcctccgtttttgtccgcaatataaccatccagactcatggcgatatataatataacctttctcaaattacgcctttcccctttcttacttcatacatttaatttttataaaatatatttttcaagaaaaaataagacagaccgttatgaaaacgacctgtctttatattatcctatcacttaaataattaatagtaaaattctactctatccgcgttagcgggatttacccttactgttatgctttcaatatactctactctgtaatttccgagctttccgtttttaatatcagaaagaaccatatctttcacttcaaaaaaatccttaacatcatcataatacttcggtcttcccaattcgtaaacttctccgattactttttcgggatcggttttgtactcttctctgtagtcgataacttccccgtactcgtttactacttcggttccgtatagtatatcctcatactgagtgtgtctttcaacagccggtgcgaatctctcgggattatactcaatatcaaatattattttattcttgggaatattctcgtctgtctccaatgtagttccgtatcttgaataagacgttgtatagtaagacggtattaatatcttgccttcgctttcaagctcggcttccaacgtctccttaactatattttctcctccgattattctctcaccggcatactccatttttgaatactgcgcaaaagcaactccgcagccaagaccacataaaagcacgcctgataaaaacgctattccaagtgcctttctgttcattgttcatcgtcctccttcgcagtatagtcttcaataatatattcttcgatattttcttccgtttctttatcgtcttctctgatttcttcgattttgtttatattcttcttttttattataagcgatactagaagaagccagagagaaacacccatcacagagcagccgagacatattataaatattcccagaacaggatagccctgtaccatcaacactattgacgccccgagtccgaatacggaaataagtcctcctattgtaacgggtataagacaaagtataactataattgccaggcatataaataaaaatccgctgatcattttcctgcaccttccctttgcttttccgatttttttatgcttatcggatttttttatatctgtattttcattgatgtcagtctcttttattatttgctcagtctcggactgtacaggcttttcttttctgccgaacaggccttttattttaaaccataataaagatatcagcgaccaaattttcaaaactatcttttttatcagtcttccgccggctttaaaaaagcttttaattcctcccacagcagaagcgcatattcccataaaagcagtccatagtcctttcagaccttttttattctcagcagcgtccgtaaccatatcatcatttttttcatactccggatttacatgatacgcctccaaaatttccgccgccaagtcgtccatgttgccgaaatctttaatggcgtcggcctcgctcagtccgctttccattctcatatctatgtgctgagagtattcgcttaatatgtcttttatctcgtttttctccagcacccgtattcttttttccagttcgtttaaaaattctgtcttattcatatccgtgctcctttaaaaaactatttacgctttcctggagattatcccattctttcctcaggctgtccatatatataatacccgaagccgttaaacgatagtacttcctcggcggtccttcgttagactccctcaaatatgtatcaaaatacttttcattggtaagcctttttaaaagaggatatattgttccttcatttacgtttaccaccttagagacctcagccaccaactcatatccgtacatatctttgttgtttacagccacaagcactataagttccagtacgccttttttaaattgtacattcatagcctatctcctttctaatattatattatatctagtaccttgcattgtcaagtactgttataaaattaatactgttcttaaaaaatttgtaagaaacaaaaatcctcctttttaatcgaacgaatttaatcgttactgaacccataactgcaatccctttatataaaaaaagacagaccatgtgaaccgaagcattttgtactgtacgcaccaaacggttcgttcacatatctgtctcttttattatgcggctttttcagtccgctataaacaatgaatagtatccctgtttatcccctatttcatttttatttttataaatcttttcattatccataccgcagttttcaacaccgcaaagcttacagtcaagcgcttttatcctttccaggtttttgcccgctttcataagcgcctttacgccgtccaattgcatatactcttcaaaatcgtatgaagccggtattacatgcagtttctgttctccgcttacaagcggtctgtcaagtcttgccgccgccgcgcaaaacgatggcacgccgcttataagttccgtatcatatcccatttcatttatcggctgatatatatattggcacgatgaatatatacatacgtctcctaaagtaagaaaggcgatactttttcctctgtccaacatttccgcaactgcattaactccgtcctcatgcgcttttttcagctgttccctgtcctttgtcataggcatgtgtatcatcaaaaattctttttcgtccatctccggcacagactgaacagctattttataggatacgcatttttctttatccttgtggggcagagctataacgtccgcctctcttattattcttacagccttgagtgtcataagctcgggatcacccgggcctacgctcactccatataattttccttttcccatattactctccctgcaacgccaggatgtcggaagcgcttatctcattttccaataatccctgctcgttaagccaatctatcgtatctgtccaactctgttcatttacggtaaggaactcctgttcatcactttccataagaggcaggagtatttccatgcttgccttttctatttcggggtcaaggggatagttgccctcatcctggtatttaagcaaggtatcaagagccgcctgcggatcttttttcatgtcctcaaagcctttctttgacgcccttataaacgcttccagcttatcgctttcttcttctatctgtttttctcccgttacaagtacaagttcttcataatctgggattccctcatcagttatatcaaagtaagttacatcatagccttcctgtaaaagcgtaggatattcatggtttatatacccgccgatgatagcgtcaacatttcccgttatcaaagcagtattcaaatcaaagcctacgtcctgcatagtaacgtcctcgtacttaagaccgttgtgctccatcattgctttaataaaaacttcattatcaggcgttccaggataacctactgtttttccttttaagtctttcgcgccgtttattccactttctcccatggacataactatatttaacggatgctgtacgactgttcctattacttttataggtatgttttgattagcggctgtagaaacggtatttgtctggtaataaagccctgcgtcagcttgtcctgctgctgtcaacgaaattgcgtcgtttgtgtttgacgggaactgcacgttgaccttaagtccctcttcctcataatatcccttttccattgccacataaataaacgaatgaaccgcattggggtaccagtccagaacaatgtcgaagtcctgaagctctccggctgtattttcattcttcgcagtctgtcccgatgagcatgcagccaccgacaacatcataattcccgataatattaacgctaaaaatttcttcatctttataatcctcccaatttacataatagcaagcatagttgtgaaaagttccgtcatttctcttattgaaggtatatataccttttcttccgttgtatgtataccgtaattgagcggtccgagtgcgtcaattgcaggaactccgaaatagcagaaccagtttgcgtccgttgccgtcggctcaaaggcttcttctatatgcattcccaaaagctctcctgccttttcggctatagcgcacatctcgcttccttttttcgttctctccaatgcagggaaaagagtcctgtaatcgacagtagttttacattcggggtcttcattactttctgcaagggaacggatattagcctccgcttcggcaaacgactcgtttgtcggaagtccggcaacacaaaactccatgtgagcgtctcccgcaacaactccgttaggtcttcctcccgatataggggcaacgttgtaatatatctctctgtcataatcattaaagtcataatacttaagtattttatgcgcaagctccttaacggcgctgtgcccgtcaagatacgctcctcctgcatgggcttctactcctttaatgtcaagcgctcccaatataactccgcgtctttccgttacaattccgtatccgtctcctcttttaacggcgccctcaaacacaaacgcacattccgcgcccattgcttcctgctcaaaaacaacactgcttgttaccgaaccgatttcttcatcacagctgtatatcattactatttccttattcggtaaaagtcccagcttagaagctgtctttacggcataggcagaaacaacaaatcctcccttgcagtctcctactcccagaccgtgcagccagttttcatcatctatataaggcggatttttctctgcaaatccggcaggaaacaccgtatccatatggcaatttataactattttgccttcggggttttcaggaactattcttgccactatatggcttcccgtcccctcaaaatatacttcttttatttctatgccgtctattgatgataatacttctttggcgatatccacaactttacggttaccgtcctcattcttagattcgcagtcaatagcggcaaatcttttaagcaattctacctggctttcaagacattctccggccatttcctttattttcgccgtttccatggttttatccctcctaattttaaaaaaataagacgcctatcccttggatatgcgtctgtcagttttcactcttttttcctacgttggcattacccaaatcaggttacggaagacttttcttccaagggttaagcattttgctctctcagccgaattttatttcagcaccccataaaatattaaatttaacttcaatatatactttcacataagttttgtcaatgtttttcatctatttcagatataaaacgattgtgctataaaatcaatactcgtcaaaaacagcttttatttcctttaaatcctttgttgtattcagtgcaagcataagcaatactctggctttctgcgctgataaagtatttgccgggatacatatatcattcggatcaaaaattttgctgtcaaatacgataccctggtttactcttgaggatcgtacaaaaaaagttcctttttcacgatacagattgtatattgtttcctgccactgacggctgtagtttccgctgccggagcctgcaattacaatcccctcatgttgttttgccatctgctccaaaatcgaagagtcagcccccgcataatagtaaactattcctactttcggaagagctgtcagctgttttaaagaaaaagaggatttatatgtatgcctcttaaagcttgtggcatacatatacggcacttcatccctcatatatcccaggcatcccagttccctttgcccgaatgcgtccaccttaaagttatgcaccttctgtatttcccttgccgcataaatcgtactggaaaacaccgccataacgccgtgtccgcgcgcttcctcactggcagctaggctgaccgcctggaacagattcataggtccgtccgcactggtcgccgtggcaggacgcattgcccctgttattacaacaggtttaacggtatttaccgtcagattgagaaaatacgccgtttcgtcaagcgtatccgttccgtgcgttacaacaacgccgtcaacatcgtctcttgacacaatttcgtttaaagtatttgccagagttatccacttttcttcgtttatttcattactgtcttcattaaacagctgtacctcgctcaattcggctatttcatttatcatcggtatcgattctattacttcgtcaatgctgatttttcccgcctcgtatacggcggattttcccaaattccccgttccggcgatagttccgcccgttgcgactataacaatatgcttcataaaaatcctctttttcatttgcgattatcaaatttaattttccgccttttaaatcaacctattccgccgaataatattccaagcacatatactacaagagtaattccgacgaatacatactttgtaagcggctcaaaccacttacctacgggtttatttctacctgtttcaacctgtgttcttgcatatcctttaggacatacccaaaagaacatgattcccgcaagcaatgcgcccaacggaattatataaatggataccgcgtccatccatgctcctacggaatctccgctttctataaaaattccgacagcggcggctattatcgctatgatacatacggcagcccatctcggaagtttaagctgttcctgcaaagcttctataggcgtttcaaaaaggttcataagagacgttatggctgcaaatataaccgctataaaaaacagaaccgcaaatactccgcccataggcatcatctgaaatacagccggaagtgtgataaacatcattggaggtccgctggcaacatcaagattaaatgcaaacacagccggtattacaaccattcccgcaagtatagcggcgcatgtatcaaaaaatgctacatttttagcacactccacaacgtccgtatcctttttcagataacttccgtatacaagcgttcccgatcctgccaaggataacgagaaaaacgcctgccccaaggcataaacccatgtttttatatctttaaggttagaccagtcaggtaaaaacaaatatttatatccttcaaccgctccaggaagcgtgataactcttataaggagcagtataaaaaatacaaagaatatcggcatcattattttattcattttttcgataccctttgttactcccagaagcataattataaatgtaagcgcaagacccagcatatgccagcctatgcttccgaaatcaacggcaagttctccgaaatatgctcccatattttcgacattaagaagtgaacccgtaacggcgctgaaaagatatttcaaaaaccatcctacaacgaccgaatatcctattgctattcccaatgaacctataacgggtatcattcctattatttttccccaagtctttccttttttaccgaaacgcatttccatagcctttgaaaatgctccgacaggtccgcttttcattcctcttccgtatgccatttcacctataacaccggaaaatccaagcagtattacaaatataaaatacggtataagaaatgccgctcccccgaattttcctgttcggtacggaaacatccatatattgcccattcctaccgccgaacctatgcaggctataataaatcccattttggtacggaactcttcccgccctttgccctgtgtatttttcattttgttctcccatcaatttaaaatttttccacaatctattatacatgatatttcgttatcgtggcactttaattttgttataatcaaaaattatttttttaattccgctgaaaggagtatctatttaactgtaaatcatgtaaaaatccccgaacgtcgcaacattcggggattttatcactatacgcaacatttatgctgttttatctcatatgcaaatatttttctctcgtggcaagtccgcctcttatatgtctttccgctttgttaatctccaaaatttttcttaccgaatatgcaagctcagggtctattttctccactctatcggttatgtccttgtgaactgtactcttactaattccgaatttttttgctgtctgtctcacggttgcattattttctatgatatatgccgcaattttcactgctcttttttcaatataatccttcacaagtattcacctgcataatttgtttatataatctatgcatttttatttaatctatgacaacaagatatattatttttcgcaaattaatatatagtaacttaataaattacattaactgtattaagcttgtgtgattaataatttgccgcttcttgcactttttttatttatatgttattctttagttacggtttgaaacgctcccgaatacaagggctactttgtatttgggattttttctttcttatacttttttaatttggaggttttatggacaagcctattatcaaaaatttttccaagtatgtttctctgaatattttgggacaaattgcctactcatgttatacattggctgatactttttttgtctcaaccgatataggaacgaacggccttacagctcttaatcttgcctttcccgtattctgtattataagcggaacaggtcttatgattggaataggcggcagtacacagttttcaatacttaaaagcaggaatgattcgcaaaatgcaaatcaagtatttacaaatgctcttattcttgtatttttatttgcattatttttcttctttaccgggctgtttgcttcacatcatctggtaaaagtattaggtgcagacagtcaagtttttgaaatcacgaacatttatttaaaaactctcatgctttttgctcctgcatttattttaaatcatctgctacagtgctttgtaagaaatgacggaagtccaactctttcaatggcagctatgatgatcggaagcttttcaaatattgttttagattatatttttatttttccgttaaaaatggggattttcggtgctgcctttgcaacaggattatcacctataataagtatgctgattcttattacttattttattaagaaaaaaaattcttttcgtttgacaatgcctgatattgttcaaacaaaaggaaccctacgtaaaatacttgctaacggtataccaccgtttttaacagaagcagcttccggtgttgttatgtttttatttaactttattatactgaaaatatctggaaatgtaggagttgctgcatttggtgttataagtgtaatctcactggtagtaatttcactgtatacaggtttatctcaaggaatgcagccgttaataagtcaaaatcacggaataggaaacaaatcggctgttaaaacgctttttaactattctttgattacatctataattttatctgctgttgtgtacggaattatattctttaatgcaccgacttttgtttctattttcaataaggaacaggatctgtctttagctcaatatgccattcccggattgaagctttactttgcggcatgtccttttatcggatttaatattgtacaatctacatattttatatccataaatcatcctatgcctgcacagataatttcaattatgcgaagttttcttattctcataccaatggcgttcattctatcatatttgtttggcatgacaggtgtatggttggcatacccggcaacagaaatacttgtatttatctttgcattaacccaaaggccataattccttacggtctttgggatttttatatatttaaaagcatctcatataattttgtatatcgtcagtacttataaacagataaattttatccttgcaattgtttgcttagcaaaaagtcatttctgtaatatcgaaaaaatcgaaccatatcttttaataaaaaaatatataaatttaccagttttaaaaaaagactatacatatattacaaaaacaattataaattttaagcacttattcccccgttaaacatcaatttagcgattgaaagttttaaagccacgttgtataatttgagataatcgttaagcaaaaaaatgattaatttaataaaataccaggaggtaataactatgaagaaatttctcagagccgcaattgccgtaacagccgctcttgctcttacagcctgcggaagttccgacaattcatcagaacagacagacactgcaaacaacgaacaggcagaagcagccgacggcaaaacatataaaatcggcgtactccagcttacacagcatactgcgttagataaaacaaatcagggatttattgacgctctcgacgcttccggaataaaatacgaagttgaccagcagaatgcttcaaacgaccagcctacatgccagacaatagcggaaaagctcgttaacgacggaaacgaccttatttatgcaatagcaacgcccgcagcccaggctgtagccggcatgacaaaagatattcccattgttctttcagctgttacagaccctgccgcaagcggtcttgtagcttcaaacgaagctcccggcggaaatgttacgggaacctctgaccttactcccatatcggagcagataaaactgcttaaggatcttttccccgatgcttccaaagtaggtatcctctactgctcagccgagtccaactcttcaatacaggctgaactggcaagggaagcatgtacggaactcggtcttgaagctactgactttacagtatcaagcacaaacgaaatacagactgttgtagaatccatggtaggcaaggtagacgttatatttgcccccacagacaacacaatagcaaacggtatggctacagtatcaatgattgcaacagacaacggactccccgttatatgcggtgaaagcggaatggttgaagccggaggtctcgcaacatacggaatagattactacaaactcggttacatggcaggcgaaatggctgttgatatactcgtaaacggaaagaatccggcagagatgcctatacagtatcagcccagtgatgaatatgaacttacagtcaatgaagaaatcgcagcaaaacttaatgttgacttatcagctatccagtaacgtaaatctttgaaataagctgagccgttataaacggctcagccttttgcgtatttaaaggcatttggttttttataccatttcgcctgaaatatttagaaagcaggttttaaattatgagcaatcttttaacatctctcctgggcgctacaggacagggaatactctggggtattatggctctgggcgtatatattacatacaagcttcttgatatagccgaccttacggttgacggcagctttgcactcggcggctgtacatgcgccatacttatcataaacggggtaaatcctgttgtcgctactgttctcgcagtcggagccggtctccttgccggcgctgtaacaggcatactccatacatttttcaatattcccgcaatccttgccggaatcctgacgcagctttctctctggtcaatcaacctcaggatactcggcggaaaaagcaaccttcctcttctcaatgaagaaactattataagcagctttgtgggacgtacgggaaatacagttgtggaaacagcgtctcctattattcagaagctcggattaacgcaatctcaggcgtctcttgtcgtaggagtagttgttgtggcaataattatttttataatgtactggttcttcggtacggaaataggaagcgctttaagagctacgggaaacaacgaaaccatgatacgcgccctcggtgtaaatacaaataatacaaagcttctggctcttatgctttccaacggtcttgttgctctttccggcgcatttgtagcccagatgcaaaaatatgcggatataggtatgggacagggcgctatcgtaatagctcttgccgccataataataggcgaggttttattt

SEQ ID NO: 1409 - DNA, 32759 bp, Unknown
  16S sequences of unknown bacteria
caagcggacagcttgaccgtctggaagaacagatattaagtctggatacgatgccagagcgttatcgaaaatatgaaaaagaaccgtggaaaagtcgtggacttcgtgtattaccagtagacaattatgtggtactttatattccagatagcgataaaaaggttgtaacaatacttagagtaatgtataccggacgggacatagacaatcagttaaatctctacacaaagcaataaaggatatgatttaaagcagtctttcagctaggattgactgcttttttcatacttaaagttagaagaaaggactgaattacgatggaagaatgtagcgtattaaaaattatatcataggtcaagttaaactggatccccatcgagtggaaataatgagtagctgttgatcttgtattcaatcaaaatggtggggctgaccccaatgtggtcatgaaaaaataaagcaatattttgtgcaggggatgtccattgattcagaatataagcagcccgatatgatatacaatgcaggatacacttagtgccgccactgtgtaaaatgcgccgatttttgcagtccattttacagaatgggtttcgcgtgcggtagctgcaagtgcgctgaagcatggcatgttaaaattgattgcaaagataaaggcgagtccctgcgcctgagtaaagtttgcagataagatttcggaaatgcccgaagcattgtctgctactttggcaccgaaggtagagctgacaaggcttccacccgtgtcgtataatgtgtttaatacaccaggcagtgattcctttgaaatcgcagatgcgcagaaagcaaggaaagcctgccatttcagtccgaaaaacatagttaccggttcgatgactttaccaaacctgtacagaatactggattctgcatttccgccgaaaccataagtcagagcaaaaaatacgatagaaacaattgaaattacacgcagggcgcggcagaaaatatcaaaagtacgctggaaagtcacatacaggatattacgaaaatctggtttatgatatggcggaagttccatgagcagtcctacccgttctgacttcggggaaagggaatcaccgaagatacggtatacaacccacatcatcagaaacattcagatgcacagatcacaatgaatgtctataatcatattgcagagaagtctcatgtggggaacaagatgtctaaaatgaacctgccggaaaccgtacctgctgtggtataaacaataagccgttgtcgtaaaatgtggtaagaaaatcagacgaatatatttttccaagaatttgtcgtaaaaatgtggtcaaaccaagaaacctccgtgcaaaagcaattgaaaatccctgtgaagttgtgagatacgccatgcacagctcgggaaagaattccctcgctgtcgggctgtcgccctataaaatagcaaaaataaacgtcctcgcaagtaaacttgcagggcgttattttcactattttgcatagctcgtagtgttcacaaaatcttcacaaaagaattagcactcacctcttgacattgctaacaagaagtgttataacacagatagaacaaaggagaggaataaaaggaatggaaaaagagttccggaccgaaggattccgaaccggagtccgaagataatcagtaaatagcattccgaataaccggggtgctcagatagagattctattggaaggagatatgacttatgttgatgccgagcatttttggagagaatttatttaatgattggatggatttttcattcccgcaggttgcagatgtagataaagagctgtatggcaaacatgcaaagaacatgatgaagacagatgtaaaggagactgagaatggctacgaggtagcaattgatctgccgggcttcaagaaggatgaggttaagatccatcttgatcatggttatcttaccattgcagctgcaaagggtctggataaggatgaagaggctaagaaaggcaaatacatcagacgtgagcgttacgcaggcagcatgagccggagcttttacgtaggcgaaggtgtaaagcagagtgacattcatgcaaagtatgaggacggtatcctgaagctggatattccaaaacaggataagaaggctgtagaggagagtaaatacatcagcattgaagactgattgtaaatatttgccttagaaatatttgctttaaaaagtgaaaaaggaacgcagaccatggaaacatggtctgcgttccttttttatttccagttaaaggttgcgataccataaatatagattgcggcgataatggcaggaacgatatactgaaacaatggtttttgccatttctgtattttcagtccggttccggtgtttgcttcttttacaaagcgatcccagccccatccaagacggctgcagcagaacagtgcaaggatgagagagccgagcggaaggatattggtggaaacgataaaatcccagaaatccagccatgtcgtgccgtctgtaaacggctgaaaatggatgagattaaaaccaagtgcggtggtcagggcaagaagaaagacaacgattccgcagatcagacttccctttggccgggaccagccggttaattcacgaaccatggcaagaatattttcgcagacgccaagcaccgttgacatggcggcaaagatcataaacaggaagaacagtgatccccaaaggcgtccgccggacatatgattgaagaccgttgccattgtatcaaatagaagacttggtccggcgttaacctcaagaccatacgtaaagcaggctggaaaaatgataatgccggcgagtatggcaacgagtgtatccagtgcgatgacgtgaatggcttctcccatcaaagcacggtcttttccaatatagcttccgaaaatagccataccgcccattccggtggaaagcgtgaaaaaggcctgattcatggcaccgacaactacagttccgttaattttggaaaaatccggtttcaggtagaagcgcataccatctccggctccctgcaaaagaaggctgtggatagcgagcacaagcattaaaacgagcagcgctgacatcagaatcttggtaatccgctccaggccgccctggagattgaaagaaagaacaataaaggcaatcaggacagtgaccagaaggaaggtaacattgatcgccggatttgaaatcatagatgcaaaaccaagagattcattcccgccagtcagaaatttgcagaaatagtagatcagccatccgcatacgacggtataaaaggccatcagggcaaggtttccggcaaagcacatccatccgaagccaccccatttctgtccgggtttctgtaatttgcgatacatgtagagcgggcttgcctgtgcagctcttccgattgaaaattccattgtaagtgccggaataccaaggatgatcaggcagagaatgtagaccagcataaaactgccgccgccattttgaccgcacatccacgggaacttccagacatttccgcagccgattgcacagccggcagagagcatgatgaagccgaagcggcttccgagttgttcacgtttcattgttcaaattctccttttgataaactgcggagccgctattcctggagcctttttcagacacgctctagtgaatatggatcgtgggtatccgacggacgcaaaaatataaggctatcataaaagaaatcacaggatttgtaaaacagatgatttcgtgatatactaacgaaaatatcgtttgtattgggggaaaaaatggatacgaatgtactgaaaacctttattgcggtatgcgaatactccggcttttctgcagctgctgaaaaactgggctacacacagtcaaccgtttcttcgcagatcagacagctggaaaaagaactgaacacaacgttgtttgatcgcttttatcatagaattgaactgacttcagatggtgtgactgccctgaaatatgcgcgggacattctggagtcgcatgaaaaaatgattgcagaaataaagtgcccggaaaagatcgagggaacgattcatctggctatgtcaagctctgtctgcagccggtatttcaaagatgattttctgcgctttcgggcgcagtttccgggggttcatctgatcgtttcagaaagtggtacagaaaatatgtttgatatgctgcagaaaaatgaggcggatcttgtgtttacactggatagtcatatttataattcagaatatatgatctgtgcggagcgggaagaagcggttcattttatcgcggcggcagaccatccgatccttgcgcgaaaggcgcttgatcttgaaatgctgtgcaccgaagagtttgttctgacggaacaggatatgagctatcggaagctgctggaccgggaactggccgcccggtccatggaagtttctccggttcttgaaatcggaaatccgcttcagatctgtgaaattgttaaaaacagcagactgctttcttttttgccggattttatttcaaaagggtatgtgcagtcgggacaattgcaaacgctggatgtggccgactgtcaggtgaaggtctggacgcagcttctgatccacaaaaataagtggagatcatcggcgctgagtgcatttatctcctattacagaaatgtcatgcaggagtagccggaatggaaaatacagcagattggattttcacatttcaatttcacagccttgcaaaagcagccagggcagctgtccggctcatttttgcgagctcatcgtctgtaaaatgaaagtgttttttgagcagagtgtactccttgtcaagggtcgtattggaaacagtcatgttgtctgtgttgaccgttactaaaataccacggtcaaaaaaggttcggatcggatgttcaaaaagcgaaggtacggctttggtctgtacattgctggttgggcagagctcaagaacaatctgctcgcgttccagcagacgcatacattcctcagaaaagcgggcggcgcagccgtggccgatcctcctggcaccaaaggagatggctttgctgatattgtcgtaattgccacattctcccgcatggatggtaaacggaagatcggagagatacgcataatgaaacagtgtttcaaattcagacagagggactgcagattccggaccggccagatcaagcccggcaataccgatattctgataggcaacagccagctcggcagtctcttgattttgagccgggcttccggttacgaacatacacagaagaatgccgatccggatcttaaggtttgcctgctttgccatgtttacgccgttgaggacggcagcgaccgtctgctgctgtgtcagtccaagtctggtgtagtgctgcggtgcaaaacgcagttccgcataaaaaaggccctgattttccaattgctgaataacgtcaaaagtagcgagcgtcagagatttttctgtctgcagcaaacgggttggaagatcgaagcaacgcagatattccggaaggctctgacaggaggaagagacagtgacggcatttctcacttcggaatctgtcatagtgagaccgttttcaagcgccagtgatttcaggaacggaatggaaagtgatccatccagatgaagatgaagatctattttcgggaaagctgtggttgtcatgaaagaactccttttttgatagtgcggattgctccattgattttgtgatttgtcaggtattctcttgataccagcattgttattataacagacaagcagagaaatcgcttcctgtttcatttatagcaattcaataaaataatgcaggcaagacgatttggcagagtgcgaaagacaaggatgaaatctgcaggtgtgctgatgcacggcaaagatttctgacgcagtatttcacactctgacagatcggagggaatgcattattttgcagaattgctatagttcaatgtgttttttgccgcggcaaattgttctgatccggacggatccggcagaagtacctccgtgttttacttttcatttgtaactgttcagagccaacctccaaaatgctacgcatttcgtcggtgtggcgtatccgccaaataaaatttcaaaaacaggcttaaaaatgcaagcattttccgcctgttttatgaaattttgcctggctctgaacagttactttcattttatgaaatgcaggttgtgatatcgatagtgtacatttttgagcagcggctgtaaagtaagaaatgaaaaaagttgaaatgtgacaaaaagtcaaaatagcggaaaaaattgttaaaatacaggtagtgtgtcaggtgcagcggcattataatgaaaagacagagaaaagggtgtgatctgtcaatcaatgtatggaggaaagaggggaaaatgagctattctatttcaactggcaaagatgatttttaccgtcagatttttaagctggcgattccgatcattattcagaatctgctcagtgccgcggtcaattctgcggatgttattatgctgaactatgtggggcagtcttcaatttctgctgtttcgctggcggcgaattattcgagcattctgtttatggtgtactatggtctcggaaccggagcgtcacttttatgctctcagtattccggaaaaaacaatctgcaggcgatccatgcggtagaaggaattgcgctgcggttttctgtcgggatttctatactggtggcgctgatcgcatttatgatgccgcagcggatgatgcagctgtttacagctgacccggaactgatcgcgatcggatcatcctacctgcgtgtcatgggtattacctatatctgttggggaatttctgagatttatctggcagtcctgcgcagtattggccgtgtgacgatcagtatggtattaaatgtgctggctttcgtgttaaatatttttctgaatgcggtatttatttttggactgtttggtgcgccaaagctcggcgcgacgggtgttgcgattgctacagcgctttcacgtctgatccagcttctggcatgtgtgatcgtttcgatcatgagcaaggatgtgaaattaaatccggcctatatgtttcttcgcagcaaggtgctgtttcatgattttatccggctgtcacttccggcactcggaaatgatctgtcctggagtgttgctttttccatgtattcggtgattctcggacatcttggcacagacgcagtggcggctaattccctggtaattgtggttcggaatatcggttctgttttctgctttgcgattgcaagtgccggtacgatcctgctgggacagatcatgggaaagggcgatctggagaaatcaaagaaatatgcatcacggatgcttcggctgacggtgatcaccggcgcactcggcggcgtaatcgttctggcagtaacgccgtttgttttaaaatttgcctccttaaatgagacagcaatgcattatctcaaatatatgctgctgatcaattcctattacatcatgggatcggccgtaaatactgcgttgattgccggagtcttccgtgcaggcggtgacacgaaatttggtctgatctgtgacacggttgatatgtgggtttatgcggtgccgcttggcttttttgccgcgtttgtgctgaaacttccggtgctttgggtttatttcctgctgtgcacggacgagttcgtgaaatggccgtgggtactgcagcattaccgcaagggagaatgggcaaaaaatattacgagagagaatatttttgaggcgaagggtgatacaccgtaaaatggtggaagcctgttcgtttattattcctggatgatcttcacatcaaatttattcatcagctctccggcctcggtctgttttccggtgagcagatccagcttcccaccaagagatgccggaagaggcgcagcctcatccctgaagttcatgacgaagtagtaggtggcagcttctgtcgtacgttttgtgatctcaagctgcgttggctctgcgatgactgcggttacgtttccgtcttccatagcgcaatccagtactttggcgattccggtttcatccatatcggttgcaagatagtaggtgatgccgcttccataggcgtttctcgttacggccggcatgccttcgtagaagtcgcttgcgtaggaagcgagactttcggcaccttcggtatggatcagatcgcagacgatgcggcattttgcggtagtgccgtcagtaaagcggacggtattcgtctgctccggagcgagtgcatcgatttcttctgcccagattccggcaagggcacgcagtggtcccggataaccgccgaggtaaacattatcggtttcaccaacgataccgctcatataggtcgtgatcagtacaccgccattcgcaacgaacgcttccagagcttccttcattcccggttttaccatgtaaagaacaggtgcgacaatgaccttgtaacgactgaaatccgcatcgacagggatcatattcacggcaatgttacggtcatagaagtatttgtaatactgatgaatctgatcgacgtacagaagatcgacattcgggccgctcgtgtattcgaaggcccagtagttatcccagtcaaagatgatgccgacatttgcgctgtttgcggcacccggaagcagcggacttaactgctcaagctcctcgccaagctgctttacctcgcggaaaacgcgggtattttccgtaccgacgtgtgcaatgactgcgccatggaatttctcacagccgccgacgcttctgcgcagctggaaaaactgaatggtatcagcgccatgcgcaacggtctggtagctctgtgcacgcatctgtcccggacgcttaagggaattataaggctgccagttctgctggcttggagtctgttccatcagcataaacggctcatccttcagtccgcgcatcaggtcatggcacatggcagtatagctccacggtgtattgtagcccggataattgtcccaggaaacgatgtcgagctcctttgcccatttaaaataatcaagtcccttataggtgcccatgagattggtggtgatcagagcgtctttgttgtagcggcgtattacatcacgctccattttgaagtttccaagcattccgtctgaattaaagcggcggtaatcgacagacagtcctgcaaaggcggtgttctgctccgtatccataccgtcaccgagtgcgtttggcagtacaatttcatcccactcgtaaacggtgtggccccagaattcaagattccatgccttgttcaaagcctcgattgatttatatttgtttttcagccatacacgaaaggccttttcacagttttcgcagtaacactctccgccatactcattgctgatgtgccagcagactacatgcggattggaagcgtagcgtgcggccagctgatcgacaagggcggaagcgtatttctgaaaaacgagggaattcgggcaggcattgtggcggtgtccgaatttatgatgacgtccctgataatccgttcttgcgacctccggatattttttgaacatccatgcaggcagtgcgcctgtggaagtggcgagcacgatgtcgtagccctctttgctgagcatatcgatgatgtcatcaagctcggaaaaattgtattcgttctcggacggctgaagcttcgcccaggaaaagacatttacggtggcgctgttgatgcgtgcgtcacggaaaatccgcatgtcctcgctccagatctcgcgtccccactgattcgggttgtagtccccgccgtataagattcgtttaaatttaccagccattgaatgagcctcctgtttgttttactgtttggagccagcctccaaaatgcaggtattttacagctgttttatgaaatttcgcctgactccaagcggtaatccttttctttgattatagcgggtctggacagggctgtgtataatatgataaacttgtcgatataacattctgaacctgaatttggaggaagcatgcctatttattttatcaggacaccggtgcgcgaaccatttatttttgattcgatcgggaatcactgggagcaggagcacgtgatccggccagatggatatccgcattaccattatctgcagacggagtccggagagggaacggtcagaatccagggcagggcgatccgtctcggtgtggatgaaggaattttaattgctccttttgtaaagcattcctatatgcggaccgatgagacgtggaatacgttgtttgccacggtgacgggaagtctggagggcagtatcgaccggattttggatgggagaaagattattctgacggaaaaaggtcaggggatgcgtatccgcagaaagattgaggagacgatggagcgctacgcggcgcagccgatggatgagcgggcactttccgtatcatgttatgaattcctgatgaattttgcggacggggtgagcggtgatgaaacttgtaatgacccggtctatcagcgctacattgcaccggtactgcaagaaattgaaacgcgctatggagagcggctgaccgttgcggagctgagcgccggagtttacgtcacacagcagtatctgacgcggctgttccgtcgttttctgggatgctcagtctatgagtacattacgtcactgcgcatctcaaaggcaaaggagctgctcagcaaccggcggctggagatccaggcgattgcccaccaggtgggcttcgaggatgcaagccattttacggtgatgttccgaaagatgaccgggatgacgccgggggagtttcgggtgatatcataaatgtcagaaagagaaaaggggacaaaacgaatatgaaaagaaacgtcagtctggaggaaatctctgacggaagattatacagcagaaatgatatggtgcgtgcggattgcggcggctgcaagggctgcagtgactgctgccatggcatgggggaatcggtgattctcgatccgtacgatgcgtggcggctgtccggtggacttggtgtgccgtttgccgctttgctggagcagaagctggagctgcacgtggtggatggcataattctgccgaaccttaagatggatccgaaaacggatgcctgcggttttttaaatgaagaggggcgctgcagcattcatggttttcgcccgggggtatgccgtctgtttccgcttgggcgctattacagcgaggaagcgggaaagaaggagttccactatttccttcagatccacgagtgcccaatgccgaataagacaaaagtgaaagtaaaccgctgggtggatacgccggaccttgcacggtatgaaacatatgtcacgcgctggcattattttctggatgcggtggagaaaaagctgccggggatggaagaagagcaggcgcgaaatgcaaatcttctgattctaaagctgttttttttaaaagaatatgagccggaggatttttacggacagtttgagacccggatgcagatcgcggaggaagcatttgaatgactgtaaaatcatttcttgcattttggaagagctgcgattagaatagaagcaatcagcaataagatgtcattctgcaaaaatcgacagtactgcctgatgaataaagacagccggtatggaatctgcggagtgattcaccagaacaaaacacaacaggaatggaggacgctgcgatgcagttattgaaggacagaatccgcaaagacggaaaagtaaaagagggaaatgtactgaaggtagacagttttttaaatcaccagatggatatcagcctgtttcaggagatcggaaaagagttccgccgccgctttgagggtgaagagatcaataagatcctgacgattgaggcttccggtatcggaattgcctgtatcgtggcgcagtccttcggcgttccggttgtttttgcaaagaagacacagacgaaaaacatcgccggtgatgtttacaagtctcaggtagaatcctacacgcacggccgcatttatgatatcattgtatcgaaagaattcctcggaccggatgacaaggtgcttctgattgatgatttccttgcaaacggaaaggcactggaaggactggcagatctggtgcagatggccggagcacagcttgtcggggcgggcattgttatcgagaagggcttccagccgggcggtgagatcgtccgctcaaagggaatccgcgtggagtcccttgcaatcgtggagggcatggatgataagaccggagagattacattccgggagtagtccggaagaaaaacagatttgaccggaaacaggaattcttttggcggtaagccggtgagaggaattgcaaaaaaaacggtaatgacagtgtacatggcaggagtgtgccaggtacactgttttttaaccgagtcaagcaagtcccctgcgtggttgcgcggagcaataagcagtgggtagggacttgcttgtatcaggagtggtacaagccactcctgataagctgcgaagcagctactcggttatgaaatatcataaggaaggacccgcttgcgggaggatcccttatgatcctacaagtagcgaagcggattgcgaatatccgctttgactattcaatgtactctcggaatctttttgtgcttgattttgtgagaagattttttgtcagttgtgcccaaatttctgaggcgtacacggtgtgtacgttgatgaaatttgtgtgcagctggcagaaaatcggccacaaaagcaagtgcaggaaagactccgagagtacatttcctgttccgcagcatcgcactctcttatagatattatatttctttttcccttttccagaaatgcccatttaagcgaaaaaaagtgccctgcccgggatgcgaaatcccaaagcaaagcacttttcttttctgttctattttacttatctggtaactgttcagagccaagcagattttcatgcaaaagtgtgaatcatgcttgcatgaatgaacacttttacatggaaatctatttggcggatacgccacaccgacgaaatgcgcagcattttggaggttggctctgaacagttacaatattttcaggcattggaatccttatctgttttcactttacctctgattttttattttatcacagtccccgcgttctgcctactgatttttctgctccagcttcatgcattttcatctgtttctgcactttctggcttattctatgttattttgtaactgttcagagccaagcaaaatttcataaaacaggcggaaaatgcttgcatttttaagcctgtttttgaaattttatttggcggatacgccacaccgacgaaatgcgtagcattttggaggttggctctgaacagttacgataatataagaatataagatggagttggacggagaaaaatccgtcacattgacgagaggagattgaaatgccggcagtttatgcacatgaatgctttggacgcgccgtcgcggcgcagcttgacggggaagtggcagaggtaatcaggaaatatgatgcatcgtttcagatcggcctgcagggaccggatatttttttctttttcggggcgcacacggacaacccggttgtgcggttcggagagcacctgcacaatgtatcggccgcgccgttttttgcaaatgcacttggcgtgatcaggcagaaggggcggatgagcagggaatacgcgtatttatgcggttttgtgtgccactttattctggacagtgagtgccatccgtacgtggaggagatgattaaagaaaccggtgtgcagcatctggagatcgaggaggaatttgaaaagcttctgctgaaagaagacggaaaagatccgattggctttccggtagcgacgcttgtaccgaccgatcttgcgactgccagggcgatccagccgttttatccggtcaaaccgcagcggtttcaaagcggagggagaaaggaatatattccgcttggcatcatccggcagtcacttttcagcatgaaatggatcaaacgtcttttgacagcgccgcagccgtggaaacagaatgcgatcaaccggatcatgaagctgtccggggacaattacaaatacgcaaagggactgatgaatcagcgagaggacaatccggcgtgtaaggtgacaaacgaagggctgaaagcacggtttgatgcggcggttccgcttgcggcagagatgattcgaagcctcgatgagtcgattcggacgggcagaggactgaataagaggtttgaccggacattttcctgagagccagacagcgtgagtgtcaggataacggcaggatgaccaatacgtcagaaactgtggatgaaacaagatgagaagacgagaagaggatatgagacaaaatcaggtcgtgagagtaattgcaagtgatttggacggcacactcctgacgccggataagcaggtgacctcatttacacgtgagattttagcaaaggcagtcagccgcggcatccgttttgtaccgtgtacgggccgtccgtttgatgcagtgccgcaggccgtgcgggagcttccgggcgtggaatacgttattgcctcaaatggtgcggcggtctattctgtctccctgggccggaggatctatgaacggctgctgaacgaggaaacagttgaaaaaatcctgcagcttccgctcccgcaggagatcgcgaccgaagtgctggtgaaaggcataccttatacagaggagcgctatattgaggatccggcgcagttcggggcgacggaatatggaattcagtatatcaaagaaacaaggcggggtctggcagatgtccggagttttttgcgtgagcaccgtgctcagacagatggcgttaattttatctgtgcagacccggcgctgcgtgagcagcttgcccggaggctctgtgaacagtgcccggagattacacttacgtcatccgtgccacatctgatcgaggtgagccacaggcaaagtgataaaggccagacgctgctgtggctgctgagggcgctgaagctctccacggaagaggcgatggccttcggcgacgcggaaaatgatatcccgatgcttcgcgccgtgcggtatgggattgcgatggaaaatgcggcagagcactgcaaagcggcggcgtttgcggtgaccggcagcaacatagaggatggggttgcacggaagatacaggaaatgctggggctgtaaacagggacttgcctgtatcgcagggaatgattatgaggaagtatgacagagaattgtaactgtccgctcttacattaaaggtaactgttcagagccaacctccaaaatgctacgcatttcgtcggtgtggcgtatccgccaaataaaatttcaaaaacaggcttaaaaatgcaagcattttccgcctgttttatgaaattttgcttggctctgaacaattacaaaaaagaagtaaccgaaggttcggcggtgcgttattgcgcaccgccggatttttttgccgaaaaagggaaaacgtgaaaataagattgtttttcccggagagagtcctgtataataagtcgtatgcagcaaagcggatctgaacgatccgctttgatcagggcttctggaagaaacctgcctgacttcatgcaagaagaaagaggacagtatgaaaaaattaaaaattatatttacatcagatacacatggacatttatttcctgtaaattatgcgggaaagtgcagcgaagatgcggggcttctgaatctggcgcatcagattgaaaaggatggaaatacgctggtgcttgacggtggtgatacgctggagggcacaccgctttcccagtattatattagccgcagaagatcgtatccgtttcagccgcttgccgaggggttcaatgcgatgggctgcgattatttcacacttgggaatcacgatttcaattttggatatgaggtgttgaaggaatatgtaaatgcgatgaacgcaacctgtctgtgtgcgaatctgatcgacctgcgcggtgaactgggcgtgaaaaatcatgtgattcacgtgctggaaaatggactgcgcatcggtctgaccggaatcgtgacggattatgtaaacatctgggagcaggaaaagaatctgagagagctgaggattaccgatgcgtttgaagcggcacagcgtgaatatgaggcgctgcgcggcaagtgcgatgtgtgcgtctgcatctatcacggtggttttgaggaggatcttgagaccggcgagcggctgacacagtcgagagaaaacgtggcctgcgagattgcacggaagctcggctatgactttttgctgaccgggcatcagcatatcgcgatggcaggaaaggatctgcatggaacgtatgcggtacagccgccggcgaatgcgggaaaatatatttcgctggaggcggtgtatgaagagatcggaaatatgaaagctgctttgcatgaaatgcagaatgcaaaagaggggaaaaccgcagatgccggaaagagcgaagaggagcagaaggaaaagaactgtgaaacagaagcagctctggacggagaagaaaaatgcggggcagagaatgaggagatccatgaagaaataaagaaaggagctgctacaggaaaggagcaggcgtggataccgaaaacgatagtatctgaggtggttaaaaccggaacggtacacgatgcacagccgtttgaaagactattccctcttgagcatgacgtgcaggcatggcttgacgcgccggtcggtacgctggcaaaagaaatcccggcagaggaaaagcttgacgcggcgctgcacggaagccagatggcagattttttcaatcagatccagctggaggaaacgggcgcggacttttcgtgcacgagtcttggcaatattccggtcggtctgccgcgagaagtgacgatgcgcgacatctgtaatgcctatctttttccaaatacactgtttgtacttgaggtggacgaagcggtgctgcggacagcgcttgagcggtgtgcttcctattttgctgtggaagacggcgcagtacggatatcggatgaattcctgcggccaaaggtggagcactacaattatgatttttacagcggcattcgttatacgtttgatgtgagaagaccggttggcagccgtgtggtatcgctgacgaaagcggatggaacgccgtttggcgataaaaagtaccggctggtgatgaacaattaccgtgcgagcggtaccggcggttatcagatttttgaaacctgtccggtgctctggtgcggtgagaaggagatgccggagctgatcgcggagtatatccggaagcatagtccggtgaaggtgaagcgggagaagacggcggcattggaggtgatctggaaaggatgagcagaaatacagcagatcataaatatggaaccctcaaaaaatattttggatacgacggattccgtccgggacaggaagaactcatcgacgcccttcttgcaggaagagatgtacttggcatcatgccaaccggagccggaaagtcgatctgttatcagcttccggctctacttcttccggggattacagttgtgatctcgccgctgatttctttgatgaaggatcaggtgcgtgctttaaatgaggctggtgttcatgcggcgtatatcaacagttccttaagcgaaaaccagatccgccgtgcgatggaatacgcctgtgcgggccgctataagatcatctatgttgcgcccgagcggctgctgacaccgctgtttcttgattttgcgcacagagccagtatcagtatggtgacggtggatgaggcgcactgcatttcgcagtggggacaggatttccgcccgagttatctgaacatcgttgattttgtggagcagctgcaggtacggcctgtggtcggtgcctttaccgcgacagcgacgacgcaggtgcgggacgatattctctgcgtgctgaatctgcaggatccgaaggtgatggtgaccggatttgaccgggaaaatctatatttcgaggtgcgaaccggaaataaagaccagaatctgcgggactgtctgagggaacatgagggagagagcggaatcatttactgtgcgacgcggaaaaacgtggggacggtctgcacgtcgcttttgatggacgatataccggccacgcggtatcacgcaggcctctcgcctgaggagcgtcaggcaaatcaggatgcgtttatttttgacgagaggccggtgatggtggcgacgaatgcgttcggaatgggaatcgacaagtccaacgtgcggtttgtcatccactataacatgccgcagagcatggaaaactactatcaggaggccgggcgtgcagggcgagacggggaacgtgcggactgcattttgctctattcgccgcaggatgtacggatcggacagttccttctggaggaaaaagagctgcgcgaggatatgacgtacgaggaggcgcaggcggtgcgcgagcgtgacgcacagcggctgaagcagatgaccttttatgcgacaacgcatgactgtctgcgcggctatatcctgaactattttggagaaaaagcgccaaggcgctgcgagaactgttccaattgtctgcaggagtttgtggaggaagacgtgacagatatatgtatcgatattattcgatgtataaaagaactgaaacggggctacggagcaggaacggttgcaggaatcctgcatggctcccgcgtcagcaaactgctggactgggggctggatcagctggagtcttatggatgtcaggcagaagtcagcgaaccacgcttaaaagagatcatacaggaactgatcgcgcagggctatctgacgacaacgccggataaatatgcattgcttgggctgacgagccaggcggaaactatcccgccccgcatgatcatgaaattctccaaaccaaaagagaaggttcctgcaaaaacaaagaaaaagcgaaaaagccagagcagcgaactggattctgcctcctggcagctgtttgaacggctgcgtgcgctgcgcctgaagattgccggtgagcagagagtcccgccgtacatcgtatttaccgacaagacgctcaccgacatgtgcatcaaaaagccggccacgcgggaagagatgcttgaagtgtccggggtcggagaggcgaagtatcggaagtatggagagcggtttctggaagagctgtggaaaaagtagtaaaataatttgtaactgttcagagccaagcaaaatttcataaaacaggcggaaaatgcttgcatttttaagcctgtttttgaaattttatttggcggatacgccacaccgacgaaatgcgtagcattttggaggttggctctgaacagttactttacttcagatgctccagcgcatacttcagcgaatcctccagatgtgctttcatcagatcaccggcggtctgataatcgccggtacggtatgcgtcgtagatgcggtgatgcatctcattgatccggtgctggggtgtgctttgtgtttcgtaaagattggaaaaaatggtgagctggctgcgcagcttttccgcggcgtgggtcagacggctgttctggcagtaatcgtaaaagagcagatgaaaacggtcggagtactcgatccaaagaggaatatccgtttcatcgagctcttttttttcttcgattagctgtgtttttgcaaggacaagctcagcctcgcggcagatctgtgtctgattcggccagacggcgctgtagagaatcgccaggcggtcgagatctcccatgaactgatacagttcgatcaggtctttttcagacaatgagatgacgttgacaccgacattggaataatattctgccagtccgtcttccgtaagccgtgtcagtgcttcgcggatcggtgtggaactgacctcaaagcggttttttagatttttcagcgtcagcttttctccgagcggaattttgccggtcaggatatcgctgcggagaattgcgtaaatttgttcggaaagggtggtcttgttcaggtccatgagagctcctttatatactttttaatcgagtcaagcaagtcccctgcttcaattgcgcggagcaataagcagtgggtggggacttgcttgtatcaggagtggtataagccactcctgataagctgcgaagcagctactcggttatgagcaagtagcgaagcggattgcgaatatccgctttgactcgagtcgggcaagtaagtcccctgcatgggtgcgagaaaaaataagcaggggaaacgataactatatttattgtatgaatgtgttccaaaatgtcaagaaaaaagattttgcaaaatgcaaaatgtttattgcaatcataagtgaataatgatagaatattgtcagtttaaagcgttgaaggggcaaagtacaagggagtacaacggtacttgccctgttttgttaattaattcaacaaaaaaatgcaaggattcttttgaaaataaaaaggagtgacccaaaatgagagacttaaatctgcttcgtgagctgacacagctctggggagtggctggatatgaaaaactggtacggcagtacatcgggaagattgtagcaccgtatgcagatgagatgattaccgatgcggtcggtaacctgatcgtactgaaaaagggcatcggcggtccgaaggcaaagaagatcatgctggcggcacatatggatgagattggatttatggtaaagaagatcgagccagacggacgtttacgtgtctgcaatatgggatggaactggaccggttctgcatacaatgcaagagttcgtttccgcaatggcgtgagcggcgtgatgggctgcctcggaccgatcgaggaagcgaaaaatgatccgggcaagctgtacatcgatatcggagcaacctcaaaagaggacgcggagaagtacgtaaaactcggcgatgcctgcggatattacggcgagtttctggagctggcaaatgaccgtgtctgcgcaaagacgctggacaaccggatcggctgctatcagctgatcgagtccttaaaggaaaatgacggaacctggctgaatgatgtttactatgtattcggtgtgcaggaggagcttggctgccgcggttcgaaggtagcggctgcgcggattcagccggatgtcggaattgcagttgatatcacaccggcacatgattatccgtgtgatttggaaggaagtaatgtggtcggcggcggtgtcggcataaaaatctgtgatccgtcggtagtctgcgatgaggatgtggtcgcactgatggaaagctgctgtgagaaagagcagatcaaatatcagagagaggttattgacaagggtggtacagatgcatcaagcatgaacctttctggtgttggcgtacggaccggcggtgttgtagtcgttacacggtatccgcacagccagagcgcagtggcgtcgaaagaagacattgacggaggcgtggatctgctgaacacattctgcaagagtgagctgacattctgctgattggacgcaggtaagcattcccctcttcaagtgcgcggagcactaagcggtgggatgcttatgttagtgagagttgaaagtttttgctggcagacctggaagcggactatgaagatgtattttatagtaactgtttagagccaaccttcaaaatgctacgcatttcgtcggtgtgtcgtatccgccaaataaaatttcaaaaacaggcttaaaaatgcaagcatttttcgcctgttttatgaaattttgcctggctctgaacaattacattttataaatgataaatgccaaaagaaaaacagacaggtacatgtcagataacatgcagtgataagcaagaaagaagtaaaaaatatggaaaatacaaggataaaaggcctcacaattctgaaaaacggacaactgcttacgatgaatgacggctccgttttaaaggacgcagatttgtggatcgagaatgggaagattgttaaaatctcagatcgaaaagaaacgatcccggaaaatgcagatgtgatcgatgtctcaggctgcgtggtcatgccgggcatgattgattcgcatgtgcattacgatgagagttatatgggtgattttttccttgcaagcggcgtgacttcggtccgcaacatgcagggctttgccggacatgcaaagtggcgtgatgagattttagccggaacgcgaagaggtccgtacatttattccagcggtccgatcgcagacggcgaggatccgacaattcctgacaacacgaatatcattattcgttcgaaggcagatgcggagaacatcatcgcttatacgaaaaaatacggatttctgtggctgaagacgtatccgtcgatggagccgaaactgtataagtatctgctgcgaagagcagcagaggaaggacttccgccatgcggtcatatgacgaagatccttgattataaatcgctgatcgatgcggggtattcctgctgtgaacatacgagctcgcttccacgggaaaaagaagacatcgtttatgctgcacagcatggcatgtggttctgcccgacccatgtggtctgcaagacgcttccggactacgtctggaacggaaaacagctgaccgaggtggagcattttgaggatctgccggaatgcatccgaaagagatgggaagaagaaaatgaaattacctgcgagaattaccgcaagcttggcataaagccggattttcagacgatcatcgaccgtggaagaaccttcctggaatactctgacagggtgatggccggtacggactgcccgtatgcaggtgtggttccgggatttgccatggcggatgagctggagagtctggtggatgcatatggcatgacaaggtatgcggcgcttgcggcggcgacaagccggccggcagagtacatcggcatctcggatcagaaaggcaagcttcttccgggactggattcagatctgattgtactggaggaaaacccgctggaggcagtcggggcagtgcgaaagatccgcatggtattccagggcgagaacgtctgggataaagaggtgctggatggattcctgaaagcagcaggcagacttacgcaggaagaaattgaatttattccactcaaaatatgacaatgatgaactgcatttacgcttcggacaaattggtgaaatagtttttcaaacacatttgaaggtaaacaggagaaattttatcgcaggaaaaaagaaacacctccgcgcacaaccaccgcagtgagaactgtgcggagcagcaatagaggaaaaggaccggccgaatcttcgcgccgacacaaaaaggaggaaaacattatgaaaaagagacttgctttactcgctgctgcatgcctttgcatggcagtatccatgacttcattcgcagcagacaagagcgacattgtagttgcagtggatgcggatgtggatacccttcatccgacagatttttctaccacggtagagctcggcgtactgaaccagatttacgacaccctgctttactacagcccggatggaacaaaagatccggagccgcgtatcgcagagagttatgagatcagcgatgacggactggattataccttccatttaagagacgatgtgacgttccacgatggcacaccggttacggcagacgatgtggtattttccattgagctgtacaaggcatccgaatatcagggatctcagatctccatgctttccagcgtagaggcaacagacgagcacaccgtggtatgtcatctggatgcaccgtattccccgttcctgcagggtatctgttctccgatgatcgcatcgaaagcatactatgagtcctccgaggatgatttcgtgaacaatccgatcggaaccggcccgtacaagtttgtcagccgcgcaaagggaagcaatatcaaactggaagcaaatgaggattactacagaggagcaccggagatcaaggaagtgacctttgaggtgattccggattcctccacaaaggcaatcgcactgcagaccggtgaggtaaacttcgcagagattgattccgcgacgaagccgcagctggaagcaaacccggcgatcacgatcgctgaggtgccgacctccgcattttcttacatcgcaatgaacacagaaaaagagccgttcaatgatgtgaaggttcgtcaggcaatcaactatgcaatcgaccgtgacaacctcgtggcagtatgctacgacggcgaggcggaagtaaactccaacatctgtgcaaaagagcgtttcggttattcggatgaccagttccagtacacctacgatccggagaaagcaaaagagctgcttgcagaggcaggcatcgagacaccgtatgatcttggtgagatcctggtagcagagaaatactccaatctggcaaccgtaattcagaatgacctgaaggcagtcggactggatgtgacaatttccgtaaaagagttcaactcttacatcagtgacctgcagaacggaagctacggaattacggcgctgaatatgactctggaaggagacacgcagacactggagatggcatttacttctgactatatcggaatcgcaaacaatgcaagatactccgatgaagagatggacaagctgtttgagcaggcgagaactgagacagacaacgacaagcgggcagagatcttcaatgagatctttacaaaggcacaggacgaggcgatctacgcggtaatgtgcaacccgatgacactgtacgcatacaacagcgacctgacctgtccggaatttgtactggaaggaaactactacctgtatgatttctcctgggctgagtaagtatctgcgtaactgttcagagccaagcagattttcatgcaaaagtgtgaatcatgcttgcatgaatgaacacttttacatggaaatctatttggcggatacgccacaccgacgaaatgcgcagcattttggaggtggttctgaacagttacgtatctgcaaacaaaaaaacgtgcagaaaacggacgtaagtgtccgcgaaatcgtaaaaagtgtccgggaacaaaaaagtacggagcgaaaaaagcatccgttcatgaaaacagcagataagctgctagagcgcagcaggcggggatccgggaaaaatccggcatctccgccttctgttatgaggaaggagtatgtcttagatgacaaaatacgtaatcaaacgaatcttatatatgattccggtgctgctcggggtggcatttcttgtgtttaccatcctgtcgctgacgcctggtgatcctggttcgatcatcctcggcatcacggcaaagccggaagacatcgccgcactgaatgcggaatttggatatgacaagccgtttctgatccggttttttaattatattggcgacattatctttcatttcagcctcggtacttcttaccagagccgcggtccggtcatggcggatattatgtcacgttttccgaacacgctgacactggctgttttatcgatggctgtatcctcgattatcggaatttctctcggtattctttcggcagtgcggcagtattctgtgctggatcacgtctgtgtggtggtagcgctgatcttcgcatcgattccgggcttctggtttggactgatgctgcttctcctgtttgcgttaaagcttggctggctgccatcctttggagcaagctcattgaagcattttattttaccgacgctgaccgtttcgctgacttctgccgccgggcttttgcgtctgacgcgttcggcaatgctggagacgatccgtcaggagtatatccgcacggcgaaggcaaagggcgcatccgaaaaacgcatcatctggaagcatgcactgcgcaacgcgcttcttccggtcgtcacaacgcttggcggaggcttcggtgcctcgcttggcggtgcgatcatcgcggagacggtatttgcgatgccgggcatgggcacgctgatcacgactgcgatccgccagaaggatattccgatggttatgggagcaacgttattcctggcggtgctgttcagtttcgtaatcctgctggtcgatgtgctgtatgcatttattgacccacgtatcaaggcaaaatatcagaatggaggaaagagccgtggctgagacaacacagacactccgcagtgcaggcgtgacgcggagcaaaaagaaaacttcacagctgaaagaaatctggcggcgataccgcaaaaacaaggctgccgtgctcggacttgtgattctggtctttattctgggcatcgcattgtttgcggatctgatcgtcccgtattcaaaatgtattgagcaggtgggagctgaccggcttcagggaccgagcctgacacactttttcggaaccgatgaatatggccgcgacctgtttgccagagtcgtgcacggatccagattttccctgtttatcggagtagcgacaagtttgatggcgcttgtattcggagcgatccttggagcaagtgcaggttatttcggcggcgtggtcgacaacgtgatctgccgtatcattgatgtatttgcctgcgtgcctccgattctgttatccctggccgttgtggcggcgctcggcacgaacctgcgcaacctgattattgcaatcacggtatcgtgcattccgggtaatgtgcggctgatccgttcgcttgtgctgacagttgccgagcaggactatgtggaggccgcgaggtcgtacggcacatcgacgccgcgcatcctgttccgctacgtgctgccgaatgcaatgggaccgatcattgtaaacactaccatgtcaatttcagatatgatcctttccgcagccgggcttagctttatcggcatgggaatccagccgccgtctccggagtggggcgcactgctctcaaatgcgcagacatatctgtttacagcgccgtacatgctggtatttccgggcatctttatcattctttcttccctggcattcaacctggtgggtgacggactgacagatgcactggatccgaaactgaaggattagggaggctgcgatggaagcaaaagaagaagtattaaagattgaaaatttatcgatctgttataagacagatctggaaacggtttatgccgtcaacgatatcagcttttccatcggtgcaggagaaacactgggacttgtcggtgagacgggagccggaaagacgacgactgcacttggaatccttggtcttttgccggagcgaaccggccatgtgacaggcggaaaagtgctgtttgaggggcagaatctgctgaatttaagtgagcatgaaatgcagaaggtcagaggacagagtatttccatgatctttcaggatccgatgacggcattgaatccggtgctcacggtcggtgagcagatcggtgaggcactttatctgcatcacagcagcgagatgtcctcaaaagagatcgaacagaaggttgacgagacgctggagcttgtcgggatcccgaaagaaagaggcagggagtatccgtatcaattttccggcggcatgcggcagagagttgtcatcgcgatggcgctcgtctgtaacccgcagctgctgattgcggatgaaccgacgacggcgcttgatgtgacgattcaggcgcagatcctttcgatcatctgtgacctgcagagaaaatatggaacctccgtgatcatgatcacgcatgaccttggtgtagtcgcggagacgtgcgataaggtcggcatcatgtatgcaggagagatcgtagaatacggtacactggagcagatttttaccggtgatgagcaccatccgtatacggtcggcctgtttggttccattccgaacctgaaggagaatgcgagacgtctgcatccgatcgagggtctgatgccggatccttccaatcttccggaaggctgcagttttgcgccgcggtgcaaacactgcatggagcagtgccggaaacagaaaccgcagacgtgggaaaaggacggtcatcttgtgagatgccatctggccggaaagggtggaaacaggatcgatggaaaataaaaagagcgagacacttcttgaagtaaaaaacctcaaaaaatatttcaaaacaccgggcggaatgctgcatgcggtggatgatgtgagctttcggatccagaggggcaggacgctcggtgtggtaggcgagtccggctgtggaaaatcaacgcttggacgcaccttattatgtttaaatgagccgacggccggagaaattctgtttcagggaacggacattgcgaagcttggcaaaaagcagatgaaggccgtgcgcccgaaaatgcagatgatctttcaggatccgtactcaagcctgaacgggcgaatgacagttcgccagctgatcgcagaaccgttaattgtcaacaagctgtgcaaaaagagacaggaaattgataatcgtgtggatgagatcatggagatcgtcggactggcgccaaggcttgcagcggcttacccacatgagctggacggcggacggcggcagcgaatcggaatcgcccgcacactgatcctcaatccggaatttgtcgtctgtgacgaaccggtatcggcgcttgacgtatcgattcaggcacagatcctgaatcttctgatggatctgcaggaggaccggaatctgacgtatatctttatcacacatgacctttccgttgtaaaacatatttcggatgagatcatggtcatgtatcttggaaaatgtgtggagtatgctccggcggacgagatttttgagcatccacagcatccgtacacgcgggcgctgctcaatgcgatcccgatcccgagcattgaatcctgccacaagcgcagagaactgctgcagggcgaggttacaagcccgatcaatccgaagccgggctgccgttttgcggcacgctgtccgtatgcgaaggaggaatgcagaagctgtactatggagctgcgggagacgcagccggggcattacacggcgtgtccgtatgcagaaggactggagctgtaaaggagaacgatatggaagagatgaaatatacatggccgtatgcgaacgaggctggtcaggaggaggtcatcgagagtgatgtccttgtccttggcggcggcctggcaggctgctttgcggcgatcgcggcagcacgcagcggcttatccgtaacactggtggaaaaaggagcggcagagcgcagcggctccggcggcaccggttttgaccactgggagtcggcctgtacgaatccgtgctgtcaggtgacgccggaggaaatcgcaagtgcatatgtgaacgagcaggactggtacagcaacggtatcgcgcattacattgaatgccgcgagggatatgaccgtctgcttgacctggaatcattcggcggcaaggtgcgcgatacggatgatgagtttaaaggtgcggagttccgggatgacgagacaaagctgatgtttgcgtacgattataagaaccgctatacgatccgcgtctggggttcgacattcaagccggcactcgtaaaagaactgaggcggcttggggtaaagctttatgaccggaccgaggcgacggcgcttctggtggagcagaaagcagacgcagatgggacactgaaaaagcgcggaattggtgcgatgggcatgaatgtccacaccggaaaattctgtattttccgtgcaaaatctacggttctgacgatgtcacgtccggcgcgtgtctggctgtttaatccggatacgacgggactttgtgagtttcgtccaatgcagagtatcggaagcggccatgcaatgggctggcgcgccggtatcgaatttacgatgatggaaaaatcggtgcgggcggagttttccgcggcaggacgcagcttcccgccgtacggtgcgggcaacaaccacaatacatggtatgcggcaacgatggttgacgcgcgcggcgtggaaattccatatgtggaccgcgacggaaaagaactgaaaacggtgtctgaacggtattatccggcgccggggcagaaatttttcttaaagggcggtgtcatcgacgaaccgaaatatgagtaccgcggaccggaaactttgaattttgaggagctgatgaagcgtggttatcagctgccgttttatgcggatttaagccggatgccggaggcagaacggaaggtcatctggggcatgatggttggtgaagaggcgaagacgaagatcccgatctatcagaattatacagagcgcggttttgacccggaaaaacatatgctgcagagctacggtacgggctggcagtctgcgaatttcctggagcaggagcgccagttctttggggcaccgggcggcgtgatgcatgactgggatatgaagacgaacattgacgggatttatgcggcaggcgatcaggtctacgcatcggactgcgcaggcttcgcatgtgcgaccggctattatgcgggcagaaaagcagcggactacgcacggaccgtttcgctcggagaggtaaatcacgcggatgtagaggcagaaaagcagcggctgtatgcaccgctttacgtagacaaagaggatggaatgtcctggaaagagctcaatatggcgatttccaaggcgatgcagaattactgcggcggagtgaaatgcgatgcgctgcttcttgaaggacttgatcttttaaagagctttgagacggaaatcgttccgaaactgacggcttccaatccgcatgatctgatgcgaatccacgaggtgcttgatatcctgacagtatcacagcttgtccttcatgccagtctggcaagaaaatcaagttccgcaccgctgttcttcaggcgcagtgattacacggagatggatccggaacgcgaccgccatcatatcctgatccatcaggaaaatggtgaggccgtgacacgtatcgtgccgcttgattatttcggcgatctgcagacggaatatgagaagcggaatatggactacattgagcggtatgcggtgaaaaaatatcacgcagggactgtgcagccggaaaagaattcagaaaattttgaacaggaaatggtttcgccggatttgaaaataagatcagaaggagaggaggcatcggagcatgagtaagatggaagatacgacaaaagaaacaaaaaatctcggaattgattttacggttgagccggtgccgtgcagcacaatgccgctgaaatacgatgacagcctgtgcatcggctgcaatcgctgcgcatcggtatgtcagtgcgatatcctgctgccgtcaccggaaaaaggaaagcatccgctcgtggtgtatccgggtgagtgctactactgcggtgcatgcgtcatggtatgtccgaagccgggcgcgatcaagctgtctcatccgctgatgaaccgggcaaaatttgtgccggtgcgcagaccggagcaggagtgaaaaatcaagagattgaaaatacaagcaggacagggagaacggaaacgaatccgagctccctgtcctgctttcgcctttcacatgtaaaaattttaatattttttattttttggcttccatccattttacaagcagtccgatattctgcgattcatatgaattcatcacactgacatcgaaatcgtttggctcaatgtagccattataccaggatttggaattaaagtaatcctgtacttctttcatcgcaaatttgcggtgatgtacggcgtaaatctcattgatcgccatctggatctggtcagcgtcaagatttgccacgtccgcctcggtgagaagtctggtggagctgtcaggaagcagaatgtattcactggaagaaacacctgcaccttccttcttaaacgtaacagactccagcaccttgtcgacatcaccggagagttcctgaaattctgcgaggatatccgcgtcatcagtgtagccctgcatatcggtcgggaaggaagcgtagtagcatccgttttctccatttccaagaatctcgtaggaaggatcgctgtcgatgaaatcgaaattttccgcataacagatcgagaaaagggatccgccgtgcggctcgatatcaagaggctttgtccaggcctccctggaagcgatgtgatagaaggcagcgtgatctgcgcttgtggaaacctggcattttccggcccaggaatccggcagcgtcagctgaaattctttaaaatcaagaagaatattgttgttttcgtcgcgggaggtcgtgcaggtaaacagaccatccgggatgctgccagaagaactgtcttctgatgtggcagctgcacttatggcaagtccggccgtcaggcaggtggcaagcagtgtaagtgaaacaagttttcgcatctgatttttcatatcattttccccctatgctatgaaatatgtaagtagtggtgtaaacaggataacatttgtgggagattgtgggctaagattccgcagaaaggttatccgattaatattccagagcagacctgacagatgtttgcagtctgcctgatttacatgcatgtcgttcatgcgatctgtaagcatcatatcataccatatccgtaaaaaaatgaatgtattcttaaaaaccgcggaaaactttcagggaaatgtcaggatgctgaaagctgtctgcggtgttttactgtttgaactccttaatcaagcgccggtccgcacaccggatagagttcacccgtctgtgtatcgatcacatagccaaaaatattgatatcatttggaatcagcgggtggttgcggatcgtatcaaccgtttcgcgcacggaatcctccacggtatcaaagcccgagagcc

SEQ ID NO: 1410 - DNA, 3261 bp, Unknown
  16S sequences of unknown bacteria
tccattccgtaactaccggattacataacttttatagcggcgaaagcgaaaagctttttacagtaagtataacaaaaaatatatcttctcttttcactccggcaggaataggaacggtactgttcggttttcttatgtttctgctgttcagcggcaaaggcaaggatcttttaagcggttacaagaccgtaaaggataaggaaagaggaatagagatattgcccgagggcactcacggcacatccggctttatggatgaaaaggagctgcctgagtttttggtaagcggcagcatagaaaaggtggacgaaaccctgttcggaaaattggaaaacggagattatatcgccatgaaggatatgccgggaatgtctaaaaatgttatggtatacggcgcaccgggtacgggaaagtcacgaggctttgtaatgccgtttgtaatgcaggcggcccgtaggggcgaaagccttgtaatggtagaccccaaagccgagttttacgaaatgtattcgggctttttaaacagccgcggatataccgtaaaggcatataacctgcttgacctttttgcctctgacggctggaattgcgtaatggatacggcacaggatattactcttgtgcagcgcgcggcagaaataattatacgtaatacctcaaacgagaacgagcgcggcgacttctgggagaaagccgagaaaaatcttttaatggcgctcttgcactatgttcagacccttacatatccgggaacggacaagctgctgccgcccgaagaacgaagcctcggtacaatctacaagattttatccacaacatccgtgcaggaattggacgcgcgattcagagcgttaccgcccgaccaccccgctctgccaccctacggcatattccgtcaggcgcataagcagatctgggggaatattgtaatagggcttggcaaccgattaaatgttttccagaataaattggtagacgatattactaagcataatgaaatagacttaactctgcccggcagagaaaagtgcgcgtatttctgtattatttcagaccaggattcttcgcttgaatttttatcttcaatgtttttctctcttatgtttgtaaagctattcgactatgcccgtcagcaggacaacagaagattacctgtttgcgtaaatgtcttaatggatgaattttgcaatatagcgctgcttgacagtaaaaagatattttcggtggcgcgttcacgcaacataaacattcaggctgtggtgcagagtatagcgcagctgtccgacagataccccggtaacgagtggcaggaaattgtgggcgactgcgattaccagttattcttaggctgcaatgatgttatgacctcggaatttttctcaaagcaatgcggcgagattaccgtaagagtaaataacacaaataccccgatgcgaccgtttttagactttttatctcctcaaaagccgtatatgcagaataagacgagcacaggcagagcgcttatgctgcccgatgaaatacggcggctgcctaaagacaaggcgatacttttggtgcgcggcgcaaagccgttgttactcaataaaataacaccggaagagcatccgtcatttaagctgttaaaatactgcaaggcggcggagcatatacccgcatggaagcttaaaaagccggaaaaggttaaaaacaaaaaagtaccgcaatacaaaatgcagtttgaaatgccgcttgatacggacgaagatgaaaaggaaagctttgatttatccgatgggatagattgcagaaagcttcagacagtaaaggaaagggatatataatgaacagaacatacagactgagcgatgttgtaaacgaaagatttttaagacttccgttatctttatttgccaatcctaattacaaaaggctctcggctgaaagcaagcttgtgtattcgctgttgcttgaccgtatgagcctgtctcaaaagaataactggataaacgaggacggcgaggtttatttaatttacaagcgcgaggaaatagcggatatactttgcattacatacaaaaaggcaatagcggcgtttaaggaactgatcactgccggattattactcgaaaaaagacaggggcgcggctttccgaacagactgtttgtgcttaaatgcgaattagaggacagcgacgccggtgacttcggcagctctttcgataatcccgaaacagacgaaaaagaacccgaaaacccgcaggatacgcagatgtgcgaaaacggcatatctaaagctgacgaatcggcatgtcttaatattccgagcacacagcccaagacattccaaaacggcacatcaagaactgccgttttaacacatcaagaagtgccgaaacggcagtcaatccaaacgaataataattatattaaaaatatctatactgagtgtaatcaatcgaccgatccggcgctggcggaaattttacaaaactgcgaattgaaaagctttgaaagcaaaacagcgcaaatgcttgagagcgctgtcagagtgctttactacaagcagagcattaagctgtccggcgctgtgctgccgcaagcggaaatacggaatctgttacggcgcgtcaaccgcgatacgcttatagacgcggtggaggtgctgcggcataacgaaaacgaggtgcaaagcccgcagggctacctctactcggttattttaaatgccgttaatgcagagcatacaagcaccttgcttgagctgcctgacaatatgatagacagggagatgctctatgcttctgactaaaacacaaaagaaaatacttgaaattgtgcgggaatacggcggaatgagggcggatatgctaaacagcctttgccccgacgcatattcgtttgaggtgtcgctccatcagcttgaggtaaaccgcaagctgataaaaacaggagagtattactgcgacgatacacttttgatctgtgacagaaataccgaaaccgcgtttgaggtaatgctggcagtatgcgggcgcccgcccgaaatatactgccgcggtcagccgccgttttcgcttacattcttcaaggaacgtgaacaaaagctctgccgttatgatatttgcgttgttgagccgggcaaggaaatggtggtaagcgctatgcttgaaagcgcggactctaattgcagggtaataatagcggttttggaaagcaccgaaaggggcgaatatctgcgcataccctgcgatacatttatttgcataaaagaaaaaacgg

SEQ ID NO: 1411 - DNA, 16595 bp, Unknown
  16S sequences of unknown bacteria
ctcttccttacgtcgaatacggcgtaaacgtaaacagcgcggaattcgacggcatgaaaaccgcggacgcaaaacgcgcgattctgaaaaagctggaaaaggcgggcaaaggcggcattaaagtcaactaccgtttacgcgactggtcggtatcgcgccagcgttactggggcgcacccatacccgttatacactgcccgcactgcggcgccgttcccgtccccgaaaaggatttgccggtggaacttccctacaacgtcaacttcacgcccgacggaaaatctccgttaggcaaatgcgaagaattcatgaacgtgacctgccccgtttgcggcgcacccgcaagacgcgacgcggatactttggacacgtttgtatgctccagctggtactacctgcgctaccccgacgcaaagaacgccgacaagccctttgacggacagttaatcgacaagatgctgcccgtggacaagtacgtcggcggcgccgaacacgcgtgtatgcatcttctttactcccgctttataaccaaggctttgcgcgatatgggttatattcattttgacgagccgttcaaatcgcttgtgcatcagggcgtaattctcggtcccgacggcacgcgcatgagcaagagtaaaggaaacatcatcaatcccgacaaatacgtggacgaatacggctcggacacgttcagaatgtatcttatgttcggcttttcatatatggaaggcggcccctggagcgacgacggcatcaaatccgtttccaaattcctcgaccgcgtggagcgtatggttttaaaagaccaccccgccgaaaacatcgataaagccgcagaaaaggagcttgcttacgcgcttaattactgcattaaatgcgtaaccgcagacatggaggctttttcgtttaacaccgccattgcaagaatcatggagcttgtaaacacgatgtacaagacggacggaaaagtttcgcccaggcttatggaagaaacttcggaagcgcttataaaaattcttgcgcccatagttccgcatatcgccgaggagctttattcgcttaaaggaaacaaggattcggtattcaacgcttcttaccccgtatgcgacgaaagcaagcttgtaaaagacgaaatcgagctggcggtgcagattaacagccgcgtgaaagcaaaaatcaacgtaccctcctccgccgataacgccgaaatcgaaaaaatcgctttatccgaccccaaagtcatagaggctcttgcgggcgccgcggtcagaaaggtgatagtcataaaaggcagacttataaacattgttgtctgattccgtttttttcaagcaaaaagccgcggatataaaatcagactccgaaaaagcaagatagccgtaaaacacggctttaccttaaagctttttgcgaagttttgcaaaatataatatgacctttaaattataaaaaccaaacaaaaaaaacctttgcttaactcagcaaaggtttttgtttttgcatattgtccgccgtttgtcttttacccgttatactcccgggctcccgtaaaaaaacggctaagaaaacttaaccgctttttacgaatattacgtcaaacatccttgatttattcgagaaccgcttttattctccttacgcctgcggaagaagactgttcctttacgatgcggaagtgaccgagttctcccgtgcgggcggcgtgcggaccgccgcagatttccttagaatatttgcccatggtgtaaactttaactttttcgccgtatttcgcggtaaaaagccccacggctcccgcttttttagcctcgtccacggtcatttcctcgcaagtaatttcaacgtccgcagcaatagcctcgtttacctttttttctacttcggcgatttcttccgccgtaagcgcacgcgggaaagtaaagtcgaacctcagtctttcctcggttatgttactgcccttctgattggcgttttcgtcgtgcagaacttctttaagcgcgcgatgcatcaggtgtgtcgccgtatgcagacgcgttgtctgctcgctgtggtcggcaagtccgcccttgaacttttgttccgcgccctcgtgactcttcttctgatgttcctcgaacgcctttttgaaatcgtcgacgttgaccttaagtccgcgctcggcggcaagctccacggtcatctcgatggggaacccgtaggtgtcgtaaagcttgaagcttgctttaccgcttatggtatcgcccacgagataatgacaaagcttttcaaattcctttattccgctttgaagcgtcttttcaaaccgctcttcttccagattgatttcgcctatgattcggtcatgattcgtcttaagctcgggataaacgtcgcagtattcgccgataacagcctcggcaacgacggaaagcttacccgtaccgatgttaagcgtttttgcaaaccttacggcgcggcgcagtaaccttctcagaatatatccctggtcgacgttagagcaaaccacacccttttcgtcacctatcatgaatacggaagtgcgcacatggtccgcaactatcctgatggctttggtcgcctcctcgctttcgccgtattttttgtcgcctatctgttctattgccgcgattatgggtgcaaaaacgtccgtttcgtaaaccgattttttgccctgaaggatacacaaagtacgctccagccccatgcccgtgtccacgtttttctgctttaaaggctcgtattttccgtcggcggtcttattgtattccataaagacgtcgttccagatttcgaggtattttccgcagtcgcacgcgggcgagcagttttcgctgcacttgggcgcgccgttgtcgataaacatctcggtatcgggtccgcagggccccgttatgccggcaggcccccaccagttgttctccttgggaagatagaaaatcctgtcttttctgatgccctgtttttcccataaagccgcgcctttttcgtcgcgcgggcaatcctcgtcccccgcgaaaaccgaaaccgccagtctttcggggtcaatcccgaggtaatcgggagaggtaagaaattcataagaccagggtatcatctcgtctttgaagtagtcgcccaaagaccagtttcccagcatctcgaaaaacgtgcagtgactgctgtcgcccacttcgtctatgtcgcccgtgcgcacgcatttctgtacgtctgcaagccgcgtgcccgcgggatgcttttcgcccagaagatacggaaccaacggatgcatgcccgccgtcgtaaaaagcacggtggggtcgttttcgggaatcagcgaagcggaacttattatagcgtgaccgcgcgccgaaaaaaagtcgaaccacatttttctcaattcttttgccgtaacgtttttcatattgactccaaataaatattgactgtttgtaattataacagattttttacgcgcaatgcccgaaccgttgtgcctaaaccgtaatttgtgcgtgtgttaattaaaatttaatgccttttaaaggcagtacgggttttgctcaggactaaaaacagattttgtttataacttccttaagctccgaaacgctgtccgcgataaaatcgggtttttccttttcaagcgtttctctgtcgtaaaagccgtaagttacggcaacggacgtaaaccctgccgcatgcgccgcacggacgtcgaacaccgcgtcgcccaccataacgttgttttcgtttaaagcggcgcgcttgaccaaagtgagtttatcgcttgtttttacggaaagctccgcccccactatcttgtcgaaaaagccgtctattccgagatgtttcgtcaccacgtcaagacttacctgaggcttgctgcttgccaccgaaagacaaactcctttatcggaaagctctttaagaagctccttcatttcgggataaaggttacattcgtaaattcctttgggctgataataagagcggtaatattctatcgcgcgcacggagtcttcgggcgaaagtcccgttatcgtttgaaacgactcatacagcgacggacctatgaatccgcgaagcacacggcggtcgaaagaaggggcgcccattttttccagcgcatattccacggaatcgagtacgcctttgcttgtgtctgcaagcgtaccgtcaaaatcaaaaataacgccgtattttttcactttttatatccgtccttaagcgaaactatgcggttgaaaacaagctccttgcttttgcagtcgcggcaaaaatagccttggcgtataaactggaacgacgtaagcggacgtgctttactaagctccgcttcgcctttcgcgttaagcgtaatgcgcgaatcggggttaagacgctcggaaaaatcttcgtgcacgccgtcgtaaggaagcaaaagactgtcgtaaagatttaccgtcatatctacggcggtgtgtgcgtccacccagtgaatgacgccttttgcctttactccgctgttgtcttcgcccgacttagagccctcgacaatctcggcataaacgcgtttaacctcgccgttttcctcgtcgcaacccgtacaacgtatgatatacgcacccttaagccttacagcgccgccttttgtaagtcgcttgtatttgggcggagggttaaggctgaagtcgtcgctttcgatgtaaagccgattggaaaacgcgacttttctctcgcctttttcgggagaattggggtttacctccacggaaacttcttcactgtatccgtcgggtcggttggttattacgagttctaagggtttaagcaccgccatggccctgtccgccgttacgttaagctcgtcgcggatacagctttcaagctgagcaagctccacttcgctgttagccttggctacgcctatgcgctcgcagaattcacgcagcgacgaaggcgtgtaacctcttcttctcagtcccgcgattgtgggcatacgggggtcgtcccagccgtccacgaatttttcgtccaccagttttttaaggtaacgcttgctcattatagtgcgctcgatattaaggcgcgcaaactcgtactggtgcggaggattttcgaactcgccttccttaagcacccagtcgtacaggggacggtggtcttcgaattccagagtgcagatggaatgggttatgccctccactgcgtcctcgatggggtgcgcgaaatcatacatgggatatacgcaccatttatcgccctggcggtgatgcgtcgctttaagcacacggtaaataatggggtcgcgcatattaatgttaggggacgccatgtctattttagccctcagtacaagcgcgccgtcttctactttgccgtttttcatgtcctcgaaaagccttaagctttcctccacgggacgattgcggtttttggtttcagtaccgggcgtggtaagagtgcctctcagcgcgcgcatctcttcgggagttatgtcgtcgacgtaagctttatctttctttataagctttaccgccgtttcgtacattacgtcaaagtagtccgacgcgaaatatacgtcgccctgccagcccagccactttacgtcgttgataatcgactgcacgaactcgtcgtcttccttgacgggattggtgtcgtcaaatctgagattacacttgccgccgtattttaccgccgtaccgtaataattaaggcatatcgcctttgcgtgccctatgtgaagatagccgttaggctcgggcgggaaccgagtgacgatttcctttaccctgccttcgcttaaatccttttcgattatttcttcgataaaattacccatataaactccgtactagaacagtcctttcactacgccgtctttaatggacatacgctcggcgttgggtgagcgcgaaagcccgggcatcagcatgatatcacccgcaaccgccaccagaaatcccgcgccagctttgtacattacttccctgaccgtgacgtcgaatccctcgggccgtccgataagtttgggattatccgacagcgaatactgcgttttggcaatacaaacgggaaggttttgcgggtatttcgccatatcttcctttgccttatctgtaaagacgacgccttttgcgccgtaaatcttttttgcaatgtcgtttatcttctgctcggtgctttcgtcaaggctgtaagaaaactccattttcggcttttcgccctcgcaaagcttggcaaccgcgtcggcaagctccgtcgctcccgcgccgccctttgcccagcactccgtgcatactgcgtttacgccgaggactgaaagctcattttgcagtaactttatttcctcatcgccgtcggtggcgaaacggtttatcgcaaccacgcagggaagcttgtaaacgcccgtaatgttttccacgtgttttaaaagattgcctattccctttttaagcgaaacgtcgtcgcgctccgaaagattatcggttttgccgcccgcgcatttaagggcgcgaagcgttgcgaccaccacgacggcgtcgggagtaagccccgcaagacggcacttgatgtccaggaatttttccgcgccgaggtccgcgccgaagcccgcttcagtcacggcgtaatccgcgtaagacattgccgcgcgagttgcctgaatactgttgcagccgtgcgcgatgttggcgaacggaccgccgtgcacaaatgccggcactccttcgagagtctgcacgagattgggctttatggcgtctttaagaagaatggtcattgcctcttccgccttaaggtcgcgcgcagtaacctcttttccgtcctcgtctgaccctacgacaatgtttccgaggcgcgttttaaggtcgtcgatgtcttttgcaaggcagaaaatcgccatgacttcgcttgcggcggtgatgtcgaaacggtcgtcgcgctcgcagttaaagcctttgcccgtgcggacaaaacgcaaagcgcggtcattgacgtcctgacagcggtgccaggtaacctcttttattttcaaagaattgccccagtaaatatggttgtctatcatcgcggcaagaagattgtttgccgcggttatcgcgtgaatgtcgcccgtaaaatgaaggttaatgtcctccatgggtgcaatctgggcgtatcctccgccggccgcgccgcctttaatgccgaaaacgggtcccaaagagggttctcttaaagcaagacaaacgctcctgcccgtttttttcagtccgtcggcaagtcctatcgacacggtggttttgccctcgcccgcgggcgtgggatttatggcggtgactaaaatcagcttaccgtttttgttgccgcgctgagtgactttcgccttgtattttccgtaacattccaaatcgtccgcggctataccgaggtcagcggcgatttcggtaatgggtttaagcaccgcggcgtccgcgatttcgatatccgttttcatttattgcaacctccgtgacaacaattgtcgaatcttattttaatcgagtccgctttcattccgttttcatacgggacaaatcccagcacttcaagcagcggatcggtaaaagcggctttgacctgcggaaacttttcccgaagcaaaaagacagccgaccttaacgtaaaatcgcggtacatgttctccgcggatttattgcaaaaagacacgctttttatcgtgtcgccctccgtttcgacggttgccaaagtcgcgccgtcctccgtaagggcgtaacgcgcgttgtttttatccgattgttcgcaactgaatttaaccactttgtttttccgtaaatgtttgtaaataaatttattttttaccgtcaaataatattttagtcccatgcgcgctttttgtcaacggtttataattccgcaagcgacaaaactttgacggaatcggtttcttttatctcgtcggtttctcccgcgattatttttaaaagcttactttcggcaagcgcgactatgtcctcgttttcctctttgcccgtatcggtatttactatcttgacggcgctgtactcggaaagcttaagatagttttccagcgcttttttagccgcggcatcggtatcggcaagctcgataagccgacgtaaagttttgccgaggatgtaaatttttccgtttatgagctgagcgacgtaaacaactttatcggagaaaaacgcgctgtaagtgagtatataaccgctgtactctatgaccacgttttcgtcgtcggtaaacgtggaagaaagccatctgcggcagccgaggtaacccgtatacgcgccgagaaccgccgcagaaaatgcgacgataaaccgcgcggcgaaaagcgacgtaaaaacttccacaattgcgtttgcaagcacgcccgtcatgactcctattaccgcgccgagaactgcgccgacggtgacgtaaagaggtttatcgagaaacgtttttctcaataatcttccgataaacagcgcaaaggccgaaacggggcgcgccaacgttgacagaataacggcgaaaacgacagcgttcaccatctggacgataagttcgtgtccggcggacagataatcgggatacagtctgaaaataaactgcgcaaacgtccacccgataataagcccccacgcaatcataataagccttacggcaaaaacgattcttttgtcaggttctttcatcgtaatctcctttaccgaaaagcaaagcgctgtctttttgcgcctcgataataaaatcgcttaaaagcgaatatcttgccgcaacgtaattgttgtccaccataaacttaatccgcgacctttcgcctatcatgacaaccatttttttggctcgagttatcgcggtgtaaagcagattgcgcgtcataatcatgggaccgcccgcggttacgggcaggattacggcgtcaaactcgctgccctggcttttatgcacggttatggcataagcaagcaccagctgattataaatatcgggagtgtaaaccgcgactctgccgtcctcgaattcgactgtcatttcgccgcgggaagaatttatttcgcggatgacgccgatgtcgccgttgtatacccccgtaccctcgcggtaggagtaccccgaagcaatcgtccacgataggtcgtaattgttgacgacgtgcattaccttgtcgccctcgtgataaacgtagtcctcatcctccaccgcgcctccgcccgagtacgggttaagccttttctgcaaaagcctgtttatctttatcgcgccggcggcgccgtttttaagcggacaaagcacctgaacgcggtcgggagtactgccgatgaattttgcggcacgctccaccatatcggcggttttattggcaatgagctcggggtcggatgcggaaacgtagaagaaatcgcgggttttatcgtcgagaacaggcatttctccgcgattggccgcatgcgcgtttgtcacgataagactttcctccgcctggcggtaaatctgatcgagctgaaccgatctgaccgcgcccgaacgcatgatgtccgccaaaacgtttccggcgcccacgctgggcagctggtctttgtcgcccacaagcaccagtcttgtgcctgcggttattttcttgagaagagcctcgaacaaaaatacgtcaaccatggaaaactcgtccacgataacgacgtcgcaggcaagattttcaccgcttgccatatccgaaccgaacctgcacgccctgtgaatcgtacttgcctctcttcccgtagcctcgctcattcttttggcggctcttcccgtaggcgccatcaaaagaacggtcttattaagtttatcgaaaatttctataatgcatttgattatggtggttttgcccgtacccggtccgcccgtaataagcgttgcgccgttgcttattgccgcggtaaccgcttccttctgtctttcgtgcagaattatgccgttgattttctcgtattccgatatatccgcagtaacgtcgtatacggtggaatccgcgccctccaaaagccgagtcacaagcacggcggcgtttttttcggtacggtaaacgcccggcaaggcgagcacttcttcgccgtttacttctaaaaggcgcacgcggcgctcaagcacaagcgattctatggcggaataaacaagcgatacgtccacgcctaaaagcaagcttgcttcttcggctgcggcctcacgaggataacaggtgttgccgcctttctgcacgctttccttaagcacgtggataagtcccgcccctacgcgaaattcgctgtcgtgttctattcccgttttaacggcgattttgtccgcggtaagaaagcctattccgtcaacgtcttctataagccgatacggattgtcggtcacgacttgtgcggtgtttttgccgtaaaccttataaattctgagcgccgtgccgagaggtatgtcgtaagtctgaagcgtcatcacggcgtcctgcatttccttgatttcgccgtaagctttggctatatcctttgccttttctttggatatgcccctgacggaagaaagcaaagacggattgttttcgataaccgaaaaagttttttcgccgaaaaccgaaactatcctcaaagcaagcgcgggacctattcctttaatgagtccgctgccgaggtatcgtactataccgtccacgcccgtaggcttttctatctcgcacctgtcggctttgaactggcggccgtactttttgtgcacgacgtaatcgccgcttaaaacaaccgtttgtccttcgaccacgggcggaaaaacgcccgtcgcgatgacaggctctccttccgcgtcgatgacggctatggtatagccgttttcctcgttgcggaaacgtatttcttctatgtcacccttaagcgtcaatcttgtattgcctttttaagcgcgtcggctttatcggttttttcccaagcaaacgcgggattgccgaaatgtccgtaattggatgtggcggcgtaaacgggctttctcagtcccagactttcaattatcgcgcggggacggaaatcgaacactttattgacggcgtcgataagcttgtccgaagaatatgcggaagtgccgaaagtttcgatgtttaaagaaacgggcttggctttgcctatcgcgtaagcaacctgaagctggcaacgctcggcaagtccagcggcaacaatgtttttgcatacgtaacgcgcgtaatagcacgctgagcggtccactttcgtggggtctttaccgctgaaggagccgccgccgtgcggacacattccgccgtaagtgtctacaatgagttttctgcccgtaaggccgctgtcgccctgaggtccgcctatgacgaaattgcccgtggggtttacgtaatatttggtgtccggcgtaagccagctgtccgttacgacgggttttacgactttctctatgatatcggacacaagtttttcgcggttcactccggggtcatgctgagtagacacgacaaccgtgtccaccgaaacgggcttgccgtcctcgtaaaccacggtaacctgagcctttccgtcgggacggaggtaaccgatttcacccgactttctgacttcgctcaattttctggtgagtttatgggcaagcataatgggcaggggcataagctcctccgtttcgcggcacgcgtaaccgaacatcatgccctggtcgcccgctcccgtatcgaactgagcatcgttatttccctcgcgtgcttcaagcgccttattaacgcccatcgcaatatcgggagactgctcgtcaatactggtgatgaccgcgcaggtcttgtaatcgaacccgtaagcggcgtccgtgtaaccgatatcctttacggtctcgcgcacgattttgggaatatctatataactttccgtagtgaactcgcccattacaagcacaagacccgtggtacagcaaacctcgcaggcgatacggctttgcgggtctgccgcaagcgcggcgtcaagcaccttgtccgcgatgtggtcgcagattttgtcgggatgtccttcggtaacggattcactggaaaacaaaaagcggtttttatccataactattccttcttctttaaatattttttgtctataagagccgtttgctcataccgagatattgtaacacgcattgcgcacttttgtcaatccgtttacatacggcgttaaagccatgaaacgtttttacgtctctttcaggcgcataataaagcaagccgatgttattacttactgattaacgtcggaaaaagcatataacgcataagccgcgaataaaaatattacgaggacaaacccatggaaatattcgaacttatactgtcttttcttataggttttttaacggtatctttaatcggcactttattttcgcttaaaacgaaagggcttttccgactggccctcaattctctgggcggcgcggttgcgctctcgttactgtcgctgtttaaagttgcggtacttcccgtaaatcccgtaagcgcgcttattgtgggcttgcttggcgttcccggccttatagcggtatggcttatcgttgtttttctgtgaaatacaccccggtccgtttgacacgcgggtttaaaaaaggttataataaacgcataaatcgtttggagcgtttattaaatggctaaagaaagagaatttgtcaaagaaatagcggatatcgatacaaattttgcgcaatggtacaccgacgttgtcgtcaaaactcagcttgtggattacggccccgtaaagggaactatggtaatccgcccttacggttatgcgatatgggaaaacattcagcgcgaactggatgcacgttttaaagctacggggcacgaaaacgcatattttccgctgttcattccatacagctatcttttgaaagaagcggaccacgtagagggttttgcccccgaagtggcggtagttactcatgccggtggcgaagaacttgccgaaaaacttgtcgtccgccccaccagcgaaaccattatttgcgaaatgtactctaaatgggtgcaatcctaccgcgaccttcccatgcttatcaatcagtgggcaaacgtagtgcgctgggaaaaaaccacccgtccgtttttacgcacctccgaatttttgtggcaggaaggtcacacgttgcacgccaccgaagaggaagcgaaagaagaaaccatcaaaatgctgaaagtatacgaggaatttgccaaaaacgtgcttgcaatgcccgtgcttatcggacaaaaatccgaaaaggaaaagtttgcgggcgcacaggaaacttattccatggaagccatgatgcaggacggtaaaagtttgcaggcgggcaccactcacttctttggcaccaatttttccgcggcgttcgatatcaagtttctcgacaaagacggcacgcataaaaatccgtaccagacttcctggggcgtatccactcgacttatcggcgcgctcatcatggcgcacggcgacaggcgcgggctgtgtcttcccccctatgtcgcgcccgttcaggcggtcatcattcccattgcggcattcaaaggcggcgtaacggaaaaagcgcaggagatttttgcttcgcttaaaaatgcgggaattcgcgtaaagcttgacgacagcgacgcaagcgcgggatggaaattcaacgaatacgaaatgaaaggcgtacccgtgcgcatcgaaataggtccccgcgacatcgagaacggcgtggtgacctgctcccgccgcgataaaacgggcgaaaagtttacattgcccattgaaggccttaaagacgcaatgtccgcacttttaaaagacatacatgaaaatatgtacgacaaagcgcttgctttcacaaacgctcatataaaaaccgtggaaaacctcagtcagcttaaagaagccgtggatacgggcaactttgctctcggtatgtggtgcggctgccgcgagtgcgaggacaaactcaaagcggaaatgcaggtaaccacgcgcaatatgcctttcgaccagactcccgtgggcgacaaatgcgtcgtatgcggtaagcccgctaaaaagaaaatttacttcggccgcgcgtactgattttcggcttaagtaaaattttggcttgttttattaaaaaaatttcttgtaatgccgcgcatgacgctatatcataaatagtatcgtgcgcggtattgtttttttccgcacgttttgccgcaattaaggaggattataggtttttatggttagtattgttaactacggcgcaaaatgcgacgggcttaccgattgcgcgcccgcaatcaacgccgcgcttaaagaggaatccgtaatttttattccccaaggacgttggcttatcggaaacgaaattcttatcccctcccacagaaaaataaaagcggacgaaaaagccgttattttttgcatggacgacaaatttacgggacaaaatatgcgtgccgccgtcaccaactccgactacgaaaacggcaacgaggatattaccgtcgagggcggcgtttgggacggaaacaatgcccgcaacccgcgcaaagacggttggagatcgggaccgtgtcagggccttttgttcagttttttcaacgtaaaaaatcttacgcttaaaaacatgacggttaaaaattcggaatcgtatcacttcagactgggtaaagccgtagatttcataatttcggatattataatgtcggacgatttgtttacgccctgtcaggacggtattcatgtgggcggcggcagcgcaaacggagtcataaaaaacattatcgccaccagaggcagcaccaacgacgacctcatcgcttttaacgccgacgacgcaaattggtactgccataaccgcggcatgaaggacgctcccataaaaaatatgctggtggaaaacgtcaaagccgaagactgctggactgcggtcagacttttaagcgtcgtaagcgagataagcaacgttaccgtgcgaaaccttacctgcggtgtgcgtgaaatgggtataaatcttgacgcgacaagatatgcgggcgatatcatattcaaccccgacgaatttcccgacggggtcggaaacctgaaaaacattcttttcgaaaacataacgctttataagactaccgaccgcaaaacggcgcttgtctgtgccgaaacaaacggcgacaacgttgtcttttctgattttaccagacttaaaaatcaggaaccggctaacgatatgccgtttttccgcttccgcaatctcaaaaaaagcgaaattgttttaaaagatggacctattcggttgcccgccttacaggagtttactttgtgcgatgactttttaccgcaggtttctttaaatcccgcttcggtaaaaaaataaaataacgcgcttaattgaattgaacttttttccgttatcctttcgttcataagctttcaatcgttgacggataagtccatactgtggtaaaatgtatacagatgacgcaggacattgcgctgttatttgctaagatttttttattgcgtcataaaatttcccgaaaaacaactttaccgattctgtctatacccgttataacaggagtaatttatgaatatcgcgcttattgcacacgacaaaaagaaaaacgacatgattgagcttgccataaaatataaggacactttggcaaaacacactctgttcgccacgggaactacgggaacgctggtcatgggcgaaacgggtcttaacattatacgcatgaaaagcggacctttgggcggcgaccagcaaatcggcgccatgattgccgcaaacgaactggatttagtcatctttttgcgcgaccctcttaccgcccaaccgcacgagcccgacgtttcggcgcttttaagactttgcgatgtgcaaaacattccgcttgcaaccaatcttgcctcctctaccgtaatgctcaacgccgtaggaaggggcgaacttgattggagaaaaagcgtcaaccctctttccgcaggcaaaaaacgttaatatttattttattatgccgttttctttgtccgacagcacaggggtataaatttttttcaaaactgtacggattttgtttgacaaaaacttgtcgatttgatatcattataaagctgtcgcgtttcggcggcttttgtgggggtttagctcagctggtagagcacctgccctgcaagcagggggtcagcggttcgatcccgctaacctccaccacaattgttttttattcttcatctttcgttttgcgttctttataatcgacaaaaacgtttgaatgacgatattttccatatttttataggaatatagctcagccggttagagcaccaccctgctagccgagcgaggtacgagcgaacgccacgagcgtaagcgagtataaggtggtacaagttaatatttgttatctataggaatgtagctcagccggttagagcaccaccctgataaggtgggggtcggtggttcgagtccactcattcctaccacaaaaaacggcacgaacaacgcgccgcttttttatttatagcgcatgcgagtataaggtggtacaagttaatatttgttatctataggaatgtagctcagccggttagagcaccaccctgctagccgagcgaggtacgagcgaacgc

SEQ ID NO: 1412 - DNA, 2799 bp, Unknown
  16S sequences of unknown bacteria
gcggatacgactatggcttcgtccgccggctcatccagatccagcaagccggcatgcacatccagacaaacggcgcccccatgcggatgctggaggagatggaagcgcgcaatgagcgcttcaccttgaaggaactggccctcagcggcaatgacctgaacatgatcggaatacgaggaaaggcggcgggcgatacgctgaagcttctgctcgatcatgtgctcgaccatcccgaggacaatgacaaaaaaacactgatgcggctggctgagcagcacatcagcggatctgactaaagttgttcgtacactgcacggagcgcttttccgacttcggcgaagcttctctcctgcgcgcattgcaaggcctgcggacggatatctttcagtttatgatgcacagcggcattgaccagggcgcggaactcatccgcgtcttttcctttccagcagttgaccccatgcgtcagccagtcagagaagaccgggatatcccgcaggatgacctgctgggatgccgccagcgcctccagcacgacgatgccctctgtttcctctttgctcgggaagaagaaggcgtccgcaccggcatatgcgccttccagcacgtctccttccacatatcctggaaagatcacgttcggcggatgcgcgcctttgacgatgcggcggatcttggctggcacggtgtacagcggcaccttgccgaaccagatgaacgtcacctccggcagctgggaagcgacctcgatgaagtcaaagatccctttgcgctcaaatggcagaccgacacagatgacgctctttctgccctccagatggaaatgtgcgcggtatgcagcgatctttcgctcatcccgggcaaagcgcgcaaggtcgaccccgttgctgaccgcgtcgatcgggatggtgatcccatatccttccagcaggcgcttggaataaagcgtcggcgtcacgatgcggtcccccagctgatagacctgcatcagccgtttcttgaacagcgatgacatctggttgctgaacaaaaacgaattctgaaaatcctcctgtgtgctgtgcgcatgcaccacgatcttctttccttcgcggcgcgcctttttcgcgatccgctcgctcgccacaccgaccgtgttcagatgcaggatgtcataatcatccttttcattcagcgtccattcgatcccctgcgtatccagcgccgccatctgatgacgcatggcgtgcccgatgccggaacgccggatcatatgctgtccctcaaaataaagaagtactttcatctgttcttcctgatatattgccaggcggtcccttgccgcccgcacacaatataccttttcctttctatcagccagaacagaccgcggctgatgacggtatatccttatcttttctgcgttcaatttcccgtactgccgaatccgccctgacggacaagatcggcctcgtcatcctcacagatgccgtaagggaggaatacgccttgcgcgaaggcgctgcccgcaggcagctgcagcgttttctctgcggtaaagcggatgatgatgtgcccttcattctccgcgccatgataatcttcatcgatgatgccggccgtattgtctaagcgcatctggtagcgaaagcccagcgagcttcgcggaaacagcatcagcacccatcccggctgcatggcacagcggatccctgtcggaacaaccacatgctcattgccgttcacctgcacgctcaccggcaggcggaagtcatgtccagcggaaccggacgtcgcccttttcggcagttccagctgctcccaggccctgcgcagcgcttcctcaggatatgtcgggaaggcctgccgcatgtcctggacgaattgcgccagcgacaccttttcaaacctggcgatcttcttcatcctgctctcctttcaggctgcggatgacacggcatggatttcccgccgcgaccacatcgtccgggatatcgcgtgtgaccacgctgccggcgccgatgacactgcggctgccgatcgtcaccccgggcaggatctgcgcgcctccgccgatccatacatcatcgccgatgcgcaccggctctgcccgctcgagccccgttctgcgcgtcttgggatccagcggatggatggccgtatagatgcccacgttggggccgataaagacatggtcgccgatggtcacatctgcctcatccagcacgctgaaattgaagttggcatagaaattgcggcccagatggatattcggcccataatcgcagcgaaacggggcctcgatgttgagcccttcctgcgcgtccagcagcgtatacaatatgccgattgcctgttgtctgtcgctttccggcatcgcgttgaactgctgcagctttgccttgcatgacgcgcgcagctgacgcagcgacacgtcctcggcatcataccaggcgccgcttttcatctgatcccataccttatccatgtggatcctcctctctgcatgcattcattttaacaggaatcagcggccgtgacaattgtaaacctgatccaggcgcgaacggttttcaagcgggcttctttcctgtatactgattgcaggcaaaaaaggaggagatgaccttgatcagactgatcatcactgatatggacggcactttgctgcacggcgacaaaagcatgccggcggggacgctggaactgatccgcgagctgcacgcacgcggcatcgtcttcgcagccggcagcggcagacagtatgcctcgctgcgggaaagctttgcgtcatgcgccgaactgatgtatttcatcgcg

SEQ ID NO: 1413 - DNA, 2520 bp, Unknown
  16S sequences of unknown bacteria
cggacttcaaaattgccgtacacgccgtacactctgtacggctgtttttgattccattcgcaaaaaccgtctttgcttgtgcttgccgcaaagcattatgccctcggcgagatcagtaaggagaagtataagaaaatgacggctgattatgaagcggagcaggaacggttaaagctcgaaattgaaacgacggaagaatgggtcgagcagcggcaggcaatgggcgacgatctggatactttcattgcgctgacgaaaaagtatgtggatgtcacagagctgacgcagacaatcgtcaacgagtacatcaagaagatcatcacacgcaccggacaagtctgacggcaagcgcagacagaaggtgaagatcatcttcaacttcgtagacgaggtggaaatccccgtactggcagaacccatgattgcagaatctacccttggacgcagaaaaacggcgtgaccttcacggtcacaccgttttctgcccaaccgcaagacttatagttccttacgactgttaagccttagaatgattgccttttcctttttatgctactctgtgccaaactgaatatatccttctttttgcatcattttgacgatagagtgaatgctaatccgggggataagccacgcatcgctgatttctttttggaaatgagggctgcccatcatcaagtacataaagaaacgcaagggcgttttcattcaccccaatttttttgccaaaaataatacatcccatctatctgattggttgccagcatgatacttctgacgatttgataatttctgtccatttcattctccttgatacgatttcgtacgatacggcatcataatacgaaatcgtatcaaagtcaacaactttaaaaatactttccccgtttacaaaaattatgctaaaaatggacaagatgaaaatgaccggtatacttcgtcatgcaccaaaatttgctttgctttcttggaatgttcttaaaacaacgtcttccctgcttcgaaaacttagataaaaagcaaaatgtcttgtaaaatgcgcaaaacgtggtatgataaatttattaagtcgttttcaacactacatcttggaggtttcccatgaacaatattaaaattttagtcgattccggctctgacctttccctggagtattgtaaaaaatacgacattacaatcgtgcctctcaatttgcagattgaagggcgtactgtttcagatgacggtcattttgatgccgccaaatactgtgaatatttaaaagttgcgccgcagattcccaaatccgcgcaaccgagtccccaagcctttttggactgctaccgccgcttttctgaccgggagcatattatcgtaatcaccatgtccgccaaagcttccggaacccaccagagcgctgttctggcccgcgacctctttgaagaggaaaacaaaagctgccggatccatgtagtggattccgccagcacctctttcgcaatctccatgctggctttccacgcggcacaaatgcgtcaaaacgggttgcctgccacagaaattgtcgcgcagctggtcgaggatacactgcacatcggcacctattatctgatcgacgatatcagctttttaatcaagggaggccgtatttcctccatcaaaggcggactgctgacaaaaatgagtatcaaacctattgtcggagcaagaaatggtatggcttatcatcactccaatgcgctggggtttcagaaaggacttgccaaactggtttctctgttccggaacaatgcgtttcccggatccgatgtgtttatttcccattccaactgcctttccaaggccaaacagttggaagaagccattctccgcgccgcacccagtaccgttgttcgaattgggcagatgcgcggaaccatgtgtacccatgccggccccgataccatcggcttgtttttctatcaggagcagtttatttaatttccattttccaaagagtccacaagggctcttttttattctgcatatggatgtcaacgttttgacaatgtattttttctgttttggatccatgccggtctcctttattggaactgaaaaaaaccgcttgcgggattcctcggcaaattgacagtaaggcgcccttatgctatcatcaaacaaaataaattgggaggttttgacatgtcctttcagctggaaacaccacgacttcttttacgggagacgacgccggacgattacatccacccctgatagctctggacgcttttgcgttccagatccatcttgccctgtgcggtaacgattgatttgacatagttggtctgcttcagagcctccattttcatatcatcatccacaagaagatgaatgtgttccagatcggcgcaggcaaactggttgtcggagattttggcgatgctgccgtctttcatattgcagccaaacagacacatgccagcacaggaccgatctgcgattttccctcgccgccctcgcccttgaggatcatcatgcgctgccctttggtgctgggaa

SEQ ID NO: 1414 - DNA, 2342 bp, Unknown
  16S sequences of unknown bacteria
tcaccgccgcgccgtctataaaatggtggatacctgcgccgcagaattcgccgcgcagacgccttatttctattccacctatgacgagcagtctcacgacgaggcgacgccctttgtcaaaaagagcacgaaaaagcgcattatcgtcatcgggtcgggtcccattcgtatcggacagggcatcgaattcgactattcctcggtgcattgcgtctggacgctgaaaaaattaggttacgaagtcatcatcatcaacaacaaccctgaaacggtttccactgatttcgacacggcggacaggttgtatttcgagccgctcacgcccgaagacgtgcagaacgtcatcgacaaggaaaaaccgtacggcgtcgtcatcactttcggcgggcagacggcgatcaaattgtgcaattatctcgacagtcacggcgtgaggattctcggcacctccgcggacagcgtggatatggcggaggacagggagcgtttcgacgaacttttggagcgtttcggcatttcccgcccgaagggactcaccgtcatgaccaaggaagaggcgctcgccgccgcggataaactgggctatcccgttcttttgcgcccttcgtatgttatcggcggtcagaacatgaccatcgcctttaccgagagcgatatccgccgctatatggatgtgatcttgcagcagcatatcgaaaatcccgtgctgtgcgacaaatatctgatggggcaggaactggaagtggacgtcatcagcgacggcgcggatgtgctcattcccggtatcatgcagcatatcgagcgcgcgggcgtacacagcggagattccattgcggtctatccgccgtacaacctcagcgacattatgctggaaaagattatcgagtgctccacccaactcgcgctctcgttaaaaacgaaagggcttataaatattcagttcctcgtctataataacgaactgtacgtcatcgaagtcaatccccgcgcctcgcgtaccattccgtatatcagcaaagtgacgggcgtgcccatggtggaactcgccaccaagatcatggtcggctccaaactcaaaaaactgggctacggcacgggactgtacaaaaattctccctacgtggcggtcaaagttcccgtgttctcctttgaaaaactgaacgacgtgaattcgcagttgggacccgaaatgaaatcgacgggcgaagtgctcggcatcggcaagaatatcgaagaagcgctcttcaaggggctggtttcggcgggcttcaaattgtgccatcccaccaaacaaaatcccgtcggcgtctatttcaccgtcaacgaccaggataaattcgaaatactcggccttgccaaaaagttcagcgacctcgggctcaatatctacgccaccgcgggcacggcggataccatccgcaccctcggcatcgaagtgacgaccgtcgatcgtctctcctcgggcgacgaagtattgaaactcatggacgagggaaaagtggattatatcgtctatacgggcaagacggatatggattccatcgacgattatatccgcctgcatcaccacgccatccttttgggcatcaccacgcttacgtcgctggataccgccaacgcgctcgcggacatcatcgccagccgtttcaacgaaaataatactgaactggtggacattaacgcgctgcgcaccgaaaagacgaagatcaagttcgtcaaaatgcagagttgcggcaacgattatattttcttcgacaatatggacggaaagatcacctgtcccgaatcgctcgccatcaattttgtagaccgccacttcggcgtcggcggcgacggcatcgcgctcatcgagagatccgacgttgcggacgcgaaaatgcgtatcttcaacaaggacggcagcgaggggcgcatggcggggaattccatccgctgcgtcgcaaaatacctgttcgataacggtatggtcaagggtaaaaatattaccatcgaaacgctcagcggcgtgaaagaactctcgttgtttacgtttaacgggaaagtgagttcggtcagcgtcgaaatgggcaaagcggttctggacggcaggaacattccttccacgctggacggcgagtccgtcgtagaccgcgcgatcactgtcggcggcaaaaattataacgttacgctcgtcaacgtgggcaacccgcactgcgtggtgttctgcgataaagtggacgcggtggacgttcccaatgtgggaccgctcttcgaatacagcgagtatttccccgaacgcgtcaataccgaatttgtcagggttttctatgttcagatttatgcctttaagcacctccgtttta

SEQ ID NO: 1415 - DNA, 29925 bp, Unknown
  16S sequences of unknown bacteria
taaattcaaggagttttacatagatgattagagtattatttatttgccacggcaacatctgcagatctaccatggccgagtttgttttaaaggacatagtccgtaaagaccatatggaggcagacttcttcattgcctctgccgcaaccagcagagaggaaatcggaaacggtgtccaccacggcacccttcgcaagctccacgaggtaaatattcctgtggataaatccaaaagggctgtacagattacaaaagaagactataatatatatgactacataattgcaatggacgaaaacaacctgcgcaatcttaaacgcatcatacccgaggacacagagggcaagatatacaagctgcttgacttcacagacagaggcggagatatagcagatccgtggtatacaggcaacttcgatgtgacatacgatgatataaccgagggtatagacggatttatggaatttctaaggaggcagaaatgaaaacaaacagggtttgggcggtatattttacagggacgcagacaacttcaaaggtggtcgaaaagcttgcggatgagcttgcaggcaggctcggctgcgacagacttacatatgacttctcgcttccgcaggcaaggacagagcctatggaattttcggcaggcgatcttgtcgtattcggtacgcctgtaattgcaggcagagtgcccaacgtgcttctcaaatatcttgcagatatcagaggaaacggagcgctgggagtgcctgtagtgctttacggcaacagaaactatgacgatgcgctcatagagcttcgggatataatggaggcgggcggcatcaggacgatagccgcaggagcctttataggtgagcattcattctcaaaggtgctgggagcaggcaggcccgatgaacaggatatggctaaagtcagcggttttgcagaggatatatttaataagatatcttccgcagacagctttgaaatgatagaagcaaagggcacccctaagccttacagcggatattatcagccgagggacaggcagggcgttcatatagatatacgaaaagtaaagccgaaaacagacgaaagcagatgcattaaatgcggcaaatgcgcaaaaatatgcactatgggctctattgatgcggaggacttctcaaaggttacgggcatatgcattaaatgctgcgcctgcattaaacgatgtcctgccggtgccaaatactatgatgacaaaggatatctctatcatcagcacgagcttgagcagcagtggagcaggagagcggagcccgaaacatttatctaggaggtaaaatggcagagattacagtaataggcggcattaatattgacatagagggaatgccctatgaagaacttatatacaaagactcaaaccccggcaggataagaatgtcctacggcggagtgggcagaaacatcaccgaaaacatagcaagactgggcggtgatgtggctatggtatctgtggcaggagatgactatatgggagctggcgcggttgaggagcttagaagccttggcgttgatacaagccatatcagcgttgccgagggtgaaaactcagcgatgtacctttccatattaaatcaccgaaacgatatggagcttgccatatgcaatatggatatactggagagaataactcccgaatttatagacagtgcaagaccgctcatagagcaaagccgcattgttgcactcgatacaaatctggagccggagcttttggagtatgtggttaaaaccactaaagaaacggccaaatttcttgatcccgtatcggttacaaaggcagcgcgggcggcagatataatcgggaaatttgatataataaagccgaatctgcttgaggcggaaatcctcagcggtatcagaatcagagatgaaaaaggcatcaggaaagccggagccgcatttcttgacaagggagtgcaaaaagtatatataactttaggcgaaaatggtgtatactatgcagataggagctctgatggatttatcagacccggagatgtcgaaatcgtaagcgccacaggcgcgggagacgccttttcggcagcaataataatggggtttataaaaaatctcagtacagaacagacagcaaagcttggaatggcagcggcagcctttgctatgaaaagcagcacagccgtaaacaaaaatatatgtatggagggaatcagatgtttagcgaatatttagatgtaaatcctgtagttaaagaagcaatagagcagggaaagcctgtagttgcgcttgaatcaacaataatttctcacggtatgccttaccctgacaacgttaagacagccgtagccgttgaagaagctatcagacaggagggtgcagtccctgcaacaatcggaattatacagggaagaattaaagtcggactgacaaatgatgatatagagtatcttgcaaaagcggagaatgtaatgaaagtaagcagacgagattatccgtttgtaattgcaggcaaaagagatggagcaaccactgtagcaggcactatgatagctgccaaaatggcaggcattaagctgtttgtaacaggcggcataggaggggttcacagaggcgcaggcgaaagctttgacatatcggcagaccttgaggaactcaagaacacagacgttgcagtagtatgcgcaggcgttaaatcaatccttgacataggagcaacacttgagtaccttgaaacagcgggagtgcctgttatttcatacggcgcggaggaattccctgcattctacagcagaagaagcggcttcaaatcagaatactcaatggacgatccagaggcaataggagaggctatctcacttaagagcgagctgggacttaaaggctcggttctcataggctgccctattcctgaggctgacgaaataccttacgaaaaaatggacaaggttatatgcgaagcccttgcagaatgcagcgagcagaaaatcacaggcaagagaattacgccgttcctgctcaacagagtcaaggaacttacggagggcagaagccttgaggcaaacatcaagctggttatcaataacgctcatatcggtgcaagaatagcaaaatatataaaatagttgtgaattacagtaatcgggcagtcttttcgggctgcccgatttgcattagatgcatatatgtgatataattattcagttataaatttttatggaaagagtgtttaattaatggacagacaaaagattataaacatagcggttattgctcacgtagatgcaggcaagtcaactctggtagacgcattcttaaaccagagtggagtgttcagagccaatgaagaggtcgttgactgcgtaatggactccgatgacatcgaaagagaaagaggcattacaatctactccaaaaactgctctgtaatgtacaacgatgtaaaaataaatatagttgatacaccgggtcacgccgacttctcctcagaggttgagcgtataatgaaaaccgttgatacggttatacttctggtggactcatcagagggtcctatgcctcagacaagatttgtactcaagaaatctttagagcagggcatcaacccgattttgcttatcaacaaaatagacaaaagagatgccagaattgatgaggttgtcgatatggtatacgagttgtttatggaccttgaagccaatgacaagcagcttgacttccctattctgtacggaatagcaagacagggaatagtagtaagagatcctgcggaagcagagaacatcaacgtacagtcaggggacaacaaggtaagaaagaatacggcaggcggacagggcggactcagcatcaaaccgctgtttgaaacaatccttgagcactgcgacatatatccagacagaacagcagagcctctgcagcttcaggtttcaacactgggatatgatgactatattggcagactgggcatcggccgtattacaagaggcgtcataaaagagggacagaccgttgcagttaccaaggatgacggcagcattaaaaactgcaaggtaaatcaggtgtttacatacagaggactcaagagaactgcggtaaaagaagcgcaggcaggagatattgccgtaatatcgggtatatctgatatttccataggtgaaaccatatgcgaccctgaccaccctgaggcaatggatatgattaaaatcgaagagcctacgctttcgatgaactttatggtaaacaagtcaccgtttgcgggcaaatcgggtaaatatgtgacatcaagacatatcaaagaaagactcgaaaaggagcttgaggtaaatgtgggacttctcgtagagcctacagacagcacagacagcttcaaggtttcaggcagaggcgagcttcatctttcaatacttatcgaaaatatgagaagagagggctatgagcttgcagtatcaaagcctgaggttatacttagaagaggaccgaacaacgagccgcttgagcctatcgaggaggttgtggtttctgttcccgatgaatacgccggctccgttatatccaagcttaatttaagaaagggtataatgacacagatgtcaggtgaaaacggattttcaaagatagaatatctggtgccgacaagaggacttctcggatacagaacagaattcataaacgataccagaggcgagggcacaatggtaagacgttttgattcattcggagaatacaagggtgacatacctcagagaataaacggcgttgccatagctcaggaggagggcgttgctactccttacgcgctgtttaacataggagagagagttcagatgtttattgcgccgggaaccagagtctacgagggtatgatagtcggtatgaactccagaaacgaagatatggtggtaaacccatgcaaatccaaaaaagccacaaatatgagagctgcgggaagcgatgaggcaatcagactttcaccgcacagagagtttactcttgaagaggctcttgaatttataaatgatgacgagctggttgaaatcacaccggatgatatacgtctgaggaaaaaactgcttcacgaaatcgaaagaagaagaagcggtagagtttatgaggaagtataatgaatatattggataaggtggccggcagctcatgggcaggctggataaatgccctgattatactgctggcgggacttctgattttaaaaatagtcacagttctgataagaaaaattctggctaaatccacaatagacggagcgctgcatacgctggtaatcaattccgttaaggttgcggctctgatagtcataattgtttcagtgctttcagagcttggagtcaacacttccacatttattgctgtgataggcgcagcgggtgcggcgattgcgcttgccctcaaggacagccttgccaatgtggcgggcggcattataatccttgtgacaaagcctttcggcaagggcgattatgtgatgacaaatgatatcgagggctctgtggaggaaatcgacatacttaacaccactctcaagactgttgataacaaggtggtgtcgataccaaacagcagcatatcaaacagcgctcttatcaactttacaagaaccgaggccaggagagttgatctgcgcataggggtcagctacgatgccgagatagataaggtaaaaacagtccttgccggggtggcggacagctgcagctttgtaatgaaagacagaggataccgcataggcgtggctgaacatggcgaaagcgccgtaatatttgattttcaggtatggacaaaaccggagaattactgggacgtgagatattaccttggagagaaatccaaagaggctcttgatgaggcgggaatagagataccgtatacccatatagatgtaatcgttaagaaataaattgccaattgtcaaaaaagattatataatagagaaaatatgttttcgggagaacagatatggacaataaatcaagtataataggttttgtaatatacttctgggtatttcagatttcagcatttctgatgatgagactgttcggtctggtttcggcagacagtcctctcaagcacgtactcatactgtttgtggtattcggacttgcatttacaggcttttacttcattaaaagaagcggagatgccaagagagcgcagagaaatgctacagcgcagtatgatgtggctcgtgcaaacaaaaaaaagaaaaagaaaaaaagataattcaaagggcggggatactgccctttatctgtctggaggaaatttatgaacatacagatattcgggacaaacaaatgcaatgataccaaaaaagctgtcagatattttaaagagagaaagattaaataccagttcattgatatgaagcaaaaaggtatgagcagaggcgagcttgcaggagttatcagggctgtcggaggatttgaaaatctgctggacgaaaactgcagggacaggcaggctcttgctcttgtcagacatatgtcagaaaacagcagggaggaaacgctccttgaaaaccagcaggttataaaaacacctgtagtcagaaacggcagacaggccacaacgggatatatgcctgatgtatggaaagaatgggagtaatatggcgacaatagagcagaccttcaaaagacttgaaaaatccagattcagagcaggatttcatctcgactcaaaagacagagaatatgttacggcaaagggaacagacaagataagagagcatgcggaggtcttcataaaaaaacgccttgcgcctgcatatattgcaaatgacggcaggcagacgcccatgagaggacaccctgtattcaaggcgcagcacgcatgcgcctgctgttgcagaggctgtcttgagaagtggtatcacgtaccaaaaggcacagagcttacagaagatcagcagaggcgtatagtcaatatgcttatggcgtggattgaaaaggaaatgaaatagccggaacattattaagtaaaatcaggcaggaaaccaagcgttgcgccctccagaggtgatgatttattgttttttttcaaggctctgtgtataattgacttaccgataaagccttaccggaggtgcatatgacattaggcgaaaaaataaaactgcagagaaaaaagcatgatatgtcgcagcgtgatatggcagagcgcctgtttgtttcaagacaggccgtatccaaatgggaagcagacaagggcattcccgatatagaaaacctcaggcagattgcggcgctttttaatataagccttgattatcttatcaatgatgaggctaaggacgacgatattatgtattctttccgggaggacagaggggaaaggatacttcgcatcagtcttaaagcagttctgctgcttgtaattctctttatgttcggaagtattaatgcatacttctacggctgggcagataatgccggctttgatgaagcaaagacagatgccgcccggttatatatgagaattgcggaagctgctgtggccggacttctggcaggcagcattattgcagaatttacaggaaggcggctgaaattaaatgcaggaattgcagctctttcgcttctttgccttgctgcagccttcagcaaaaggatttattctattattacaggtgtcgcaggaactgcatggatttttgagcaggctgtatactttgcagcagttcccggaatttttgcggccatattcctgtttcagaaatatcacagacctgcagggtggcaaaaacgcaaaaaatctgcaattacagcggtggcgattattactgtcgcagttataatttttgagctgatgctgtcaggaatcataggcggcaaatgggaaagccggtcagctgacgacggatatatttcagaggagcagcgtgcggaatatgaggcagcctacagccggatatgcgaaaaatacggatacacacttgaaacagaagaatatatgaatgacagtacggccggctacagatgtatctgcgatgagaatacatatgttgaaattactcatcaaaacagttcatttgccggaatttccgccagcatagagcttacgatgatgcttgcttcggaaaaacaggcaaacgacaggatttatgattatgcagacctgctggtcgaacttgcaaacagatttgcagattacagcattcagaagaaaaacgtcgtttcagttatatctgcaggaagcagcaatgacggatacagccctgatcctgaatatacggtgacagttcacagcagtgactgctttgaggactgcaatataaattattatgttatgaaatcagaggatgttacagccggcagttatcctgtcatagaatgtcttaagatagacagaggcaatgacgaagtgaatttcgtcataacgcctgaatcagaataaactcagcaaaattattcgttgaacatcgggcaaaaaagcatataatagtatatgagggcagtagcgatactgctctttaatatggcagagaaaagagatgacattttggcagagaattttaaaatatgcatagaagcggtaatacctatgttcatactgcttgccataggctttatcgtaagaaaaacaggaattgtaaacgatgcggagctcaaaaaaatgaacagacttgcatttgatgtgctgttcccgtttctgatgtttgcaaacatatacaactcccacatcagagaaattgtaaacctgcgcctcataatattcaccctggcggcaataggaatagaatatgcgataggcactgcggttacactcaaaatagaaaaaagcagcgcctcaagaggcgctatgatacaggccatatacaggagcaacttcgttataatggggcttcccatagccaccaacatatacggacacggcaacgtcggcgttacggcggtgatgattgcaatagtagtgcctctttacaacatactggcggtggcaacccttgaggtgtacagagattccagggtaagagcaggcagactgtttgccaacatagcaaaaaaccccctgataataggagcggcggcaggcattgtgttttcccttgcgggaattacactgccggaggtggtggaggatacggtaaacagcctcagctctacggcaacacccattgccctgatgatactgggtgcatcctttgagtttggctcggttaaagattgcaggcgcaatctcatagttgtagtgctgtcaagacttgttatagtaccgggagcagtgcttactgtggcagccctaatgggaatagccaacattgaatttgtaacccttgtgggaatattcgcagcgccctgcgcaatatcatcatttacaatggcgcagcagatggattcagacggtgtgctggcgggggcttcggttattttcacctcggcctttgcatgcattacaatgtttctgtggctgtttatattcaaaacagcggggattttctaggagggcagtatgataatatcaacacagtgctatcttgagtcgggcgaaaactggcttatgctttacagaaacaaaaaacaaaacgaccccaacgcaggcaagtggattgcagcaggcggcaagctggagccgggagaaaccgtagacgaatgtgcggtaagagaggttatagaggaaacaggctttaaaatgaacagcttcacaaaaagagctgtggtgcagttcatatcggatacctttgatgacgaggaaatgcacatatatacatcagatgactttcagaaaatatgcgagcctgtatcagacgagggacagtttgaatggattcccgtttccgaaatctttaatctcaatctctgggagggcgacagactgtttttaaaatatctcatagaagcaagaccgtactttgaaatgaggcttgaatacagaggcgatcatcttgtatacgcttcacttgacggacaaagcataaatatatagctcaaaaaggcattaaacccgcaatgcaggcatatatattataaaaagtgtgcagggagggaaagatgcttaatactgatgagataagaaacaaagaggttataaacatatttgacggcaaaagtctgggctatgtatgcgacatagagataaatcttcaggcaggtaccattgacggaatagtgcttccgggcagcagagggatattcaatctcttcggcaagggagaagaggacatcgtaatcagatggtctgatgtcaaaacggtgggagaagatgtgatacttgtggatgtaaagggcgcttttggctaaaatgcttgcaagaggcacaatatgtgggtatactataagctgagctgaatagaaatttatttaggaggaaccataatatgagatgccctttttgtgacaatcaggaaaccaaagttatagactcaagacctacagaagacggacacgcaatcagacgaagaagagaatgcgaacgctgcagcaggagatttaccacatacgaaaaagtcgaagaagtaattctgatggtcgtaaaaaaagatggctccagagaggcttttgacagacgaaaaattatgaacggaattatcaaagcctgcgaaaaacgacctgttacagttgcgactatggagaatatggttgatcagattgaaagaggtcttaacaacatgatggaaaaagaaatcgaaagctcatttataggggagctgataatggatcagctcaaggatgttgatcaggttgcatatgtgagatttgcttcagtatacagacagtttacggatgtgaatacctttgtggccgaaatcgaaaaactattaggaaaacagaagggcaattaatatgataagaatagcaatagacggaccgggaggagcaggcaaaagcaccatagcaaagcaggttgccagggctcttgacatagactatatagatacgggagcgatgtacagagcggtaggctacaagcttatcagagataatgttgatatgtacgatgaggacgcgcttttggcaatgcttgaggctacggacatagacttttcgggcggaaagacaatccttgacggtgaggatataagcgacagaataaggacgcaggaaatatcccgcaaggcctcggagtgctcggcactggcgccggtcagagccaagttggtagagcttcagaaaaaaatgggaagcaccaaaagcgttataatggacggcagagatataggtacagtggttctaaaggacgcagagctcaaaatataccttacggcttcggcagaggaaagagcagagagaagatacaaggagctgcttttaaagggcgaggatatatcctacgagaaagtccttgcggatatgcaggagcgcgactacaatgatatgcaccgggaaataacaccgctgcgcaaggcagacgatgcaatagagcttgatactacaggtatgagcatagatgaggttacagaatatatattaagaaaggtaaaataggatatggcaacagtaaaaccattcagagcagtaagaccgcagaaacagtatgcggacaaggttatttcacttccatacgacgtaatgaacagagaagaagctgcccagatggcagagggaaatccatacagctttcttcatatctgcagagctgagatagatctgccgcaggcagaccagcactcgcaggaggtatacgaaaaagcaagagacaacatagcggatttcagagcaaagggcattttcacacaggaggagactcctgcgctttatgtttacagagagattatggacggcagagtgcagacaggcatattcggctgtgtcagcgtagatgaatacaaaaacaacataatcaaaaaacacgagcttacaagagtcgaaaaggaaatagacagaattaatcattttgacgtatgcaacgccaacacagagcctgtatttctgacctacagagatgacaagcgcatcagagtaatagttgagggctgggcggagcaccacgagcctgaatatgatattacggcatcagacggcatcagacatatgctctggcctgtaacagacgaaaacactatagccacacttacgggactgtttaaggaaatccctgcgctttacattgcagacggacatcacagaagcgcctcggcatttaaagtaggtatgaagcgcagagaggagcacccggatttcacaggcgatgaggaattcaacttctttatggcggcgatattccctgacagcgacctgcatatattcgattacaacagagttgtaaaagaccttaacggacttgattccgaaagctttctcaaaaaaattgaagaagcaggctttgaggtcgaagaaaagggcgttgaaatatacgcgccggaggcaaagcatttcttcggaatgtttattgacggtaaatggtacaggctcaaagcaacagatcgcataatacctgaccatgtgatagactcacttgatgttgcagtgcttcagaacaacctgctgggacctgtgcttggcatagacgatccgagaaccagcgacagaatagacttcgtaggaggtatcagaggccttgcggagcttgaaagaagagtaaactcagatatgaaagttgcatttgcagtataccctgtaagcatttcagatcttctggcagtttccgatgccgatatgataatgccgcctaaatcaacatggtttgagccaaagcttggaagcggacttcttatccatatgctataaacattattgtataacatgagcccctgcagtaaaaactactgcgggggtgttttttatgaaaaaaagaattaaaattttagcagtcgcattttcagtgtgtcttgcagcgctggcagtcagagccgaatatatacaggtagagggccataaggaccttggagatgcggcaagaatgcagcagactctcaaaataaacggtacggataccagaagcatcatatatgatagaaacggtgcaagaataacagacgcctctacaaactatgtatatatcatcaagagaagcaggcttgatatgaaagcaaggcagcttcttgaggcggcagatgcagtcgagggcgacaaaacaaacgacacctacgccatataccatacagaaaacaaaaatcagaacataagggagagccttgaaaaaaactacaatgcctatgtaatagaagcaggcagcagatacagcgcaaatcagcctgcggcgcatcttctggggtatctcagcggaaataagggggcagcaggtcttgaggccagatatcagagcaggctttacagtgaggacaacagcacctttgtatatacagacggcgagggcaatatacttaaaggcgagagcccgtatgtttcctatgcggaggacgcctttctcacaactatagatatacagatgcagaaaacaactgaaaaaatcctgaaaaactgtgaatacaactctgccgccgttgtacttgaaacagaaacaggcaatatacttgcaatggcaagtacccctgactatagtccccagcagatagagaattttctggaaagcaatagcggatgccttatcaacaaggcgctgcagggatatcctccgggctcggtattcaaaatagtgaccgccgcggcggcgcttgaagcgggagccgatacagatgaaatgaaattttactgcggcggcgaggaaagctttggagatgttaagataaaatgcacagcggctcacggcagactaaatcttacggaggcctttgcaaaatcctgcaactgcgcgtttatacagcttgggcaggttgcaggctatgaggctgtaagagatatggcgcaaaaaatgggaacgggaaccaaagtcttaggatttaaagaggaagcagcaggccggataacagcagagcaggaggctgcgggagcaggcattgccaatatgtcaataggacagggaacacttctcgtatcacctgttcaggcggcgaggataaccaatataattgcaaacggcggtattgacacaggtattcatataataagcgaaaaacaggaaaaaagtcgcattatttcagaaaaaacagcagatgaaataacagaaatgatgaaagccgtaacagaatacggcacgggagccggcagcagcacgcttttgtgcgcaggcaagacaggctctgccgaggcaggcagcatgatacacggctggtttacgggatttttcccttatgatgagcctgaatatacaattaccgtcttctgcgaagacggtaaatccggcggaaattcagcccttaaagtatttgatcagattgccgaaaccttgagatagtccttaagcttctgcaaagcctttttctctatacgcgaaacatatgagcggcttattccaagctctgcggctatctctctctgggtctttgcctcacagcctttgatgccgtaacgcataagaactatctgtttttcacggtctgtaagaactttatccagtgaccgcaaaagctgggaaacctggattttaaggctcagactgttaagaatgtcatcggggtctgtgcccaggatgtcatcaaaacttatggagtttccgtcattgtcaataccgatgggcacatttagtgaaacctcggctttgattttttttgtgctccttatgcacatgagtatttcgttttctatacatctggaaacataggtggcaagacgggtggatctgttgctgctgtaggtgtcgatgccctttatcagacctatcgtgccgatggagataaggtcgtcggcggactgacctgtacctgtatattttttggctatatgtgcaacaagtctcagattgtgctttataagagtttctctggcagacatatcaccgttgcttaacttttccagacaggaaatctcatcttcctcagtcagcggcataggaaaggaactgctcatatatgtaaccccctcttgtgctttttactatatgcacaaaagagggctaaagtgcctgaccggattaaattggcatgtcactatttaagtgtaaatgacagacaatctgtgcactggtccattgtaggattgcattcatgtgttcctattgacacgcagttgagagaacagtaattctggcttcccgcatggtgtctgcagtttgataccgaacactttacactttcgttaatcttactcataatctacctccttgaattttgattacagatatattattgccgcagtcggataaaaatatttcagtaatagttgtatgtcaagtttaaaaatgttaaaatgatatgtataattttttatataaatcacagcagagccctcccgaaataattcaggaggataagaatgataattaaagaacttccggtcaccgaacgaccgagagaaaaaatgatcaggtacggctgcggcgccatgtcaaacgcggagcttctggcggtgctcataggcagcggcaccaggaacaaatctgcaatagaggtggcgcaggacatactggctatggatgaaagcggcatcagctttctgggcagatgcacactggaggagatttcggcagttgacggcataggcagcgccaaggcctgcaagatacttgcggcttttgagctgggcagacggattgccacaaagcctgcggcagacaggattgtgattaactcctacagcgatgttgcagatctgtttatggaaaaaatgcgatactatcaggaggagcattttcacgcggtgcttgtaaacgctcacggaggagtgatttcaaccgaggagattgcaatcggggatataatgtctatggtgatacatcccagagaggtgttttccagagcagtccgcaagggtgcagccggcattatacttgcccacaatcatcccagcggagactgtactccaagcgcagacgatgtcagcaccacgaagcgtcttgttgaagcaggcagggttgtaggcatcagagtactggatcatatagtcataggtgacggcacatttacaagtatgaaagacaaaaatctgatataatctatatatcaaagggaacaacggaggacaaaaatgggaagctttttcggaacaaacataggagtggatttaggaacagccaacacacttatttcagtagacggcaagggaatcgttcttaacgagccatcagttatagcaaaggataccgacagagatgtggttcttgcagtgggtcagtccgcaaaggatatgctgggcaaggctcctgcgcatatcagggttgtaaagcctcttgaagagggcgttatatcggactttgatatggctgcggatatgcttgccacttttttcaagcagatgatgggacagagaggcaagattaaggcaagagttgctataggcgttccaagcggcgtgacagaagtcgaaaaaagagccgtggaagaagttgtaacaaaccttggacctaaggaagtatatatactcgaagaaccaatggctgcagctataggcgcaggtatggacgttgacggtactacaggctgtatgatagttgatataggcggcggtactacagacattgcaatcataacgctgggcggagttgtatcaagcaattccatcagatatgcgggagataaattcaatgatgccgtaattcagttcgtaagaagaaaatactcacttctcataggaaccaaaacagccgaaaagctcaaaaaagaagtgggctgcgctatggctgaccttgacgaaaacggcaacgaaatcatatatactgccaaggcaagcggcagagatataatttcggggcttcccaagacaatagacgtaacaagcagcgatcttgaagaggcgctggcagaatcagttgacgtggttgttgacggcatcaaggcaactatcgaaaaagcaccgcctgaaatagcagcggacgtagccgaaaacggtcttgtactttccggcggaagcagccttttaagaaatcttgataaagtcatcacaaagagaacaggtatgcaggttacaatggcggagaaccctcttgaaggtgttgttctgggcgctgccaaggcgcttgaagatgtagagaaactcaaaatctacataaagaaatcacgcagataatcagaataggaaaacggggatatgaattggattcgtgagcataaattaatagtcggaattatagcggcggtagttgtccttgccgtaatatgctgcatatccttcagcagaggcggaggctcaggcattgcaggcaagggtacaaacggtgccgtttccgcaggcgagggcgctgttaccggaggtatgtcgaagattgagagcatattttcgggtatcttcaattacaggtctgtagttgatgaaaacgcagctctgagagaggaagttgcaaaactggagcagcagcttcttgacgaaaaaatgtcaaatgatcagctaaaacagctcaaggagctttcaaaggcgcttgactacaaggctgcaaagaacaggactcttgtttcggcggatattacatcttttgataattccaactggataaatacatttgtaataaacaggggaacctctgacggcatagccaaagacgatgttgttgtaaacggcacaggtcttgtgggcagggtgcttgaatgtggcaaatcgtgggcaaaggttgtttccgtagttgatgaaaacagcaataccagctttatggtttcaagagacacagaaattttaggaatactgtcaggagacggcaggggcggacttgacggatatgttcttgatgctgattccggaattatagagggagacgtactgctttcctcaggtatgggtatgtacccgtcaggcatagagataggaacggttacggcagtcaattacaacagtgatacgcagcttaaaatgattactgtaaagccgtctgtcaatttcagaggcatactgaaagtcgcggtgataatatgaagtacagatatgcatgtataatatttgctctggctttcatacttcagacaacagtgttcggtatgctgccggtgtttggagtttcggcaaatctgctgctgtgctgctgtatagttatttcctttgcgtgcacagataacaacgcaggatttgtcatcagccttatagcgggacttttatatgatgtctgtttcagtcagtatatgggagttacggcgctgctgctggtgcttgttgcggcaggctgcattgcggtcagaacatttctcttaaactctgagaattttatgtcgatgctggttacttctctgggatcggtgtttgtatactacaatcttttatggctcatatacaggcttgcgggcagcagttacagctatatttatatgctcgaaaagctcccggtgtatataattctcaacgtaattataataatgataatgtatgcgataataataagaaaggttgtcagccacaagtctgacaggtattcggtatggggaggatattaaattccagatataagcaggttatggcagtttttctggtccttatggcaatattggccataaggctttttgtaattaccgtggtacagcacagtcagtggtctgaaaaagctgtaagcctgagcaccaagactataacgacctctgctccgagaggcaatatatatgacagagacggggaagtccttgcaaccaataagcaggttttcaacgtgagaatgtacagctccggtatggaggccgacgaattaaacgaggtttcctacaagctgataaaactgtttaagaaaaacggagataaatatgaggacgatttccctatcaaactcaaaaacggcaaattatattatgaatttgacagggaaattcaaaactggctcaagagtcaggatatgcctgtaacctatactgcggagcaggcattcaaccagataagaaagaatttaggaatttcagatgatttagatgtatatgaagcgcagcttgaaatgcagaacacatatggcgtatatccgcctatttcagttggcgcagtgatgaaatacacctacgaaaatgaaaagaaaactttcctcgaaaggtatcatataattgataaacttgaagaaaaaacaggtaaaaaagatatagctgtatcggatatatccgctgaaacagctttcaatatgataagggaatctttcaagataaacaaggatgtttcaaacagaaaagcaagaaacattatgattataagggatgctcttgacgagcttggatataccaaatatctgcctgcggttcttgccaaggacgtgtccgaaaaaaccataatcgaaatacaggaaaacccgtctgaatatacaaatgttgaaatagcatcggaatacatcagattttatccgtcaggctcctttgcatctcatatactcggatatatgggttccatttcggacagcgaaaaagaagaatacgtagaaaaaaagggctacaatacaagcgatcttataggtaaggacggcatcgaaagcaaatatgaatcaacactcaaggggaacgacggaagcagaaccgtaagagttgatgttatgggtaatcttgttgaggttataagtgagacagatcctgttaccggagacgatgtgtaccttacaatcgacaaggatatacagaaatcagtagagaaaaatcttgagaagggcattaaggccaccagtaccggcggagcctttacaagcaaatacggcaattatgtgcctaaggcctcatcaaaatgcgaatcgggagccgcggttgtgattgatgtaagtaccggagacgtgctgggaatggcaagttatccggactttaaccctaacctgtttgctacgggaatttcctcggaggactggaattcacttcagtcaaagaatacaagagatccgctttcggcgcagcctctgtacaatattgcaaccagaagcgctgttcagccgggttcaactttcaagcctgtaacagctacggcagcccttgcaaacggacttaatccgaatatgagcctcaaggacggagggcaggtggaagttggagatcagacatatgattgtcttatctataccgattatcacacaactcacggttatgtaaatcttcctcaggccataggtgtttcctgcaactattatttctttgatataggacagggcaaggactattacacaggaggctctctggggtacaaatgcggcgtggatgaaattctcaaattcgccaagctttacggccttggcgagtcaaccggaattgagcttaccgaaacaactacaacagcgccgtcggcagaggcaaaaatgaaaggtacagaagcctcagtcagaaacatactgtggaccagatccaagatgtacttcaaaaaatcagtactcgaaaacgaagctgtgctgacagaatatataaacgagattgcaggctggatagaagaaaatccttcatatgagacaattctcgacagactgcctgactgcggaatcagagaaagcaaagtaggcgcagttgcagaccttattaaattctcttatttcaatcaggcgggctggacagagggcgatgctctgaacatttcaatcggacagggcgaaaactcatatactccgctgcagcttgccaattatgcagctactataggcaacaaaggtatcagaaacaaagtcagcgtagtcaagagcgtaggcggtcagggcgttaagaaaaaagaaaagggcactgacattggagtcagaaaaagcgactttgattatctgctggcaggtatgaaaaacgtaacaacaatgtcaggcggaagcttgaccagcctgtttaaagacttccctgtatcagtggcggccaagaccggtacagccgaaagggcaggtaaaatcaacacctcagatgaggtttcatatatcaagtcgcatctttcccagatgacaggcactatttcgtggaagcaggtcgaaaccgaaatgaacaggataatgaaagaatatcctaatgtgtacacttcccgcgatgtagctgtaagacaggctttatataatctgagcaacggcagcataaactcgaatgttatggacagatggaaaggcgaatacgaaaactttgcgtggacaatagccgtagcgcctgcagatgacccgcagattgcagtctgcgtgcttctggttcagggtaagacctcgcttaacgcaggtgtgatagcaagagaaataatcggcgactatatggatatttcatctgaaacaaaatacaataacaaatttgatactcaaacagaaatgaattaaaggagaaaatgtgggagaaattattttagttgcatcaggcaagggcggcacaggtaagtcagtgtttgctgtgaatatgggagctgtacttgctgacaaggggtatagggttgttctgattgatatggatatggggcagggaaacctcgatctgtatctgggacttcataataaggttgtatataatgtgtatgatgcagcaatgggaatgtgccgcatgaggcaggcgcttatcaaggacagcagatatgactgtctgtatctgatggcggcgccgccccataccaatgacggcaatgtgacccccgaaaggcttatggctatgtatgaagatctcaaagagaaatttgattacataattatagatgcgcctgcgggagtcgaaagcaacactatgcttgcggcaacgcaggcagacagagctgtcatagttgcaacaccggactatgcttccgtcagaggcgcagatgtgctcgatatgaagctgagagaagcaggaatagacgaaagatactacgttataaacaaggtcaaggcgcagatgatggatgcagagggcgttccgtcctttggcgagataggaatgctgatacgctctaaggtaataggcgttataccttacgatgacaacattgatttctcagtaagtctggggacgcctgcggcaagcgacagcagtaatataatgaaagatatatttatcaaaattgcaaggagaattataaaacagtaatggaagagaaatttttacaggcagttgaacagcttcgaaaagagggcgatatggaatcgcttcttgaagtattaaaagtgataaattctatgatagccacaggcggacagatagttacgccgatagaaattcccgatgacataggcgacggcgaggttaaggcagaggacatagagctcagacatcttactatggacggaaaaatcaaataccttgcggcgtttacctcaatggacgaacacaaaaaaggacctgagggcgcggcgctttttattccggttaaagaacttatcgatactgttaccgcagccgaggacattgagggcatagttataaatccgtggagcagttcattcatactcagcaaagaccttataagcatacttatggatatggacaaatccaaaaccgtaagagcaagtcaggtttcaggcgacttctatgttcatatgatggaggagcgccctgtcaatataattgcggcggtcaaagcaaaaatgcctgaatttgaaaatgtcagcagagtatatatcacagggctaaacaataacggcagggaaagctacctgcttatggtggaatttagcggtgaagagcctgacagcctgtttgagagaatacttgcggtgcttccaaacggagaaaacggcctcaagatagacgtaacaccgtatactggggatataccgggagtggcagagctgatatatcagaaatagaggaaataagttttatgaattaatttcagggtgttaagtaaaagtgcttgacaccttgattttgtatgatataatatactggtgtcaagctataatacttgatacgaaaggagaggagtttatgtttgataaaatcacagaagtaagtctgctttatgatttttacggacagcttctttcaaaaagacagcaggaagtaatgagcctgtattatgaggaaaacctgtccttatcagagattgcagaggaattttcaatatccagacagggagtgcacgacgctctcaaaaacgcggagaaatccctgcatcagtatgagaccaagctgggacttgtcagcagattcgaaaaaagccgccgtgcggttgagatgattgacagacagattgaggcagctatagataagaacagagacaacagcgatcttgtcagcagtcttgcagagataagatcagtaattgatgagatggagcagtaatatggcatttgaaggtttatcggaaaaactgcagggagtctttaagggactcaaaggcaaaggaaccttatccgaagcggatatcaacaatgcaataagacagataaagcttgctctgcttgaggcggacgtaaacttcaaggttgtaaaggaattcgttgcaaccatcaaggaaaaggcccttggtgaagaggtgatcaaaagcgtaactccgggacagcagatagtcaaaatcgtaaacgacgagctggcagctctgatgggcggagccggaagcaagctgacatattcgccgagaggatttacagtgtatatgatggtcggacttcagggtacaggtaagaccaccacctgcggcaagcttgcaaactacctcaaaaaagagggcaaaaaaccgatgctctgcgcatgtgacgtgtacagaccggcggcaatagaccagcttgaggttgtaggcagcagcatagatgttcccgtatatgtgaacagggacagcaaaaaacctgaaaaaatcgcaatggaagcggtcaggcaggcagagcttaagggctatgacgtccttatagtcgatacggccggcagactccagatagacgaggagcttatggaagagctcgtaaggatcaaaaaagagattaaacctcacgagatacttctggttcttgacgcacttacaggtcaggatgccgtaaatgcggcagagggcttcaacgataagctgggtgttgacggtatcgttatgaccaagcttgacggtgatgccagaggcggtgcggcgctttcagccaaaaaggttacaggcaagcctattaaattcataggtacaggcgagaaattcgatgcgctggagcctttccaccctgagagaatggcaagcagaatactgggcatgggagatatcgtttccctcgtagagagagcgcaggacgccatagacgaggaaaaagcagccaagctcgaagagcgaattcgaaaaaacgcttttactttagaggacttcttagaccagatgggtcagattaagaatatgggcggcataggcggtatgcttgatatgatgccgggaatatccgccaagcagaaacaggaagtcgacatggaaaaagccgaaaaggaattcgttcagatggaagccattatcctttcaatgaccaaacaggaaagagataacccgtcaatacttaattccagcagaagaaagcgtattgcggcaggcagcggtcagaccgttgcaaaggtaaacagccttatcaagaggtatgaggataccaaaaaaatgatgaagcggtttacgggaggcaaattcaagaggaaaggcgctttcaagggaatgttttagttcaaaaacttaaacagttttagatatattcaaacagttaatatttaggaggaaattataatggtaaagatcagattaaagagaatgggagctcacaagaagcctttttacagaatagttgttgcagattcaagaacacctagagacggcagattcatagaagaaatcggttactacaaccctatgacagagcctaaggaaatcaaaatcgacgaagaagctgcagctaagtggctttcaaacggtgcacagccgacagaaacagtaaagaaattattcaagaactccggaattattaagtaaggaagcggtgagtatataatggttaaactggtagaggtgattgcaaaatcactcgtagagaacccagatgccgttgaagttacagaaaaagccggaaaaaattctacaatggtaattgagcttaaggttgcgccggaggatatgggcaaggttataggcaaacagggtagaattgcaaaagcactgagaagcgttgtaaaggcagcggcaactaaggcgaacaaaaaagtggtcgtggagattgttcagtagacaatatacggcattaagtatggcacatatatcagagaccggtatatgtgcctgtatactatgtggggattattatgaaaaaaataaaaatagggcagattacgggagctgtaggacttaaaggtgaatttaaggtttatgactacggtgaggacgtttcaagatacagaaactttgaagcggtgtatatagacaatacggaatacagacttaaatcagccagaatccagaagaatatggctgtactgctgcttgaggaaatagacagcagagataaagcagagaaactgagaggaaagaacatttatatagacgaggcgcagcttccaaagcttcccgaaggcgtgtactatatcaaagaccttataggatttgacgtggtatcggatgagggagttcatataggtacccttgaggacatattaaaaaacacagcccagcctctttacaaggtaaagacagagaaaggcagtgtatatattccgggtgtggacgaatatatactcaatacggatatcgcaggcagaacaataacagtgaaattaattgaaggacttttagacctatgaaaatagatatacttacgctgtttcccgaaatgtttgtaccggttacgacctcaagcatacttggaagagcagccgaaaaaaaccttatagatatcagactgacagacatcagagaatacacgaagaacaagcatcgcaaggtggacgactatccctttggcggaggacaaggcatggtgatgatgccccagcctatattcgatgctctcagaggcattaaggcggagggcaaaaaaatcctgtatatgtcaccgagaggcagaatccttgacaaggacaaaatacaggagctttcacagctttcagagcttgtgatactgtgcggtcattatgagggcgttgaccagagagttatagactgctgggagatggaggaggtttctatcggagactatatccttacgggaggagagcttcccgcaatggtacttgtagactctgtggcaagacttatacccggagtcctgtcgggagaggactccgcaatggaggagtcggtatattccgggcttttagaatatccccagtatacccagcccagagaatacgaggatataccggtgcctgagattctgctgtcgggtcatcacaaaaacatagatctgtggagatttgaaaaatcacttgagcttaccagaaaagtaagacccgatatgtttgaaaactattgcagagagaggacacaggaacttgacaaagccgaaaaaaagatactccaaaaagttacagatgagaaatagcagacgcatcagccgcttcattgtgaaaggctgatgtttttgtgtaaatattgaattaaaagaattgaaatatacactatattgtagtaaaattacctagaggtatacttatgactaagccaaaaaagaaaaacagatttatttatttatatatacttatagttcttgttctgtgctttgttatctatctgcttccgaagctttcggacacaatgaccaagacagtgattgcagagtacggcaccatggagctttcggatgaggttcagtgttatgcggccagaaacgagaaggtatatacggcaggcagcggcggacagacagagtacctcgttaacgaaggcgagaaggtccgcaagggcactaaggttctcaaggtatccggaggcggcgcgggacagccgggagataaatacacctcgatactggagagactgggcagcggcgccagacagtccgacagctatactaccgcaaccaacggagtaatcagctactatatagacggatatgagagcaccttcacccacaagaagattaaaaaaatgacctttgatcaggttaaggacatacaaaacgattatatggatctgtcccgcaaatcggttcttgccggtgagccggtgtacaagctctacaaaaacgagaaatggtatatggttttctggatagacgaggagtcggcatctgattacgaaaaaggcagatctgttacagttagactcaaggacggcgaggttgaggccgacatcgaaagcgtcactcagcaggagaacaaattcagagtgataattgtaagcaacaggtattacaaatcacttgcaagtttcagaacagagaccgcaacggtcataactcacacatgctccggactggttctgcagaattcctgcattacagaggaagacggacagcagggagtctatgtcagaaacactgccggggaatatgtattcaagccggtgcagatacttctgcagggcaaaaaagaatcggttctgacggcaggacagtattacgataatgacggtaatgcagtatcgaccatagaaatctatgacgaggtgctgagaaatccgtaatataatgaaaggaagtgcgtttaagtgggaagcatcagagaaaacatagacgcggttaacaggattaagggagaagcggctgttaaatccggcaggaaagccgaggacgtgctgctttgcgcggttaccaagacaagaaccgcagatgagattaacgaagccatagatgcaggcattacagacatcggcgaaaacaaagtccaggagataatggacaagttcgacagcgtcaagcctgtcagatggcaccttatagggcatcttcagaccaacaaggttaaatatataattgataaggtttcaatgattcattcagttgactcactgcatctggcacaggaaatcgacaagcgcgccgcgcagcacggcattaccatggatatacttattcaggtaaactccgcgcaggaggagagcaagttcggcatcagcacagatgaaacagagggaatgataagggatatacttgacaaatgtcctaacatcaggatcagaggtcttatgtgcattgcaccgtttgcggaaaatcctgaagatgtgagagtttattttgcccaggtcaaaaaactgtatgacgaatacagcagcatagagcataaaaatctcgattttaaatatttatcgatgggaatgtcccacgattacgaagttgcaattttagaaggatctaatctcatcagagtcggaactgcgatatttggtgaaagagactacagcaaaaaattataggaggataatatgggttttgtagacaagtttaaggatcttgtaggtattgaggattttgatgatgaggaaattactgaagaggaaatcagagaagccgagagcagaatggaaagaagagaaacgcagcctcgcacttcatttgaacctcgcagaagcgaaataaaagaaagtaaggtggttaatatgcagaaaggaactactgtaaacacacatccgtttaagatggttgttttagagccgaaaggatttgaagaagctcctaagcttgtggataatctcaagagcagaaaacctgttatagttaatcttgaaagacttgaatcagacacagcaagaaaaatattcgactttttaagcggcgcaacctatgcgcttaacggcaacgttcagaaagttgcaaacaatatattcgtatttgcacctgagaatgttgacatcaattcaagcgtggagcacaaaggctttgaattcggcagccagctcaagagataaggagcaggaatggtattactgggaaaagcaataataattgtttctaatattctgttcgggcttctggttgtcagagcgctctgctcgtggctcatgggtagcggcaaatcgtgggttcagaccatatacagaatatcggcgggtcttacggagtttctcgtggcgccatgcagaaaaataacatcgaagttcagcggcggtatgtttgactggtcgctgcttttggcatgccttgtcattatgctggcaagagacatactgctgagagtcgtaatgatgctgtcataacagaaaggatatacaatgattacacctgttgacatagaacaaaaagaatttacaagaggtgtcagaggatacaaggaagaggaggtagatactttcctcaaccttataattctcgaaatggaaaacctcatcagaacaaacagagagctctctgacgaaaacagcaagctcaaggaagaacttgccacaagcagaaacacagagagcgaggttttagagaccctcgaaacagccaaaaggcttatgagcgaaatctcggcaagcgccgaaaagcgtgcagaggtgcttctcaaaaatgcggagcttgatgctgatcttatcagacgtgaagcaagagaaacctccgaaagatttatggacgagagtaagagcataagaaccagagtttcggctctcagagagaaatacaaaaaccttcttgaggcggagcttgagagatttgatatgctcagcgccgatattttcacagaggcagacgatatagttaaaagcctgcccgaagaaaaagaaaccctcagaacaggcagagcggcagatacggcagacaagaccgacaaggttgatatctccaaaaccatgattaacattagataagaggagcaggggcgtttttgccccgtattttctatgtatttgattttaataattgcaggaaccgttgcgctcgatcagcttgtcaaacatatggtggcaggttctatgatgctggggcagacaattccggtgataaacaatttttttcatataacctatatacacaatgatggtgcggcatttggaattatggcaggcaaagccatatttctgatagggcttccggcgcttatgatggcgacagggatagttgttcttgccctgtttcgaaaaaagctggacccgctggtgcttatcgctatagctctgattacgggaggcggcacaggcaatctcattgaccgcagcatctacggatatgttatagattttattgacttcaaaatatggaatcccatattcaatatagcggatatagcggtatgtgtcggctgcggcctcattatactctatctgctggttatagacg

SEQ ID NO: 1416 - DNA, 20123 bp, Unknown
  16S sequences of unknown bacteria
cctccctttttttctacttctttttccctcatcccactacctttgacgatgagcgtataaaaaaacggatccggctttttaccggattcgttttttttgcagcagactttgatattttccgccgcgcgcgcatttcttattttttgcgtcgcatttgctgagatttaaaaatggtaatataaagtattttagggatattgcggtgtgttcctcatatattcgtagattcattcacttacaaaacatctctcagcaaagtttaaggctctctactaatgctttcttcttattttgtgcaccgaatattggctttatatttgcgaaaataaaacgcctcaataataactcccttgccatcgttaatgatttcagcatctgcaagctgtagtgcgacagcaatcgccatatacggtatgggtgggcgcgcagttgtcgcaaagtatgaagttagatggcaaattcaataaagacttaacccattttttgctttctactgtttctaacgcactgcgtattaaattattgtatatatcaatgagcccttcgccaaatctcgcaatttaatgcgatagaattattgctatattaacaaaatttaaattcgaaaaaattatgcttgaaatctcataatcacgtattactaccaagtgctttatttgagtggagaaatatacatatgaataaaacaacagtagcaatggcattaatgtcgtttgcttgcgcactctcggcgcaaacagaaattaccgatagttattcgggacaaaactacgaatacgagcagttcaaaggcgctattctaaacgatacagtctccggaaatgattatatattctccggaaacgaaatcagcggaaatacgctaactgccgacgcccagataattggagggttaataaagacaaatggcaaagtttccctaaacgatgtcacaatgagcgacaatatttttaagctttccaacacttccgggacaaccactatgtatatgttaaccgtagatgcgcgggaatacgaaataaacggtggcaaatattccggcaacgaggcttatataaatacgccggcaaacggcactgtttacgggttgtttttaaacgtaatgtacgggcgcacgggaaaagttgacggcgccgaattctcggggaactacgcgcagagcaattatagggttcaaggaggcgcactcaatgtcaattacaatggtgcgatctcaagcttgtatgtttcaaactcgtcattcttaaacaacactgtcgaggcgggcaataaagcgcgcggagccgccgtggaaaactacgctgcctttctcgatatgcgcgattccctaatttcaggaaatgtgtccaaaagccccaatgcggcttatggagccttttacgcgagcaacgaaggcgcggtaagcaacgcaacggatgtcgtattcacaaataattccgccctgcaaaacggctatggtgccgcaatgtatgtagaagcgggcgcagttgcgaatgtaaacgtcactaaagacaccctgtactccggaaattttgctgaagtaaacggcgttaaagacgattcccgcggaggttttctctatatgaaagaaggcgggacggtaaacttcaacatctccgaaggcgcaaccctcacaatcggtgaaagcgtggcgggatacgattccatagccaatcaggacgcgtcggacagcatatctaaaaccggcgcaggcacccttacggtaaactcctccatgcagtattttaccggcacgctaaatgtaaacggcggcactatgaatctcggcaagggagcggtttcatcgtcgtctgtcgcgggagacatcaatgtttcagacggcgcaatattcgacagcaattatggtgacggcgcgcgcaactggcttgttgtaaagaacgggcaaagcgtaaatattgaaggcgaaggctccacttggaagcacagctaccaggcgggaatcaacgaaggcggaaaaatgaatatcggcgcgggctccaccgcagacctcggatatttggcattcggcggaacggcagacatcgacggaactctcgttctcggcaaaaactgggttcaagcccaattgacgtcaaacttaggcggagactacacaagcttgggcggcggcaaaaccgtaatgaacataaatgacggcggcgttgtggaggcatacgccggaatcaatgtcgggcacagggccgacgcctcagtaagcaaggacgccgaactcaatgtaaacgccggcggcctgctcgacataaagggcggcgacttgaacatcagctcgactaactacaacgacaacggaacgagcggcaagggatttgtaaatgtaaacggcggcgaagtaagagttgcccaggctatgaatattggcacaaaagctgacggatatttaaacgcctccaacggcgcgaaagtctctgtaaacgatatcaccctcggtgtgttcgatgaatcgctcgcaaacgacacctccgtatccgcgccttccgcggtattctcggcgaaaaattcgacggttgtcgtatcaaaccacatgaacataggcaagggtggaattttctcgctcgaagactcctcaacgctcactataagcggtgaaaacggcgccggagacataactattcgcaacgtcggcactatggcagtatctggggcaaatacgtctgtcgatatttcaaatacgcagcacaatatatacataaacggcggcggtacgctttcaatttccgatggcgcaaaaatgtccactgcaggaaacctctcgcacggcggcgttcttgatattgacggcggaagccttagcgtatcgaaactcggcaatatcggagagtttgaaaattcggctgtggtgaatgtcaaaaatggaggtgagtttaattccgcacaaagcataaatctcggattttactccaactattcacaggcgaataaaggcggggtaataaatgttctcggcggcacggtcaatgcaaacggcggaatggtaatccgcaacggcagcatcttgaacataaacgagacaggcaaaataaacgctccctctataacaatcgcttccgacggttttatgaatctgactatcggctcggccaaccagataaacgcctcgatagacaattccgggacattctctataacggctggggcgtcgattgcagacggcaattacaatgttgcgacgggttcgatatccggtagcggtaaaatactcgcatacggcggtacatacgcagacaatatattcacggtttccagggcaaccctgatggacattgacgtccccggagaggcaataacagtggctaacaacggcagggtaaacctctcggacaaagattccggcgacgttaaaatagcgatggcgttcaattcagacagcgccactgtaaatgccgtgagcactactacccagacgctgcaagatgcgataggcaccgactttgtcgagatgggctcgtatagcttcgacgtcactatggatagcggcgacactgtcgtattgagctttctcgtaggaaattcatcactgactgccgccgactttacggtgtaccacaagacggaaggcggagaatgggccgcagcagacgatattgaaaaccttgcgtacgatggcgaatacctctcgttcatagtatcgcacttctcggaatacgggtatgcggcagttccagagcccgagacagtggcggcgatattcggcgcgctcgcgcttgcattctgcgctttccgcagaagaaagtagtggtcgtgtaatatacggttgtatttaaaataaaaagccttcgcttttagcggaggctttttttattaaaaacttctattgagcaaatagcgcaagatagattccccgcaatttaattccgaacgaattcccgtataatagcgcagcgctcgaataagtgcgcaaatatacaaaggtcccatatcctacggaaattctaaatcccgaagccagcttgatgagggttagtctcttgaaatagtgtcttaatttggaataggcgaccaatgccggatttaaatgccgtcaggctacttgccgccgcgcccatgcaaataaattcagatacgaatcaaaatatacattttgataaaccgctaagcacggttttgcgcgggaggtttggatactaaaaaacttacttcaaaagtctcacggcgcggctgaggctttttacaaagtagtcaacttcttccgcggtattgtaaaatgcaagcgacgcgcgggtgagcgaaaatttgtcgagcattgtaagaagcggctcggcgcagtggtgccccgtgcgcacggctatgccgtcggcgtcgagcagcgaggctatgtcgttcggatggactccgtctatggcaaacgaaaccaccgcgactttccccttggcattcccaaatatttttaatccctttatttcttcaagtccgcgggtcagcctttcgagaagtgccgactcgtgggcgtgggccgcctgcttgtctattttcgccatatagtctatcgccgcgccaaacccgattgctccggcgatatttggagttcccgcctcgaacctctcgggtgcgggccggaaggtcgtgcgttcccacgatacgttttctatcatgtccccgcccccctgatagggcggcatggagtccaaaagctcgcggcggcctatgagcgtcccgatgccggttggcccgaagcatttgtgcccggacagggatatgaaatcgcatttgactgcggaaaggtcgtcgagcatatgcggcgcggactgggccgcgtcgattgaaaataccgagccgtttttgcgcgcaagctctccaatcgcggcgatatcgtttactgtcccgagcacgtttgaagcgtgggcgacggatacgatttttgtcttggggttgagcttgttttggaagtcgcgcatatcgagcgagccgtcttcaagaatgtctgccgcgacgagctttgcgccggtgatttccgccgttatctgccatgggacgatattggcgtggtgctccatttttgtgacgagtatttcgtcgccgcttttaagatttgcgcgcccccatgagctcgcaacgaggtttagggactctgtcgccccgcgtgtgaacactgcgcaatagtctttcggggcgttgaaaaatttttcgattttttcgcgggcgccttcgtatccgcgcgttgccctgcctgcgagttcatgggctgagcggtggatattggcgttgtcgcgcgagtaaaatctgcatacggcgtctattacgcactgcggcttttgcgctgtcgccgcgttgtcgaagtaaacgagttttctcccggagtcgagcgtttgcgacagcgccggaaagtcacgcctgattttttctacgtcaaaatccattattttaagtatcggctttcaaattcggtaatacaacaaaaagttgaattaaaatttatagggcgttttttcccctgcgcaaaaaatgggtcggctacccgcgggcgcccttgccggcacgcttattggagaatcttgcccatgcgattatggcaatcccgcaaataacgcatatgcaagagtaaaacgtcccgcggctcagtcccaatatcggctccacgcctacgtcgggctcgcggaaaatctcgcacactatccttattatgccgtatagcagaagaaattctccggacagctgcccccgcgggagattcccgcgccagaatctgtactgcaaaaacaggaaaaggaacaagccctctccaaacgcttcgtagagttgcgacgggtgccgtggcgctatttgttcaagcggcgttccgggcggagcagaatggggaaatatcattgcccattttgcttcggaaatctttccccacaattcgccgtttataaagtttgcaatcctaccgagaaaaatcccgggtgtgcatattgtcactattatgtcggagagcgtccagaagcccactttgcgcgcaaagcagtacgccattattgcggcaactaccccgatgaatccgccgtggcttgccatgccccctttccatatgtaaaaaacggtgagaggattttcgcaaaatccggcgaagtcgtaaaacagcatatacccgagccttccgccgattatcaccccgaacagcaggtatgttatgaatgtggaattgtcgtctttgctcagcgggcttttgccgcgcgacgtatagaggtttaggagcagatacgctatcacaaagcccgcaagatatgcgagcccgtaccaacgtatcccctctacgaaaaacgactcaggaaatcttaccgcgaacggatcgaaatcgactatgtaatgtccctgcgtattcaattgcttcccaaaattaagttgaagtatttttttttgcccctaaatttagaagcgaaatttttatatggcaatgaaagaattcgacattaaagaactcgtcgagtcacgcaggggcgaaaactacaagctgcacgacctatatatgaatagaaccctgtccacggttctaaaaaccataggcttcgacaaatgctacacccgcgcgaagggcgcgtatctgtacgacgccgacggcaacgaatatctcgattttataaccggatacggcgtctatggcatgggcagaaaccacccggtaatcgccaaggcgataaaggacgccatagacatggacttgcccaatatggtccagctcgactgcgccctgcttagcgggctgcttgctgagcgcctcgtaaagcttttgaacaacaggctaacggcgtgctttttctgcaactcgggaaccgaggcaaacgaaggcgcgataaagttcgcacgcgcccacacaaaaaaatcgaggatactgtcgatgagcggcggctaccacgggctgacttacggatcgctctctataaccgcaaccgcccatttccacgacgggtacggaccgtttttgccgggggcggaggtcgtaaatttcaacgacctcgaagacctcgaaaataaattgaagcagggcgacgtcgccgcgttcatcgccgagcccgtcgaaggccacggcgtgtacattccgtccgccgaatttttcccgaaggcgcaggagctttgcagaaagtacggcgcgctatttataatggacgaagtccagacggggctcggccgcacaggcaagtggttcgcattccagcactggaatctcgaccctgacatagtcacggtggcgaaggcgctgagcggcggatacgtcccgtgcgcggcgtttgtcaccacgcgcgaaatccaccagagcactttttcgtcgctcgaaaggtgcgtagtgcactcgaccacttttgggcgaaacaacctcgccatggtctgcgggctcgcctccatcgacgtgatagagaaggagggaatggtcgaaaattgcgcgaaaatgggcgcgaagcttctcgagcgtctcaacgcccttaaagaaaagcactcttacataaaggaggtcagggggcttgggcttatgattgctatagaatttcaggagccgaagggaattttgcagaaggcggcatggcgcgcgctcaacgcggcaaacaaatccctgtttacccagatgattgtcaccgccttaatggataaccacaggattataacccaagtcacttgccacgaagtccacgccgttaaaattcttcctccttttataatcaccgacgccgaaatcgacaagttcatcgacgccttcgacaaagttctgtccgaggccgcaaatccgacgggtgcgctttggaaattcggcaagcgcctaatcgccgcgagcatatccgacaagtcctcaaaatgataccgtacgaaaagtttgccgacaactgcgcgcgcctgcaagagcgggtcgcaaaggctgcggagtcttgcgggagaaaggcgtcggaagtaaaaatactgcccgtgactaaattccatcctttgcaggcggtcgagtttgcatgcaaatacggattcgccgctgtcggcgaaaaccgagtccaggaggctgcggaaaaaattgccgcggcaaactttgagatgtcatgggagctgatagggcatttgcagtcaaacaaggcgggaaccgccgtaaagattttcgacagaatacagagtgtggacactatcgagatactcgataaaatcgacgcgcgcgcagcccttctcgggaaggtacagagggtgctgttgcaagtgaattccggagccgaccccgccaagttcggggcggacatggaggatgccccgcgcctgttggagcgcgctcttgggcttaaaaacatattggtggaggggctgatggcaatcgcgccgctcgacccaacattgaagtccgccaaaatctgcttcgacaatctgtacaatttgcgcgagtcattgcaggagaaattttcgcacccgcttcccgagctttcaatgggaatgagcgacgaccttgagctcgcagttgaggcgggctccaccatgataagggtcgggacttttcttttcggggagagggagaaatgatttatagaatcgaagacgtcgatgtggggagattcgccggcaggacagcggattcaaagccgccgttttttgccgtgttgggaaagccgataggccattccctcagcccggttatgcaaaatgcggctctttcagagattgcgaagtccgacccatcttacataggggcggagtatttcgcttttgaagtagcgcccgaaaatctcaaagaggctctagatgccttgtacggcaaaaattttgccggcgtgaatctcactattccgcacaaggaaattgcgatgtcgatagtcggcgacttcgacccatacgcggcgaaggtcggcgcgtgcaacacgcttttgaaaactccgcgcggctggaaggggtacaataccgacggattcggcttggagaccgcaatcaaaaaggcgttcgggcgcgagatgaaaggctcgaatgtagttgtaatcggcgcggggggcgcagcgcgcgcggcggcattccacgcgcttttcgcaggttgcaaaagcctttcgttggtgaacagaagccttcagaggctcgataagctctcttccgacatccgcgccgcagggtttgactgccaagcgcgccttgcgtcggaaaatctcgatataccggattcgcctataataataaacgcaacttctctcgggctgaaagagggcgacccgccgtgcgccgacttctccgcctatccgaaggattccgtattcttcgatatgccctatgcgaaaggccgcgaaacttcgtcggtcgccgccgcaaaaaaatgcggaattgccgcgtgcggagggctaacgatgctcgcctggcagggggctaagtcgctctcgatatggactggcaagccgcttcttggcgacattatgctcgaaacgctcgccgcacaaaaatgaacagcgtacttcaaataaattcacaattcccgttctttttcccgacggttttcttcctattcggcgcgtgtgtgggcagcttcctaaacgtctgcattttcagaatacccgcaggcaagtcgatagtgaggccgccttcgcattgcgcatgcggaaagccgattgcttggcacgacaacattccgattctcgggtggattctcctaaggggaagggcgaggtgctgtgggcgcagaatatctttccgctatccgcttgtcgagacgctgactgctgccgtgttttgcgcggcgtgggtctgccttccgccggtacaggcgcttgtcggaatggtgtttctttcgatactcatattttgctcgttcgtggacatagacacaatgatgctcccggattttgcgactatcggcggggcggcgctcgggttggcaatttcggctgtgcttccggacgtgcattccgcgcggattgaaggagcgccgtttctcgcgtcggcggtggcgtcgtgcgtggcgtcggtttgcggaattgcggtggggtccggaatactttattggctaaggcttgcgggagaggtcgctttcggccgcgaggctatgggcgagggcgacgttattctcgtgggaatgattggcgcgttttgcggctggcagggcgcggtgttcgcgatatttgcgggctcgctaattggagcgcttgttatgcttcctgtgctcgcgtttagggcgctttgggaaaaatcgaaaaactccgggaaaaaatccggaaaagcggaacctaagggtagcccagaaagcggcggcgaagcttgcgaagccggctgcggcgagataccgtacgggccgtggctcgcgctcggcggggggctttactatttatttttctcgcgggcggtggacgaatatttcgcggcggttgcaaatatgcttttcggataatggcggacgaaaacatagaggcgtttatggtggcaatcggcgaacagcgccgatactccaaatatactatacgcaattatagcgagtcgctaaaagagtggataggctggctcgggaattgcgaattttccgacggcgactatctttcggcggacaagcgcctggcgagaatgtatgtggcggagctgtcgtcgaagttggagcccgcgactgtgcgaaacaaaatttcagctatccgctcattctacaaatttttaatacgcacccacagtgccgaacgcgacccgtttgaactcgtaaagctcccgaaaatgaaaaaggagcttcccgtatgcttgaacgaggggcagacggcgtcgctgctccaaatgccgtggacgctcgagcggtcggggaagatagacaagttcagggcgctgcgggattctctcgctctcgaactcctgtacggcgcaggaatgcgaataagcgagctttgcgcgcttaggtggaaggacatcgacactcgcagaaacgtagcaaccgtattggggaagggcggtaagacccgcttttgcccgtacggagagtcggccggcaagctgcttgccgcgtggagggaaagcgggaactcaccgcatgagcccgacgcccagattttgaggacggctaagggagagcctatttacccgaggctaatacagcgggagcttaaaatatatttgcaatttgccgggcttccaatgtcgataacgccccacaagctgcgccacagctttgcgacgcatctcgtgaatgccgacgccgatttgcggagcgttcaggaaatgctcgggcattcgagcctttcgaccacccagatatacacgcatttgaatattaggaaaatggcggaggtctatcgaaacgcccatccgcgcgcgcgaaaataacgcgcggcgcctgctttttctttttcgtaaacaaaagttctttgtgcgctgacgcttgaaagcggcaattttatagcgcgctttgcaatcgtttaaaaagcgtattttaaaaataggtacgcgaatttaatcgaactctttgcataaaaatattttgcggcggtggattttttttcgggttttgctgagcctatgtttcttagtttaaaaaactgattttatttcttcttaaagcttatagaaaagctctccgaaattcggcggtgcaaaaatcccgagcacaaaactgaaatacgcactcgccaattattccgcgcaaaaaaaatcccagagaatacactccgggattttttgcgtttaaaataaaactcttacaggggctgcactgtgacgtcttttgattcgccgtcgattgtaatgcgcagcttttccggggaaattttgccctttggagcttccgcctttatcttgtcctccggctttttaagctcaaaagccgaacgcggctttttgtagaggtcttcaagctgctgcgggaacatggcgtagattacgcaatgttcgtcgtcgtcctttattcccttttcgcgcagagccttgcggagatcctccattccgggctttttgaggtccgccgggcggcaatcgatgggatctttctttgacttttcctgcgcgagcttgcggacttccggatcgaccggcgcgggagtgcgcccatagtagccgagagcgatgtccatagcttgcggcgtaaacatcttccacctgccgaattttacgttcatcatcgcctgcgttcccacaatctgggaggtgggagtgacgagcggtatccagccgagcttttcgcgcacatacggcacttccgcaaaaacttcgtcgaatttgtcctccatattctgctcttttagctgcacgcggaagttggagagcatgccgccgggaacttggtatatgagagcgtcggtatcgattacttcgtttttaattgcggtatagaagccgagtttctcatatacgccctggaagtatttccttaattcggcaagcttttcaaggtcgtagtcgggcttgcgcggattgttttcgagcatggcgagcattctcgcggtgtcgggctggccggtgccgttggcgaaaggcgagattgacgtatcgacgcagtcaacgcccgcgtctattgccatgcagtaggtcggcgcgcccatgccagcggtctcgtgcgtgtgcaatatcaccggaatttttatgttggccttcaagcccttgactatttccgccgcaacgtacggggcgataagccccgccatgtcttttagaactacggcagagcagcccatttcttcaagctcacagcccatgcgcacgaagctttcgaccgtatgcacggggcttcgcgtatagcatattgtgccgtgggcctctttgccggctttctttgcggcgtttatggagcactccatgttgcgggtgtcgtttagagcgtcgaaaatcctaaatatgtccatgccgtgcttggcggaagttcgcacaaacgcctctacgacatcgtccggaaagtgcgagtacgcaactatgttctgccctctaaaaagcatcatatgcttggttttcgggcaggcttttttcagagcgtcgagcctgtcgaagggaaattctcccaaaaagcgcaggccggcgtctatcgtggcgccgccccatgtttcgagggcgttgaagcctatgctgtcgagtatcgggcacgccggaagcatcattgaagtgggcatgcgcgttgcggcgagcgactggtgcccgtcgcgcagtactgtgttgttgaaaactacgggttttgatgttgccatatttctttgtccttctattcctccgacaccccgcatggaggttgcgacgtaattttttaaagtcccgcccgcatgacaaagcttgcaaaagtttaaaaaactaccatcggttgtatcggataaatttatattgtgtaaagtaggattgaatttgtccgcaatttcaagaaaatttttgtaaatgagagtctatcttagaacgtacggctgccagatgaacgagcgcgattccgaccatatcgcggccgattttgcggagcgcggctgggaattggcagattcccccgattgcgccgacgcgatagtagtcaatacatgttccgtgcgcgaacaggctgaattaaaggcgatagggcttatcggcaggcttatatcaaaccgcttggcaaacccgcgcggaggcttcccgattatcggagtgactggctgcatggcgcagaacctcggcaagaaaatagtctccaaattccctgaaatagattttgtcgccggaacttacaagacagcctcagttcccgacatcgtcgaggaaatcgccaaaaaaaggcttgcggggcaatcccaccccaaaatgccggaaactatgggcaggcgcactgcaaaatattcggcggcggcggtggatacgtccgtggatatggaggactttaagagaatcgacaagcatcttgaagcccctgcgagcgaatttgtgtccgtaatgcagggctgccagatgaactgctcctactgcatagttccgaaggtaaggggcgcgcagcgctcgcgcccggcggaggatattataagggaaatcaaggcgctcgccgaaaggggcaccaaagaaataacgctgctcggacaggttgtgaacgcctacgggcgggagttcccccagacgggaggcgttccgaatttcgtgcggcttttgagggatataaacgacatcgacggaattgaacgcataaggtttacgtctccgcacccggcgtatttttcggaggcgctgacggattcgtacgggtctctcgaaaagctttgcgagtacgtccatttgccgctgcaatcgggcagcgacgaaattttgaaaaaaatgaacaggccgtacagaatagacggctttttgaaaatagtggacaggctccgcaagagggcggggaatatttcaatatccaccgacataatagtcggctacccgaccgagacagtcgaggatttcgagcttacccgaaaagtatttaaggaggcggcgtttgacatggcgttcatatttaaatacagcccgagggcgggcactaaaagcgcgctgatgcaagacgacgttcccgagagcgaaaaggagcgcagaaattccgaattgctttccgagctggaaaaaacttcgcgggcgtacaacgactcttttgtgggcaaagttgaggaagttctcgtggagggcgccgcccgcaggggggaaaatatgctcatggggcgcacgcgcacgcacaggaaggccgtatttaaaggctcgccggatttggtcgggaaacttgtggacgtaaagataaatgcggccacaacaaccgcgcttgaagccgagatagtaaagtagcgtgagtttatccatattgggctttatttttcggcggcaaaaaacagccttcgcgaaagttctgtgttcgcaatgcgccgcataatagcttcggacaatagtttgcctgggatattttttttgagccccgccgagccttttatatttgtcccaaattttagatttcccgcccgttaaaactggcgggattgcgtttttttcacgccttttcccgactgcaacttaactgtatatatttaaaaagattgtcttgttctttccgaattgtatatcttttttttcgtaaaaaatttctacaaaacgcaaggggacaaatatgaatgttttttttaaaagcctgccgttggttgcgtcgcttattgcggctgaaatagccgccgcggaaactataaagcctgacgatttcaggaatttatacggaatagtatggaccggaacacccagccaaaatcttgaatacgcctgccaaatgggctacacccatgtgttctaccaggccggcatggagaaaaacccaaagtcaaaaggcttaaagttttttatagagtcgcccgaatattccgtatatccccgcctaatcgacactgaaaagacatattccccggagcagataaaatggtgggagacccactgctcgttaatcagtctcgaaaaacccttcccgtggaatatagcccctggctggagaatcggaaaaaagtttacggcgactttggatcttcagcagaagtccgtaataaaggaaactgtcgcaaaaatagtggacagggtaaagcgtatagaggcgaaaaaccccgacttcaaatttgccggattcgcctgggacgttccacagcccccgggagatttctgggacggcagcaaggacgattggttcgccaacggctcccaagtgactctcagcaggtggacaggcaaggattcgggtatcaagcacccggacgttgtgcacgactacccgacgtattcgcaggggcatatggaattttacagatacctatttgagcaagtccgcgaaaaaatcaataaagacgcaaaatttatagtggagccgagcgccccctacaagcagtgggttcaatatttcgagtgcccgccgtacgataaaatggcgcccgaagagagaaaaaagtacgaggccgacctcatcgcagtggagggcgcgacaacgggattcgtgacggacgaacgcctttttgcaaaaggaaccgtaaagccttcgcaaatgtgctccaccacccccaatgcctacgaggagccgatatcgcgcaagatagcggcgctcgcggcaaagaacggggcgtggacggcgtttttcggcatggctgacggcaacgggcacactccgggtttaaagacaataacccagattccggcgcgcttgaaacttgtaaaggcaatcccagtgtgggaaaacctgctgaacattcccctcgaacagagaaagtgggacggagagaggtacgagagccccacggcgcaaatctcgcccgacgcctattcggggcttcagccaaagaccgacaagctgttcttcgtatttttgtcaatggacggcaaggtgaaaataccggaagggtacgaaccggggcctgtgtatcttacaaacgaattgtttaaagaggtaaggccgctgtataagaatccgaatacggcttatagaaaaaccctgcaagacggccggacaatgaaaatagaaaattcgacaatatcgccgaccgcctcatacatcataaacaccggatacattatgcatctaaaaaagaaggcggaaaaataaaagagcggaaagtataggaatatgttgacattgcgccaatcgtctaaaaaaatattccgatatttttatataaatgaaaaactttccgccaaccgacggttccgacgactcccaaaatgaagaaataatatacgaggaagtggtcggagggccgtttccaccgaaaggaggccgaaccccccctatgggcagattcgcgccgccgccttttggcggatatgtaatcgaagaggagattatcgaggaaatagaggaagatccgactgagagcggggattctgaaaatgcaaaacagcaagaaacctctgtttcggaaccgaaagtaagcgccgaaaaagccaatgcgccgaaagagcgccccgcgccaccaagggccgcgccgaagccaaagccgtacaaggctttcaatgccgcggttaagccagccccgaaaaatgattacgacaaaatacaccgcgagaaaaaaacttcaaaatttattctgccgttggttgcgctcctaatcgttgcaggccttggcgggggaatatattattcatttaaagacagcgtatattttgcgtcgatatttgcgccggaagacggaaaggctgcccaaaaacctgttaaaaacggcgcgctgacgctccatttcttgtcgggagacatagataaagttgcgggggctttttactccaagctttccaaccccattacgcttgaaaatttgcgcgatataatagtgacaggctcgataaatttttccgacggagagcctccaaagaatttctactgcataaaaaggtacgattccggggcgtttatcaaagtgggctccggaaaggacgaaaaaacctaccacgtcgcaaaagacaataccgtatatctgcttgaagagggaagaatgggcggcaagaagacgcagcttgaatccgacaaggcggcgttgcttcgcgcgctcaccgaatgggacgatatattgttccagtcggcattcgcattggaccaatacgacaagcgcgggaaacctaagctggactacctcggcgagcgcgattttgacggcaagaaaatggaaacgatagtggcttcctacggcggctccgacaagactacgttctacttcgacaaagattccggaatgttaaaaggcatagctttcccgctcggctcggaggaaatgagaatttccatgggagactacggagacgcggacggggtgtaccgattcccgacgtcgcggaaaatatatttgggagacaagaagatagcagagcttaatacatcgtttgtttcggtaaacaggggcttgttcttcccgatgtagggtcgccaatagcgtaaaaaatgcgtttgagcgaattttaaattgcataagattgaataattttagaggctgcacaaatggaaggtattccgccaatagaaccgtttttaatccgtcttgaaactctcgccaaaaaaatgggcgagccagatttttacaacgaccagcgcgaagctacggcagtctcgcgcgagcaccagcacttgtcgaaattgcgggactcttacaagaatctggaacacacaatcgagcagatagaggaaaaccgcaagataatcgacgagaatgcggatccggagcttgtggagcttgccaaggaggacatagacgcgcttacggcatcgatagagccgctcaaaaacgagattttaagaatgatgataccgccggacccgacggattcgcgcaatacggtggtggaaataagggctggaaccggcggcgacgaggcctctttgtttgcggcggacttgtacagaatgtattgcaggtatgccgattccaaagggtggaaggtggagaacctaagctcgagcgaatctccggcgggaggatttaaggaaatatgctttctgctttcgggcgaggacgtttaccgctctatgaaatacgagagcggcacgcacagagtgcagcgcgtgcctgtcaccgaggcgagcggccgtatccatacttccgcggcgacagtcgcagtgctgcccgaagccgaggaggtcgatatacaaatacctccgcaggacatagaaatttcgatagcccgcgcgagcggtcccggcggccagggcgtcaatacgacggactccgccgtgcagatattgcacaagccaacgggaatgatagtcaaatgcgcggacgagcgttcgcagcttaaaaacaagacgaaggcgctgaaagtattgcgctcgcgcctcttggaaataaagcagaagcaggagcacgaaaagtacgcccaaagccgccgccaacagataggctcaggcgacaggtcggagcgcataaggacgtacaattatccgcaaagcagaattaccgaccacagaatagggctgacgatacattccctgccgcagttcatggacggcgacatagaggagatgatacgcgccctcgaagacgccgactacactcagaggataaaggaactcatagtggccgacgaaaagcaggcggctgtctgagatgtttgaagtgcagagcgtaatagaaatactgtcaaagacggaggaattttttagaaggcacggagtcccttcgccgaagttggacgcgcagttgcttcttgcgcatgcgttgggatgcaagcgtctggaattgtttcttcgctacgacgagccggtagtgggggaggcgctcgaaaaaatgcgcgactttgcgaggcggcgcggccggcgcgagccccttcaacatataatagggtttcaggatttctttggagtccggataaaatgcgacggacgcgcgctgataccgcgccctgaaacggaggaactttgcgaaatattgacggaaaaatactttccggataaatcggcccagcttggaatactcgatatgggcaccgggagcggagcgatagcagttgctcttgcaaagcattatccgaatgcgagagtttccgcttccgacgccagcgcaaaggcgttgtctctcgcgtcggaaaacgcgcaggggaacggggtaaagataaattttatagagtcggactggtttgaaaatgtaggcggcagttatgatttgatagtttccaatccgccgtatttgacggaggaggaagtggcctcggcggagcctgaagtgagggagtacgaccccatggaggcgctcgtgtctggcgacggcgggcttgccgacataaaaaaaatacttgcgcaggcggcagggcatttgagcgggggcggagtgctcgcgcttgaatgcgggctcgggcaggcggagaaggcggcggcatcttttgcggacttcgggtttgcgggggctgagacattcaaggacgcctcaaagcgggtccgctttgcaattttccgcgcgcgggggtagagcggttttcatttgcgcaggcggggcgcgcagggttgagacggcgcaaaagaaatttttttatttgtgacagttttaataaaagagcggcgcatgcgaaaaaaagcttgcaatatgtttttcgtttttttctaataaaacttctttttagggcgtggtagccaagtggtaaggcatggctctgcaaaagcttgaccgtcggttcgattccgacccacgcctctttttttaccgcaattttaaagagattgcggcttttttgtgttctaagagaaaaagggtcaacaccaaaggttgtgcgctcttcgtcaaactcagtgggatgaggaagaaagaggggataagagaagaagg

SEQ ID NO: 1417 - DNA, 2688 bp, Unknown
  16S sequences of unknown bacteria
gatgtcatctctgtcccagccgaaattgagcagcttgcctattcctgcatgaggcactccgtcagacattacgattataacgtcctgatcctcaagctcaagctctgatttgtatatttttttgccgcagacagcaagctcctccctgtccatcacccatgggtatccgtttctgaaaaacatacactcgggactgtcaaattcaaacatgaagcctctgccctcgttgtttaagtgtattactgaaaaggtggaatatgccacgcctctgaccttgcacaccggcagagtctctattattgtttcaacgcagtcatcaagaggtatgttttctgataccatggtgcttagtatagtagaggtaagggttgcaagtatgttggctttaacgccgcttcccataccgtcggcaagtaccagcgtggtatatccgtcttttctgactaccgaaaccatatcgccgcacagctcctcgccttttttgttgaatgaagtatatccgtattcaagaaacagactcattactgttcgtcctcctcatctatcagaagaatttctttgagcttcataagagctattttgctttctgctgtggtttcaccaagaagcgatgctatttcctgagctgttctcatctgttttttgataactgcatctgccgctgcaatggtttcgtctgtcagcttgtcaagcttctcattgtagtgaacctcttctgtaatatctttcatggttgcaaatatcatattgtggtctttcatatgatttaatgagaactcaacatatgagtctgtggcaggtatcagaagttcctccagcttgagatttcttttttcggccagcgcctctatgatatcagggtcgttacccgtaagatcgattatggaatcggctttctctctgaactgctctatgcccagaagctgacttgccttgtcgttgatatccacaactctgaaattgctgtctataaccactatgccgttagggctgttttcgattatctctcccgacagattttctgctctttctctcatatacggcagacacatttcaacatctgcgtagccgtttgcaactgcccatgccttttctctgcagcttgaatatccgcaggctccgcagtcaagctcatcctccggagtatatttgtcggtttcctcgaggatttttctgatttcctcttcggagggctgtctgtcattggtgctgatcctgctgtgctcacagaatacagacacgttttcatctttttcgggcagcagctcgccccagctgttttcggctgtatatttgcggactctcgcatttgagattatggagctgtcctctctgtttaatgtgcatggaccgttaacgcatgccccctgacaggtgttaagctctacaaaaatgccttcgagtctgtcgatttcctcaagtacctctctgcatcttgaggctccgtcaactgctatgtattcataatccgcagatggatttttgagtgtttttattacacctgtgcttacaggaaatactcttgctctgttccagtactgattctccgcctctttagtatcctccggctgtatatcaagctcctcaaacagctctgcaagctcctcgaaagtaagcactccgtcaaacagtcccgactctctgcattcttttttcttggcaatgcagggtcctataaacactatgctgcatcccgggttttcttcctttagtattctggcgtgaaccaccgccggtgattcaacaggcgcaagatatttgagcgcgtcctgatagtaaagcgatattgctctgtttactgagggacagcacgaggttataaaattcttgtatctgccctgcgccagcagcctttcatattcatcagccaccgctctggcgcctcttgcggtttcctccgcatcataaaatcctgcctgtttgagtgcgtttctcatcgcagaaaaccccggcacattaaagttggatataaatgacggagccacgctcgctattacctttttggctctgacgagagcctttatttcacttaattcactgtgcacctctttggcattctgcggacagacaagggtgcatttgccgcagagtatgcatcttgtttcgattattttggcctgattgttaactattctgattgccttgacaggacattctttcaggcatttgtagcagtttttgcatctggcgctcttaaaatcaagatatgttgtcatcactaaacctcatatattccgtacataaaaacaacttgtatcagctaatcaaaatctataatctgaagtccgtttaatttacacagggtatttactacggcaaatattatcaccgctccgaggtttgcagttgtattatcctggtcaaatctcggcgatatctcacatatatcaaaccctcttatctttttggttctgagtatatgcttgataacaggcatcacaacctcagggtcaagaccaaaggactgggttgcgcttactcccggcgcaaacgccgatgaaaacacatctgtgcatatggtgatgtatgcattattgcatttgtaaagaaaagagtcaatcttttctataaggtccgcatatgatgccgtcgtaatatcctttgccagcacataatccacgcccagttcatctgccgttttgaaaaggcttacggtattgctgtgctgctgtattcccagaggcatat

SEQ ID NO: 1418 - DNA, 1753 bp, Unknown
  16S sequences of unknown bacteria
gccgaccgatccttctgtgccgaccgatccgaccgagccgaccgatccgaccaccacaggtgaagagcccactccgacaacgacggcaaaagaccccgacacttctgacggaagcgctatgggtatgttcgcgttcatcgctcttgcaatcgcttcgcttgcttgcgcagtagttgttatcgttagaagaaaaagagcgtaagattcactaaccttttgaaaaagtattaactatttaaatagttaggctctgtaaagggctacggtgcagttcttttttagagagcatcgtagccctttatctcaataacaggcagataatttcaattgaaatgaagcgtagaaccgttccctctcgtttcccccaaaaacaaacagcaaaagctgtatttttacaaaggaggcacaacaatgaagagatttattgcaggaatcatgactgtggcaatggccgcgacaatgactgcttttgcattttcttcaagcgccgcaaatgacgaggtcagaggcgttattcccagaacaaaagttgacgtgactcttgacgcaaaagacgatgaagacttttgggcaaacgcgtactatgaagaactgaatgaagaaaacgcattcataaaagaaactcagatggaagaagagccgacaacggatcttccctccctcaaaatcaagatggcttattacagcgaaatagctgagggaaccgatcccgcgaccatgcgttattctaaggataccaatggtggtattcttgtttatatggaagtcatcgataagcacaaggcatttactttcggaaatacaaaatatgacgagctcggaaacgaagtatttgacggatacccgtccgcaaatgcaaccgactgtgttcagcttgcgtttgacccccttgacaaaaacggcacgtccggcggagctgacggttccgtaattttctcgtttgttccctattcgatagttgctcccgaaggaaaagcatcgtctcccggcgtaggaacgatagccggcggcagaggctggtggtggcagcactggggcggcggctttggctacggtgataacagcagcgaccttctcagaaaggccgttgaaatgaaagccaacacagattatgttttcgatcccgcgcatcagcttcccggtgatgacgttaaagttcccatattgagagtcaattacatcagacaggcatatcagtatgcatccattgaaggttatcagatcgaagcaaaaatccactggaatgtatttgatatcgaaggagaaatgggaatcaaaccctatgcaggcagacagttcggccttatgatttctcttgtagactacatgtttgacgatttcaacatttccccgagcgagagcgcagcagtagaagccgcgcagcacgtttacagagtttacctcaacggcggcgatgaagatgagggctggctttcggtagataatccgagcacctatgcaacatacgctctcggcggtttcataaacgataatccgcagccggcaatcgtatacggagacgctaacggcgacggctcggttgacatttccgacgctatgatgattttctatcacgttgcgaagaaagaaatgatgaccgacgcagatcaacttaaacgctgcgacgttgacaagaacggcgacgtagatatctccgacgctatgcgtgttttctactttgtagcgaaaaagattgacagcgttgaaacagacaactctgcaagctaaacaagatataaatacatattaagta

SEQ ID NO: 1419 - DNA, 10729 bp, Unknown
  16S sequences of unknown bacteria
ctgccgctttctgatgtattccaggcaggagaaggaagaactgcgcccctatggcagctttgtggatctggacacgctgctttccggcagcgatgtggtgacgcttcatctgacgctgaatgcgcagaccagacacatcatcggcgcgccgcagctgcagaggatgaagcgggatgccatcctggtgaatacggctcgcggcgggctcatcgacacacaggcgctcatccaggcgctgcgccggcagcagatcggcggggccgcgctcgatgtgctcgagcaggagagcggctggtattatcatgactgttcggcgatcccgctcgcttttcctgagctggaggagctggagcgctttgacaatgtgatcctcaccccgcatctggcgtggctcagtgaggaggcgacggcagagatggtctatcgttccatggaaagctgccggcggtttatgaacggaggagaaatcaaatgaagcttatctcatggaatgtcaacgggctgagagcttgcatcaataaagggttttatgattattttcaagccagcggcgcggatatcttctgtctgcaggagacgaagatgcagccagggcaggcggagatcgtcagcgaaggctatcatcagtatatgaacagcgccgtgcgcaaaggatacagcgggaccatggtgttcacccgcaaggaaccgctgtcggtcacgttcggactgggcatcgaggagcacgatcaggaggggcgtgtgatcacttgtgaatatgaggacttttacctggtgacctgctatacgcccaactccaaggacggactggcgcggcttgactaccgcatggtgtgggaggatgacttccgcgcctatctgcacaagctggatgcgcagaaaccggtcatcctgtgcggcgacctgaatgtggccaaggaggagatcgacctcaagaatccgaagacgaaccggcggaatgccggctttaccgatgaggagcgggagaagatgcgcacgctgctcgccagcggctttacggatacgttccgttatctgtatccggatcgggaaggggcgtattcctggtggagctatcgcttcaacgcgcgcaagaacaacgcagggtggcgcatcgattatttcatcgtgtctgaccggctgagggagcacatcgtggatgcgaagatccacacggagatctatggcagcgatcattgtccggtcgagctggacatcgcatggtgaggcgcgcccatgatcgcgtttgtcagaggaacgatcttcagcctgagcgccgactcgctgatcgttgataatcatggcatcggctatcgcatctttacgccgcagacgcacaagttccgcatcggcagcgaagtgacgctctacacttatcagcaagtgcgtgaagatgggatctcattgttcggctttgagtcgatggaaggatatgagatattcctgcgcctgatctcggtcaagggcgtgggggccaagacggcattggccatgctggggacatgtacgcctgagcggatgatcgaagcgatcgagaataatgatgtgaagctgctcaagagccttccgggcatcggtgccaagacggcgcagcagatcgtgctcgatctgaagggcaagctggtggaagaagtccaggagagcaaagccgaggaaaatcaggaactcaatgatgcgatggatgcgctgcgtgcgctgggctatcgcggcggggagctgactgccctgcgccgcgagctggcaaagctggagccggtgagcacagatgcatatatccgcaaggcgctgggcatcatggcaaagaaaagcggggtatgatcaatggaacgaatggtatcagcggaaaaagaaccgatggatgaaggtgagatctcgcttcgtccctcgacgctgagcgaatacatcgggcaaaagcagctcaaggaaaacctgcgcgtcttcatcgacgcggcgcgggcgcgcaacgaggcgctcgaccatgtgctgctttatggaccgccggggctgggaaagacgacgctttcctatatcctggccaatgagatgggcggcaagctcaagacgacgagcggcccatccatcgaaaaaagcggcgatctggccgctgtgctgtctacgctggaagcaggggatgtgctgttcatcgacgagatccaccggctcccccgtcaggtggaggaggtgctgtatccggcgatggaggattactgcatcgatatcgtggtcggcaaggacagcgcgacggtgcgcagcatccgtctggatctgccgcccttcacgctggtgggcgccaccacgcgcgcgggcgatctcagcgcgccgctcagagaccgcttcggcatcatctcgcagctggagtattacgcgctggatgagctggaggcgatcatccgccgcactgcaagggtgatggatacgcagatccacgaggatgccgtgcatgagatcgcgctgcgttcgcgcggcacgccgcgcatcgccaaccggctgtttcgccgggtgcgggattttgcgcaggtgctcaacgacggcgtcatctctaaagcggtggcagccgatgcactggaccgtctgcgggtcgattcgctgggattagacagcgtcgatcacaaatacatccgcggcatcatcgagcgcttccgcggcggaccggtcgggctggatgccatcgccagctccatcggcgaagagagcatgacgctggaagacgtctacgagccgtatctgctgcagatcggcttcatcaaccgcacggcgcgcggccgcatcgtcaccgaaaaggcataccgccatttcggctatcgttcgaaagaagaggatctgttcacgctcagcgatcaggatgaatgagggtcatgtgtgagatcagcgcgcagatgaagaacagcgcgccgtgacagacgacatggatcagggggtcctgcgcttccttcaggaacagactgcagatcatgaggatcacgctcatgagcagcgcctgagggagcgctttttttctgatcagaaagccgaagagcgcaccggagatgagcatgcccacataggccgccgcatcgttgatgatgtgaaaggccgcggcggaaatcagcgaaaaatagtataaaacagcggaaaggaaagaaaataacagcaggaagccgatcaggaacagcaaggagagtccatagggcttcaacgcctgtttcatgtgtttcacctcgtttcagcatatgagagaaaggggatggatatgatggaggaattcgctttttatggctcgctcatcctgcgttgcatcatcgtctacttcgtcatcatcttcgcgctgcgcgtcatgggcaagcgcgaggtgggagagctgagcgtctttgacgtcgtgatctacctggtcatgtcagagctgctggccatctccatcaccgatgtgaaggtgagcatctttcgctcgctggtgcccatcaccgtgctggcgctgctgcagatcgtcatctcatgggtcttgctcaagaacaagcggatccgcgacttgtttgacggcaaggcggtcatcatcatcgaaaacggcatgatcgaccagcagatgatgcggaaagagcgctacagcatcgatgatctcatgtcgcagttgcatgacaaggatctgtcttccccctcggaggtcgcctttgcgatcttggagaacaatggcacgctttccatcctgcccaagcattcgtgccaggtgctctatcctgaaccgctgatcagcgacggtgaggtcagccagagcgccttgcgggcaatcggaaaggatgaagcgtggctgaacgcgcagctgaagaagaaaggcatccattccgtgcaggaggtgtttttgtgcctgctgcagaaaaacgggctcttcctcatccgcacgcagcgcgccgtctccagaaagaaagcaggcggaaagcgtgcaggaaggtcgtgatgagcatgccgccgcacaggccgaggagcagcgcgtcttcttcaaggagcggagagagcaggcagaccgcgctcagccggaacaatgagccatacagcgtgtcgcgaaaggcgcgcgtgctcagcgaacaggcatgcatgagggcgctgagcggggattgcaatgcatagaacagaaaaggcagggcaagggcgcgcagctgctgtgagcccttgctcgtatggtaaaacaaggtgaacagctcttcatggaaaaaaaagcagcccagggagcacagcgcgccgaagaagaaacagcaggtgaggatgagcaggcattgccgacgcgcctgttttttttgcgcgtgcgccagcgcgtaagtgaacgaggggagcagatagttgctcaaggtgacgctgaggaagccggacatcgtgagcagcggcagcgtgtagccgttgagcaggccgtaagtctggaccatggcgtcctgcgcggaagccgggatgagggcgagcatgaagatcggctcgaggaaataggtaagcgaaccgctcagccggctgcccatcatcggcatggagatcgaaagcacctcgcgcatggcggaaagggagacgccgcgcaatgctgagggcatccgccgcgcccgggcaaagggcacacgcagccgcagcatcatatagaggcagctgacgatctccgacgctgacgctgatcatcgccgcggccgccagcatggccgggtcgcggatgtcccatgccgcaaagaaggctagcaggaagaggagccggctgccttcctcatacagctgggcgttgttggccgcaaagtgctgctggcggccatagagatagcccttcagcagtccgctcagcgcgacgaacggaagcagagggatgatcgcgcgcagcaccgggaccagctcgacgtgatgcaggatcccgccggcgaaataagggagcacgagcacatagacgctcatgacggccgccgtggttagcatcgtgatcatcgccgaggcgaacagcggcttgctgccttcctgctgggcggtgagcttgctgagggcagaagggatgccttgctgcacgatggcgatcaaaaacaccatggtcggcgatgcaagcgcatacagattcatcgcttcgctgctcagttctctggccagtaagatgcgcacggcaaaggataagatcttggccgcaacggagacaaagaccagatgaaaagcggaaacaagcacggtttttttcacatcagatcacactctcttgttcattttacgtgtgattgatgtctgatatgttcgtgttttgatgaaaaatggatttaaaagtgacttttttaatgatataatgaggtggcatatacttaaggagggtggctatgagtctggaagatctgcttgaggaccgatttatccagctgacgatttatctgcagctgagcaggctccagagagagcagctgtcctctttaacatatcaacatctggaggatacgctgaaaggactgatctggaagaaacaggttccgccgacgctgcatgaagccgtggatgacatcctgaagctgaaagtcggggaaatcgtcgcctatctcaccagacaggtgatcgtgcagtgcaagactgccgacctggatgaggtgtatcgcaagattggaggattgaatgaatgaagaaatcacgactaatcgtgtttgggatctgcgtgatcacgattcttacgatgattgtaacgctcgctccgagcatccgcaacggcatgacgctgggactggatcttcagggcggatttgaaattctgtatgaggtgtcgccgctggacggtcaggacatgcctgagatgtcttcggtggtctcctcggttcgcaaacgtgtggacgtgctcggtgtcaacgagccggagatcacagtggaaggcgacaaccgcatccgcgtgcagctggccggtgtagataacccggaacaggcaagacggatcatctcttccacggcaaatctgacattccgcgatgtcaatgataacttactgatggacgcgaccgtgctggaagaaggcggcgccagcgttgcgcaggatcagtatggcaactatgtggtcaacctgaatctgagcgattcgaacacattctatcaggtgacttcccaggtggccgcgatgggcagcggtcagaacctgatggtcgcctggctggattatgaagaaggggaatcatatgcagctgagtcccgcaaggaagatccggcctacatctccgctgctacggtttctgagggaatcaatggcgacagcgcgcagatcagcggaaactttacgctggaaagcgctaccgaactggcagatctgatcaattccggatctctgccggtacagatgaccgagatctattctgatgtcgtttctgcggattacggtatggatgcattctcatccacgatgctggccggcgcgatcggcgtggccgcggtcatgctgttcatgatctgcgtctaccgcctgccgggcgtcatctccgcgatcacgcttgccgtatacatcttcgtcgtattcctgctgtacaatgccatgggcgcggtattcacgctgtccggcattgcggcgctcgtgctcggtgtcggcatggcggtcgactccaacatcctgacctttgagcgcatcaaggaatccatgtatgccggccgcagcgtcaagacggccttccgcgaaggatccaaggactccttccgcacgatcgtcgacgcacagctgaccacgttcatctccgcgctcatcctgtacatcttcggtacgggcagcgtgaagggcttcgcaacgatgctcatcgtctctacgatcaccacgctgctgctgatcgtgttcatcgtccgcttcctgctgggcctgctggtcaacagcggttatctggacgagcgctatgagctgttcggcgtcaagaagagcgatgtcccagatgtctctaaaggcgaggaacgccgcaagttcacgaagttcaagggatttgatttcgtcggcaaggcaaaatacttcatctgcacatctttggccgtcctggtgatctccatcgtctgcatgggcgtcaacggcttcagcggcaacggagtcatgaacctgggcatcgacttcaccagcggtacgacgctgaccatccagagcgatgcggcgatcgaccaggatacgctggaatctcagttggaggagctcggccttgatccttccagcgtgaagatcaacggttcggaaagcaatatcgccagcgtctatctgaaggatgccgtcgatgcagatacgatgagcaccgtcaaggcaagcctgcaggagacgtatggtcatgaggtaacggacaacaccgttacgccggtcatcggccaggagctggtgcgcaatgccgtgatcatctccgtgctggcctggatcggtatcctgatctatatgagcgtgcgcttcaaatgggactatgcgctttctgccatcgtggcactgatccatgacgtgctgatcatcctggccttctgcgccatcttccgtctggagatcaatacggagatcgttgcggtgctgctcaccatcatcggttactccgtcaataactccatcgttgtcttcgaccgtatccgtgaccgtgtgcgcgcacatcgcggacgcatcgcgaaggaagaataccgtgagctcgtcaatgaagctatccaggcgacctgcacgcgttcggtattctcgacgctgacgacgatgcttccggtcatcttcttgctgttcatgggaagcggcgccatcttcgtcttcaacctgacgctgctgatcggcctgatcgccggcgccggctcttcgctgttcatcgctgctcagctctggtatcatctgcgcctgcgtgaaaagccgaagaaggtcaagaaggtcaagcgttccaagaaggaactcgatgaaatgatcgttccgggcgtgaacgactaatatcaaccaagaacgcaggcaggaaactgcctgcgttgtgttatcaggaggaaactatgaagattaccgaaatcgatcccatgcgggaagaggagctcatgcggcgtcatcagctgagccggctgtgcgccagggtgctggcagcgcatgatcttcctcaggaagatctggacgcattgtttcagccgcccgtcctctgtgatccatttactgcacaaggcatgggagaagtcgctgcgcgtatccgaactgccaaggcgcgccaggaaaaggtgatggtctgcggcgactatgatgcggatggcatctgcgcgacggcgatcatggtggatgcgctgaggcgcttcggcatcgaatgcggcttttacatccccaaccgcttcagcgagggatacgggcttcacgcgcacacggtggagctggctgcccagaggcagtatgctttgctcatcaccgtggacaacggcgtgcgcgcgcatgaggcactgcagaaagcagaggaactgggcatagacgtcatcgtcacggaccatcatgccatcgatgaagcccagcctccccagtgcgctgctcttctgcatccgttcttgatgggtgagcccttcgatacgctgagcggggcaggcgtcgccttggaagtcagccgggcgctgggcacggcaaatgagcggcagatcgtgctggccggcatcgccgccatcggcgatgtcatggcgatgcgcaaggagacgagggccatcgtcagacagtgcatcgccatcctgaatgagaaaaaagtgcgctgcatccagctgctggccaatgacagttctccctgggatgagacgaagatcgctttccaggtcgtccccaagctgaacgtgaccggcaggctggcagataaggccaacgcgaacaatacggtgcgctacctgctctcagacaatggcgcattgctcatgaacatggctgcgcagatcagtgatctcaatacgctgcgcaagacgatgagcgagcagatgagccagacggcgctggaaaaagcagatcgttcccgggcctttctggtcatctgtgatccttctttccatgaaggcatcgtcgggctggtggccggcaagctgtgtgagcagctgggaaagccatgcatggtgctggcggaaaaaggcgcgcagtgccgcggcagcatccgcgcccccaaagggatggatctgagcaccttctttgacggtctggactgcctgagcgagtatggcggccatgcccaggcagccggcatcggctttgcgatgatcgatctgccaaaggtcatgcgatatgtcgagcaaaagatgcgaaagaccccgctgcaggagcagccggaacaagcggccattgcggtcagcgaagatatgctcacgctcagagaggtcagctcgctggatgcgctcaggccctttggcaacggctttgaagaaccgctcttctgcatcgcacatccccagatcgtcgattcccggacgctgagcaacgataagcatatgaaatggcgcacggcctccggcatggagctgctttacttcaatcccggcgcccgcatgcaggagctcaagaacggtgatttcgacacctttgtcggcaccatcgccatcaacagcttcaggggcagacgcacggtgaatgtcatcgtcaaagatgtcgtcaaatgatcattacggtgaagactgagcggtcttcatcgtttttttacatgttattgaaagcgctatctttgtagttggcgctttttaacattaatttgtgggaaattatggtataagtgaatcgtagtgattcagttccatgctcaatttataaatcggaggaagtgatcatttaaaagatagattgattaacttgaatttctgatttgggagggaaaagtatgaatttttttaaaaggactattataatcggcttagtcagtgcattgtttttttcgtctataccaacagaggttcttgcagtagatattaaatcaaggaacgaatctagtgggcaaactaccgcgccagttataaaaactcaagatcaatctgatagtaatgaaaatattgttattgataacttggcatattttgatgattcaaacaagatgactagagcatcttctgaatatgaagctatgataaagggtgcaattacagatgaagatggaaagggcatcactaacgttttagttaagttttataatatcacatcaggtgaagattcatattctgagcaaagaacaaatgatttgggtgaatggaactttgacgaggcgtggattggagatagttatttaattactttttataaagaaggctatgatttcaataagtctagcatagtttgcgtagcagaaagcggaggaacaacagtagatacagttacagcgacaaagatccccaatctcgtatgtaatgaagaagattatacatatatcgttgattcagtaaatgagacatcgacgataacaggatatacaggagatgataccaggatccttcttccttcaacattgggaggatatccagtaacgaaaatcgactacaattcatttagggataatgggtcactggcaacagttgctttttctgaaaatatagaaaccatagatgggtatgcatttgaaaattgtaaattcttggaaaaaatataccttccaaatacattaatagaaattggaactagagcatttaaaggttgtatatcgcttgaagtagttgcattaccagacagcgtagaaacgatcggatcatatgcattccaggattgtacgaatttaagcagcatcaattatccgatgaactggaagaatgcggacagcaatatctttaggggatgcagcagcttgaagagcatcgtgatcccagagggagtaac

SEQ ID NO: 1420 - DNA, 13929 bp, Unknown
  16S sequences of unknown bacteria
cggatacggcttttactgagccttccgcagcgtttcttaaatcagtattgatttgtgatgcgttttcattgtacatcctctgtctttcatcaagattttctttttctatctcaagggtttccgctaaggtatccagggtaatatctttattctctatcactgcatccgaaattctcccataaccctcgataaccgcgttataatttccctcacttatatccttcgcgtataattcatactgctcaatgtcatcataataccctttttgcgtatcatttaagcgattgattgcatctattttcttttgagcgcttttggtatattctgctgccgcattcgcatctccacggagttctgcgtcttttttctttgcaaggtcatctaggtactgcccctgtaattctctgattttattgttgttttcaatagacttcgtaaccgcctctttgtatgccggttccattgcatctaatacgatctgtgctttctttttctggatattctcctctattgctttgctgttatccagtaacgaggcagtcccatccttattgagtttgatcgtttctccgagaataggattaagctgttctgataaaaacttagctcttgcggtatctttttccgctatgattccattcgcatctcctagattcttaagctctccatataatgcttgtgcgtgcgtcaattcagcaaggccagaagcaatattttcttcctgttgctcctttaattcttgccttgcttcagcctgttcctcaagggcttttttagtctcattcagcgctttagtctcttcatcctcgtgcataacaacagctacaatcgctgccgttaaggcgccaatcccaagcgttacagcgcctagtggcgatgtaataaacgtaagcgcagatgaaaacaactttgtagcagacgaagcagctgtttgggcaatcgtgtgtgctgttgttgccgctgtgcttgcagctgtagcggctgcatccgccgtcatagcggctaccttacccatgacccatttcgcaacattctgtaaaatgttcatgccttttacagccgcaatataacctgtaacaagggggataataatatgaattttgtctcctacaaacccaagagccttcaccaatataggaattgttgtctttgcaattttcacaacaatctcaacaagttttccaaatagcttaccgacgctttgtaaggcgctcttcaattcaccgcttgtaaatgaactggtaatctcgttgaccgcctgcatagcatacttgaccgcttcctttaacggtgcgttgattccgtcatagatggcaagtccaaggccctctaagcttgaccctaaaagggtgatttgcccttttaggttatcgttcatggtctctgccatctctttagcgctgccatctgcgttattgatctgctctgctagagaagcaaagtccttgtcggatgcgttcacaattgcaagcaatccagacataccctcttgccctgccaaagaagccgcaagttgcgttttctgtgcatccgataatttgccaaagccagtgcgcagctctcctaaaacatcgttgaacggcttcatgttgcctttcgcgtctgtaagagatacgcccagtgttttcattgcatcttttacttcatcggtcggttttaccatccgagaaagcagcgaacgcaatgccgtacctgcttggcttgccttgataccgctgtttgccatcaggcccagtgccaacgatacgtcctcaatgctgtatttcattgccccggctacaggtgcaacatatttgaaggattcgcctagcatggcaacgtctgtgttggaagccgccgaagccatggccaatacgtccgaaaaatgtgcagcgtccttggcctgtaatccgaaagctgtcatggaatcggtcacaatatccgaaaccatcgccaaatcctcaccagaagccgcggctaggttcattacgccatcaatgccgtttagcatatcctctgttttccagcctgccatcgccatgtattccagggcttgtgctgattctgtggcagaatatttcgtttcaatgcccatctgttttgctttttcagtaagcatggcgatctcgtcacctgttgccccagaaatagcctctactttggacatttgtgcttcaaagtccatgcccgctttaactgcatagccagacatagtgccaaacgcagctgcagccgctgtggtaattcctttgattccctttgcaatccctgactgatcaatttttgtatctataagaatggagccgtctgcttgtgtcaatcacaacacccctttatcgtcactggctcacggctctatggacgcttgatttcgatttctttcttgcagcttttgcaccatacaaatacgcctttacatacggaatccggcagtatttttgcaagctttttgccgcaatacgggcatttcgcccattgtttgtttctcatagtccttccgacaaactggaaatgaagtcctgttctttttcttcctctgttctgttatccggcagcgcataaatctgcttcatttttctgtaaaagtccttttgttctttgggtatctttgtaatgtccaccgccctataccgcatgatcttcataaattcaaggttttcgtcaagcgcatgaaaaagggccttaaacttccaccaatgcaaaaatggaatttccacaaggtcgatcccgtattgcgataaaaaagccgcgtaaatgcttcccgcatcatattcatagctgtatacaatgtttttgtgggtggatttcatttcttctttctcttcccggtttgtttcttcccgcccgcatagataaaaccataggattttctccatcgcctctccttcgtcctctggtatccgtggaaaatatagttcaatagctcttgacgctttctccatctccgtaaattcttcgtccagcattaggagttcaaaggctatacctgtccgaaaatccgcatcaatttcatagaaaaggccgccaacctcaattttggtcggcggcctatccagtaataggttcacttgcggcgctctcttcctggtttataccgttccatacgttttgcccttgcagcttcgatctctttgataatataggtaatcacatcgcacgcatcttccaacgtgacaatgcggccctcaaaaatctgttttgctgcatcttggcccagtattgcgtcaatactgcttagcacaaactgtacgccctcttccaccatggcccccatggcttctgtgttttcatttttatcgacagaagattgcagggccttggacatttccaacgcctttcctgcaaattgctgcaaatgggccgccagttctttagacgtagtgtctacctcgtacttgtgctcgcaaatctcaaggcttacaatactattttggaatttgaacgccgccattgtttattccccttccgtaaatgtcttcgttgcaagcacaaacttgccaaccgttggatcgccgtttatgtagattactccttcgattggtagaccgtccgtagctgcaccgccgccatcgttggtacaatcaatgacaacgctgtacttttttgccttataggtgcctgcggtttcctcgtcttcctcccaagcgtcgacgagcaccatcgttgtctctgcatccggcccgatcttatcaaacatactgcaaaaataatcattgaacggatcgcctaccgcgcgcttgccgctaatcgctctttgaatggattttgatgtggtagtcgtggtctggttcgcttcgtcgatccactgcattgcttgtgtctgtgtgttagagcttggcgtcgccgtatcaaagccctttcctacccgttcgtatttttctgcaccagaccctgcggatacgtctacgaacatcattctgtctcttgctcccggcaatgtatatgccattgttttatccctcctgtatatattccatttgataaatagcttgatatgtttcctcgccgttctcgtttctttcgattaggttcggaaacgattcaatactgattcttgataccacccggttttcccctaagtcaggaaaatgagactgcaaagtttgtgcatcaaaaaaacgcccaatttcgttgagcgttcctgtcgcatggattctttcgtttgtatcttccgcttgtactttataatagattgcgaatggaaattgagccgtataaccgcccaatatatcctcctcgctttttaccgttccagcaagctgttgtaacatcaaacttggcggggccagcaattcctctagccttgccttacatggcatgcctggtatctcgttgatatagtcaagcagggttgagattacctgctggctttccgtcacgctgattacgctcaagttccctgccctcctattcttttagcccctttcatccaatcagactttttcacagcctttgccttttcaaaccattgcatgctggcttgcgggtgaacattggtgttcttcacaggatacaggtaatactgctttctcgcataaggagcagtataccgtacctgtcctgaacctatggttgtgccacgttgtccagagcgcgctaggtttagtgattgtgctggaacgtatggttcgctgtcctttagtacagagctgtctaaaaagcgttgtgccgctgctatattccccgcataccgcgcggttacctttcccgtgttcatcacgagtttcccgctaaagttcatgcgcccgtcacctcccagtgccataggctccgctgcccgtggtttctcctgtccgccgcgttgatcttatagctgtcctccggtggtttctccctctcacatataccaatacacacgcgatctttcccacctggaaacagtgtccaattctttgttttttcttccgcttgcagttcggcccactggttatacggcaaaaacggtttgtctgcctgaatcgtatcgtcatacaatgcaatgcggattttgcacgctgtgtcgtttccagtaacccgaatcatcacgcctctgttttcttccatatagacattccgaatcactgttttcgtatacgttgccctatgttctacctcgcccaaataattgtagagggtgattgtatccttgcaatgctgttttaacatttcattttcacccctgcatacaaaagccctgtacaggaaaggtattcatatgcgacattgtactgttcctccgcctgctctttttttgaccgtgctgtataggagacagcataattcccgtctttttcgcttgtgatattcccttgcgactgctgcgcctttttgatttccaccacagcacagaccgcatttttcaccgcgtccgggatttccttcaacctctgaatccttcccatcgtaatcatatcaagatacgcactggcctggatggacaggcgcggccactcttgctcggtgaccgcgcttccatggtaactgtctgtgtaataggcatagtcagcgtactccatcaaagcccctccttaaccgcagtcaaaatatcggccttttttgtcaggccagagacgtctatgccgttgtcagcagcaaacgctcttaactgtgcaactgtcatatcatcgggtgtcttgggctgatctgtcaggctcccgctttttttttaatgactacggccttggccttggataccttatgtgcgtataccttgcggccctgcacagccgatgcgccgatgtattttcccgatccgttcagatcctgcaagtggattgccacagaccattcctctacacggtggcaccagtcaggatgccctacaatgacctcaacattttcgccaaggttgttggattcaaagatcaaaaaacctgcaatctggcctacggctccggtctgtacaactgcatcgcccaggctagatgctttgataaactccggcgatttcagtaccagcgcaaacacgtccggcgatacaatcgcccatctgttttgcagcggtacgttggccttgctcaattccgtccgcaagtcaaccatgccgtcgtatacggtatccgctgtcaatgccgttgtgtttgcagaagccgtaccgcccgtttccagggcagaaatggcgtctttgtccatctgtaagccaagggaatatccagcgctgtccaatcgttctgccacaataccatccggaacagccgccgcatcgtatccgtcaatgagttcgttaacagcataatccttgtcaatggtcaaagtaaggtaggtagtcgtcccggtattaaggtcgattccagccgccttgtcatatgcttctacctcaacctcagtatccctaacggggattttcacggcccctgccttcgggtttccttcatatcttgtgttaaaaatcgtgttgtttctcgttactagcgtggctctcatcttcgcgtccacgagttttgaataccgatcctgtaaagtgtgtgccatgttctttctctccttaatcaaattttagatgcgggttcaacgcttcaaacgcttcctctacgccatccttttgcggtgcggttcctgtatgccgctgcccccagcttttcggttcattgaacaagtaatcattttctgccttgatctgctcaatctgttcgtcgaacccggtcagtgcgccgtcttggaattgtattttttccatatccaataggccgcgcagcgcctttgtgttttttgctccgctttttgtcatggccgcctcaagtgcgccgttaagctttgtctgctgcaaatcattctgcaaggcttgcacatctgtatcatactttccctgcagctctgttaactgctttttcagctcttcaatacttttctctcccgtctctttttgaaatgccttgatggtttcttttgctgtctcaagctctttttccatcgcttccacgccctttttggcttcgttaatgtccatgccgttttgggccatgatcttgtcaatggcttccttttctaagccaagctcttgcaaaaattcacgtttcattttctttccctccactacgctttttacggggttgcatcccgtgtgtccgctcttttacgtctgcggttagacagaatatctatatcaaaaaagcacccattgtagggtgctttatgacctatggtgtttctttgttaaattggttccaaatcctcggctatttcttccagggaatgcccatcaaagacaggcgcttgcatcatttcatccatagaggcaaaatcaactgtcttttccccgatacctatgtacatatcgttaggagcaaggtaatcaataaagtaatccttgccgcgatagcgaaaccatccgtatccgactgtattcaattcttgtttcaacatttccatcgtcatactatatcgctatgctcctttctctccgcatcagacaattccctgctcgtcctttttagggttccatctttctcccatatgtaatcatggacatgctctccgtttttcccacatctgtgtcgattgggatacccatggtttccagagtgtatctgttttaccatgattccatctttcccgtatatgatacggtcaatttgccctgctttcccagacaccgtctgcacaactgcatagggcctatattttttcgggatggaaacatgccctttgttcttccaatcgtctgtcactatgatggttccatctttattatatctgtaaccactgtacttctcaacatatttcaggttggcccataccgccttcgcgcttacgcttttcccaaaaccaatctgctgcagcctatcgctctgcgtgggaagccccgcctgttttgagaacgatttgtatcctcgttccagtgtttttagtttagcgctttccagcataaaatcttctgttagcccgccctcttcatagcctattagccgatctctgcttgcccggatattcctctcaaactttcgctgcatctgtgttgcgtcataggccgtataccgcttcccctcatgccaaaacggtggagggtctatatttgcaagctgctgtctcgtatacgccggtgtgctgtatccggggaaatatggataatagctatggcggcagtttgcgccgcatagccctgtaaccgttccgtacccggtggctaaggcaaaattgggatagccgggcgcttctccattgactttgaattgtctcccctgccatgtctggtggcttggccttgcaccagcgtgcgcagtcgtttccacgtattctgcccccatttccctcatgagaaaatcagtcattcgagccgtggtttggttgacgcccgtcataaccgcacggcgcgccgctgcgtctatccgcatgctggctccgcttgcgtattccacggtgcgtaggccgctgtttgccatggctttcaccgcttgcctgattgcgctttgtggggttgcaacacccgccatgacctgcatctgtgccctgttcagcgtatcaagatagaattgcccaatattctgaaaaacagttttcccattcttttgtacggcaaatcctaaagtgcccgtcaggttcaatacgtcatccagcatgcgatctctgcttgctttcaaaagaacccgcacagaatcataagccacggttttccctacagaggcataggcttccttttgccatgaaagcgaggtattttccgatctgtcaaacagttctcccgccaacgcctgcactcgctcagatacctcccctgtctttgcaatcagttcagcttcgtcataaaagccggaaatctgttcccattgatgccttgccgtttccgtaatcccggatttttttaaccgtcttacgatgtcacggatgacccactcttccagatcattcattaatacaatcatggattccggcagcgcttccaaatattcaggcttgagcatggcttattccatcagcgccgtagaggccggaacggaggcccttgccttttcttctgtttccttcaagcctttggcgcgcacttcccagccttccgcatatcccatagccgccatttccttgatccgctggtattccttgtcctcatccgttatcacgctgtcatccatatcgaccttgacttctgtaatatggacgccttctaaaaatgcaagcgcccataccatatctgtcagcgcctttttaagaatagttgtgtgcttgcacaggttctgccatagatccgacttttcgctcactacctcggttgccgtttttgctgttccgcgctcaaacttgtatcgcgtcgtgcccagcccgcacttgctggaaacgcagtcaaggccgcgctgcaatcccttttcgtgttcgtccgcacgaatgttgaggtctatttccaccggctttttggtttcgccacccaggtctatcccataaaaaagcacatctttgggatcaaaaacagccttgccgaccgcttccccttccatttccacctccaccatattcaggggaagtatgatgcgctttcgtcccaggataaactcgttgcaatagctgtcaaagactaaatctgtttctttgatggcgtctattgcgttggcaaacacggaaattcccatcggacagtcaaaatcaacattgttcacgatgtttggctttataatctgataaagcggcatttcgctgcctgtctttaccattgcctctactccatccggcagcggcagcgaaagccctgtttttgtgtccacataatcgttgtatatcacatactttccgttttccatcacgtgctgctggatatagaacgcttctgttttcccaaccttccgcaagcttgcaaatgcgcactctgtaatctcgccattgtcccacgacaaagggaaaatcatttccgcccgtacataatcaatcatggggcttccctttgcgtcaaggtattccacaaatgcgccggtgcctcctgcaaaggaaatttccacaagctggtttgcacgcacgtcaaaattattgcggtacaaggtatcgtgcaatgtgttgtacccatctgcttcgattatgacgcgctcattcatgagaaggttcgcccaatcctcgcatacaagttttggcatgcccaaagaataccgttcacatcctacaaaggaggccccgttatagatattgtatttatgaaaagaatcaacctttcctttgtaccattccatccacgttctgatctgctcataaaaatccgcggacactgtgctgtatccacgcttctcaagccatgcaagtacgtccatcgcctacccccagcctaatgattgtgttcatatacctttccgtgctgtattccagcgcatccagactgtctatgttatacgtcccatcatccaagcgtatatcctttgtcatgtttctcccgtcccacacagccgtttgcaacgcctctatcgtgtgtttgcagcgccgcagtattttatacctatccgcgcccatcaaaacgcagtatgcgcgtatgcgttcattgatcggccccttttgtgcgttcttgacgataatccccacaccctcacgcaacgccgcggttttcagcccctgaatcaaggtttgttccgcgctatcacaatacgcagttgttaccctgtatttgcttttgcaaatccttacaaaatcaagaaaagccgcttccaatgcggaagggcttgtaatgcctttctgataatattcttccagcgtgacgacctctcgaaacccgtttgtatatccagtacagctaaacgccgtcgcggattcattgccgccaaagtcaacacctatcgttgcaaacttaatttccggcgggttgtctatgatatagcgctctgggttatccgcaaaatttctgtatataacgccctctgctgccacccaccgtccaagaataaacctgtcataaaacactgttcctgcgtattcttttttaagctcttctatgacatgcaagggcagcgcgccatcttcaatgacataatcctgatggtaaatatctgcgtcgctatccagaaacttttttacccaatggttcggattgtccgggttacaagtaccgtcaaagtgggaatgacggcagcgcaaacggcttttcagcatggaaaacacatcttcgctccaggttgtaacctcgtcgccataggcgtactcaatgcttgtcccttgtatcctcgccacatgctttttattgtctgctccaagcacatatacttttttcccaaacatgtgaattgtgttatcgcttcgtatctgtcctataagctccggccacagatcacgcatgggttctatgatattgcgttccaatgttccgcgtgtattcccgaacaataccaaaaggccctcgcctttgcttgcaagaatccgttttggaatggttgctgctatatccaaatagcttttcccgcttccggtcgctcctgttttgaaattccatcgtctattgcagcgcatgaggtattccgactgtttttcagtcaatggcactctgcacacctccaagaagctcttttgcctttatcagtgcttcgctgtctccttgtgaaagcatgaatttgtcaatgaccaccccgaacgctgtggcaatctggctgatggtggatttccctatgatctcgtcattgctcatcgcctttagcagcttatccagcacatcgcacgccgtgtccttccgcgcgtccatccacgccagcacgtcccgcatgttctctgcctttttttgttcgcactttttcatggtatccgggtcgctttccaccacctgctttaccgtcgtccacgaccgcttatgctttttcgctacagcgttgcagctccccatttctgcataatccgcgatgatcttctttttctccctgtccgtcaaatgctttgccacaacaccacccctctttattacaatttcttttccttttatcttttatttttgctttaagtaattctattatcattctatttgctgtatattagttgacattttgtctataattatctataatatagtaaaggagatgagaacaatggcaaccatcacattacggcttgacgatgctctcaaaaacagttttgccaaaacgtgcaatgagcttggtcttgatatgaccacggcatgcacaatctttgtcaaaaaaatgacgcgtgaaaaacgcatcccgtttgaggtttcctatgatccgttttttgaagagcacaatgtgcaggccatacaacgcagcatggaacagctggcaaacggaaaaaccgtcaccaaaaccatggcagaactagaggcgctggaaaatgagtaaaatcgttttcacagaacaagccttttcggattacctgtattggcaagggcaagataaaaaaacgctcaagcgtatcaattccctcctgcgggatattgaccgtaacggatacaccgggattggaaagccagagcccctaaagggagatttaaccggcttgtggagtaggcgcattgatgatatgcaccgactggtataccgaatcacaggagaaaatattgaggtgatccagtgcaaagggcactatgacaaataagacggcatacaccgtcttattttttttcttatcccatttacaccgccaagcccccgcccctggcttcctttccgcagtgtacgttttcccaaaagaaaaaggccgattttcttcggcctttcttctatttccagtttatattatctcacgttttttggtacgattgggtgtgatttttcttagtatccaataaatatgcttttcgccataccctaccttacgcgcaatcatcggaacggacagtccatcaacataaaatcctctaataacctgcctataatatggggtgagcgtctcgatccacgcttctacctctttaatttccgtttccctctgccacagcttgtccgccagctgctcttccagctccatcagctttactgtcagctcctctatccggctttggttgttgttttttccgcttggcatgcccgtgatgctctgcgtcatccgctcccggtcgctcttgattctctcgatccgttcccgcagcgattcaatttcccctttcgcagagcggcagttttccagctgttctatcgtcaatagaaatcctcccaccgttttttcttccttctccctgctttctttttcttatcgcacacctctacgctgcatcctcgcgaatgtccctctatcaggatgtacgcgcaaaacttttccccgctgtccgcgccaaggctccgcctgtaaaagcatcccttacaatgcttcggcaacgacatttttatgaatcctcgtcaatccgtgatcttcagaatccttctcatacaacgggcatttgtatactgtatatgtgaccatttcatcgccgtattgtctccccaagatatcttttcttgctttccatccctttactggctcaaagtttgcggaccagctgcaacgcccactaaatcttccgcatgaccagcacaaagtgttctttccttttaccgatcgtcttttcttcatccccatatcaaccacccaatcaagccgaacaaggcacctaatagcccggcacacactgcttcccttttctcttcctttttaatctctctcgccgcggcatacaatcctatgaacccaacaaacccaatacacgcaagcaatatacgcgccatgcatcctccttttaacgcgaaaacgggcatcgttttatgtctttttcatcaaaacgggagcccgtcaaacctttccacctctttttgtcttacatatctttctgttactgttcctacaacactttttaatggcagatacgcaccaaccccggcagcaatactttcaagcgtggattctgaaaccataaaactgttacctatacacgttcctgttgtttcgccatgaatcgtttcacatagcaccgttgctccactttttaattgttctgatgaatccaccgagaacaaaaatgttttttcattctcatgatgccgaacgaaaacgcaatgaacatattttgtcattttatatatttcccctttgccatct

SEQ ID NO: 1421 - DNA, 18333 bp, Unknown
  16S sequences of unknown bacteria
gagcaaaagaaccatgacacgaaagacatacacagcggaatacaagacgaagcttatcctcgaggcaattcgcgaggaatcgcggctcgagtgatgttactttcgcctgtattatatatagagcgatcttgccgcataatgtaaattcagcaaggaaaacaagaccctgtcaacctgatatgtttacacaatcaggttgacagggtcgaaaaaagccaataaattcaagacttttttctgcgaaacccgatttgttcagtgtaccccaaagaagcctgcaaggttttctgccgtctgatttattctttcccggcttttatccgatacctgagtatcttcgagctccgcttctccggcatattcacgtgcagcttcccatcggtgacgacgaagctctcaccggagtcgatgtcagtgaatatgtactcaccggtcatcccgaggttgtacccggcgtcggtgcagtttgattcttctcttttgaagatcatgacgattccgtcgccgttctccggacggtcgtacctcgaggcgcaccatgccgcgtgtgtggcgccggggttctcgaccgggtagaagtcgcaggaaaagtactctctcagcgacaggtattcgtccgaaatcttttttgcccattcaatgtcggcgttgtcggcatccatgaagccgtagcaccagtacgccccgacccacgccgcggcgtaagtgctccgcgccgcgtaggtgtcggaaatcctcttcgtgacgccgccggaatacggcacgaaccgcccgacaccgaagctctgcgcctgaatgatgtccgggtcggcgcggaggttgcagtagtagtcggtgcgccagatcgggacgctccggcggagcatctcgatgtcgattctccgtcctccgcccgcgcagtcgtcgaagatgagcgaggggaatctctcgtggagcctgtcccagagcctgtacagattcgctatgtatctgatctcggtgatcccgcgccgcccgggctcgtcgttgaacctccagagcgggagcgggtcgatgttgaagtcctgacggtagcaggatacgccgagctcctctatcatcccggagagcaccttataaatcccgtcgagcgcctcctccttcgacagatcgagcagcaccgaccagcagtccgggtcgtcgatgaaccagtccggatgctctctgaagagctttgtgttcctgagcgccctctccggctcgaaccagacgagcattttcatgccgttctctccggcgagccgtctcacgtcctgaagtccctccggatgcacgtttcggttgacgtaccagtctcctgtgtagctgccccagtcgcctgtgaaggggtcggcgcagtttttctcggacgagccgtaccatccggcgtcaatccagaggtggtcgaacctgacgccgtgctcactgagagcgttcagccgttttttcatggtttcggtcggcattccgccgaagcactcgaaggacatcggcggaagcggcgggacttctcctttcccgaacggcgcgagctcgttcttcacgagtctgcggaaattgttataggcgttgttcctgccgttttcgtattccagcatcagcgtcgacgccgcgcggattctctcccctggtttcaggtaaaattccgcgtcctcgacgccggtttcgactttaatgaagtcctccccgcgcgtgaagacggctttccactgcccggtccagccgacggctgtcagaaccccggtctgtccgtggtttatctcgaagaacggaaatgtcccggtggcggagcgtccgccctgaggagcgcgcgtgagcttctgcccgttcatcagcgggtagtcgaggaacctgaactcgttctcggcgttctgcgtgtggtcatagttgaccattccggtcgccgaggagacgagggcgtaatcctctgtcggataggatcccggatgccgcggcgggtcgggcgagaccggaacatctaccgcgcagtcgcgtatttccgacagtgtcaggctgtccctgtccccgtcgttcccgtaataaacgacccatgagacggcgttgtaagcgggaaaatactcggcgtgaagctcggcgtaaagtctgtccggcagctcgtaccgcgtgacattcccgtccttcttcacgacaggcgagtattccctgaacggctttccgccgtatctgaaatcaaagcgtggagttatcataaaaatcacctcagataaaaagaatcacaagtccgcagagtgacgcgatgagggcgagcttctgccgcccgtccggtctttcacggaaaacgaaagccgcgatcagcaccgacagcagcgtcgagccgccgttctgcgccgggaagagcagcgcggacggaagagcgcccgcgaggtaaaggttcgcgaggttcgcgaaggcgagcgtccctccggcggtgaggatacaggcgataccgctcattgtcggagaggggcgctcttcagggtccttctttgagatggcgcagacggcgagacatatcacgaaagcggtgacgaaggcggtcagcaggaagagcttcggcgacccggaacatgaggagcttctctgaaccttctgcaagactccgacgagccccatgaagaggaatgccgcgaagcaataggtgagccagcccttttcgcgccttttcccgtttctcttcgcggagaagcaggaggagacgattatgacggcggcgccggcgaccttgaagaccgacagaggttcccgccagaataccgcccccgcgaaggcaggaatgaccatcgacgcgctgacgaacacgacggtgaacgacatttcaccggtggcgagcgccatgagcttgaagacgccgctcatcgccgtgacagctccgaagagaatcccgagaataaggcactgcgcggagtacgtctcccaggaaaaaattgcagccgcgccgacgacaacactgatgaccgcgtaaatcgccgcgttgactcgcattgttccccggagcgagccgtcggacttccgcccgaggagcttcatcaccgcgttgtagagcccgtttgagagtatggagatggataggaggatgtagtcggacacgttaacttaatttctccatgacttcggcgagcttcttgtcgaccttttccttgagggagaccgagaaggactcgatgtcggtcttctttgactgtatgcgggcgttgtacttgttccggacgtcctcaaagaacgggacatccccgagatccatgacgcggttctcgcgtatcagttccatcatttcgatagattcctcgtccctgagcgtcttctgtgtcaggagcttgttgtagtattccgggaagacagatttcgcggtctcgctcgcgagggcttccattatcgcgctggtgaactccgggtcggcggagacggacggaacgacgtggagccagccgtctatgacgcgggtgaggtatttctcctgtacctcgtcatacttcgggaacggcacgacgccgaaatcgtccttcatctccctgagcagcccgagcctgccgagcgacgtgcacgccatgtacgccatgttgttcgcgaaggtctgaagaacgtcggagcgcttcgcggggtcgatgaggttcacgttaccgttttcggagagcaggctgacgcagtaggtgagtgtgtcgacaaacttctcgttgccaggcgcgttgaatatgaggttgtcgccggtgttcagcaccgacagctcgcctgcgcttatccagaaatccaggaaccagaagtcgatgtttgtcacgacgccgaagcggtcgtcatctctcttgtactcgccgtcgccgttcagatcggagacaccggcgcggatatactctccgagcttgtcgtaggtccatttgccgtcccggacgagctcatacggcgaggtcagtccgaagtcgtccgtcatgcgtttgttgaaggtcatcactatcgccgcctcgaacatctggaagcactcgtcactgtacgcgaagagctgttttccgtttattttcatctgttcattgacgtcctgcgaataatacggctttgacagatcgagataagtgagcgattccataggcatgagataaccgtcaagtccgactgagaaggcgtcgcggttgaggcactggatgaggtcatatgacgcgtcgccggacatgacgaggctcttcagcagatcaatgttctcgaaatacgacgcttcgtccgagacgaacttcatgttgaatctgtcctcaatgagacggttgcgtttgtagagcgcgtcgaacacgacgtcgccggtctgctcctcaatatcgaagagagtgagatatgaccccgtctcataggtgacgctccggacgtgaagctccttccctccgaagtcgagcgcggggacatcgtcgtcaagcggattcgcggtttctgccgcggtagtcgtggcgtcggattcaccggcggaggtttcgggcgtccgggttccgttctctccgcaggatacgatggcggagagctgaattgtcgctaaaatggcggcgatgtatcttgctgcctttttcatggtaacagatcctttcgaaaataatattcttgatgaaatcataatgtgcaaccggttgcataatcattataacataacataccgactttgtcaaccccttttgcaccgtgatgaccaccaaattaatgtattatttttgtgcatgattcacaatttcaaaattattacttgattttcccgagaataagtgttagaataataataccacttcacaggaaaggaccggtcgcgagagcatcaatggccgaaaaaataaccatctatacgatagccgaggagaccggtctgaccccgacggcggtcagccgcgccttcaatccttcctcccgcctcgatccggagaagcgccgccttgtcctcgagaccgcggcgaaatacggcttcacgccgaaccgcatggcgtcccgcctctcgatgcgggagataaagatcgggatcataatctacgccggatatatgccgttctgcgagcagatcatcgccgggatagagtccgcgaagcgccgtatgaccgactacaagataaactgcgacctgcgtctgctcccgcgcgaaaatgtgacgcgcgaggagtgcgtgaaggttctgcgcgagctggtcgacggcggatgcgaggggataatcacgagcggaatgtacgactggtcgtacccggaactgaaaaaagcggcggacatgggatgccgcgttgtcttcataaactacccgccggagccgggggtgagcctgttctcgtcaatgcagaacgcgccgctcgccgggcgtatcgcggcggatttcatgcgagccgccggaaaaaaatcgactctgctgctgactggttatcagactatgacgctgcacaggcaggtgatgcgcgggtttctcgacctcgcagcggagtatggaatgagcgtgccggagatatacgacataaactcgcttcctcacgctgatcgtgaggaagcgctgactgaccttctcacacggctgcgcggagagatcgactcggtatatataacttccggagaatcggcagaactctgccgcgtgatcgaacggcttttcgcgcccggggagctgactgtgctgacgtctgacatctacccggagctttgccggtatatagagagcgggcttgtctccgcgacgattttccagaatcaggcaaaacaggcggagcgcgcttacgagctgcttgccgggtatctgatgaagacgatcccggagccggagaatgttgagataactccggtgcttgtgacgaggagccttctgccgtgttattcgggattcagaacatagctgtaaggcggtacgaaaggtatggttacaaggaggaacatctgtgacgaacgccattgtcagaattgaaagcatagaagtgaaaaacttcaagaatgtaggatacggttatcttgattttgaaaacacaaaaaaggagtacaaatcgagcattctcggtctgtacgggcagaacggctctggcaagaccgcgcttattgacgcgctggagctgctgcggctcgcgctttccggcaggtccgttccggaatatttcgcggattacatcaatgtggagagcgatcacgcgaccgtaaaatatggtctcagcgtcagaaatccggatgaaaacagcatcttcacggtgttttatgaggtttccatccggcgcgataccgacgacctcggagagaacaccggacgctctgacggcggaaccatcagaaagactatgctgtttggagaggtgctttcctacgcctgtgacggtacggaaaataaggtccggctttccgttctgtttgacacgagacccgccgacaccgcttttattcccaaggcgaaatacaatgagattatcggaaagagcagggaaactgcgacaaatcttcttgtggcaaaacggcttgccggcacaacctcacgttcgtttatcttctccaaggagtttatgaacgagctgcgcggaaactgcaaggagcggcgatatcttttcctgatggaaggtctcgtgaatttcggaaactatgagctgttcgttatcaccacgagaaacgccgggctcataaatatggacgcgcttccgatcgcctttggctgctcggaggagaagaaagtctcagccggaagcgttttggtaaagctggatgaaccctcggtgattccggaggaagcgctgtccgccgtccataaggttgtcgacaacatgaacgtggttctgagacagctcgttccggggctcacgataggtgtgaaggatctcgggacacagctgctgtcggatgccagacccggctcgcgcattcagcttgtctcgaacaagaacagccgggaaatacccttgaaatatgagtcagacggaataaagaagctgatttcggtgttgcagctgcttatcgtgatctacaataagccttccattactgtcgcggtggacgaacttgacgcgggtatatttgagtatcttctcggcgagatcctccgcatcatttccgaaaagggaaggggacagctcatcttcacctcacacaatctgcgtccgcttgagacgcttgacaagggttttattgcgttcacgacgacgaacccgatgaaccgctatatccgtctgaacaatgtgaagacgacgaacaatctccgcgatttctactaccgcgacatcgtgctcggcgagcagagcgagtctgtatacgagccgacgaataacagtgagatatcgcttgcgttcagagaggcggggatgcgggatggcaggtaggaagatcgtctttgtcattgtcgagggtccgtcagacgaagacgcgatcggcactctgctgaaccgcgtttacagtgacaataccgtatacgtctatgttgtgcatggggatatcacgtcgaagctgagcgtgaatccgggtaatgtcgtgagggaggtcggaaagctcataagaaaatatgccggaaacactttccggtcatcggattttgagcgtataatccatatcactgatactgacggcgtcttcattccggatgacagagtgattgaggacacgtcggcaaaggagccgttgtattctacgaccgggatccgcacgagaaacaaacacgggatagaaagccgcaacagcaggaagcgtgaaaatctcatgcagctcgcggaaactccggaaatctggagggtcccgtatcagatctattatatgtcctgcaatctcgaccacgcgctctacggaaagctcaacagtacggacgcggaaaaggaatacgattcgataaaatttgcggaaaggtacagaagcgacgttccggcgttcataaggttcatttcggagtcggatttttcggtgatgggcagctatcctgagtcatggagctttatccgtgaggagcttcattcgctggagaggcatacgaatctcgggatttgctttgctggggacaaggaaacagaataggaaatttatgaaggggctgtcgcaaaaatgacagcccctttcattatttctttttgtagaatataacgcggcagcttcccggctcgccaagagtcacgctgagtctgccgagagacatttctccgatgtctccagaatcaatgtcctcgagaatgtatacgttttccgcgcggatgcctctcagcgggagctcgagttcgctcaccgggcactcgtacctgcggaacacgaagaccgctccggagtcgctgtccgggtcgtgcgcctgatacgcggcgaaatccttttccgacaccgaggcgcccgagagagggtagaagtcgcggcacatatagggtctcacgcggtaggcgtccgccagcatttttctgtaccactccgcctcttccacggttatgtcttcgcgccggtaagcgagacgagctcacttgttccgcccatgtggtcaatgtgaccgtgagtgtggaatatccatcgaatattcacggcgtagagcccgttttcagtcatgtcccgcagcaggtcggggacgtccgacggataaccgctgtcgaacagcaggagcccgtcccctgtgtcgacaatatgcgtcgaggcgccgtcatgcccggagaaatacagctccccgaaaatatgtgtgaagattcgtgccatttcattcctcctgaaatacagattgtaatcggttacaaaatgctttataactccgcttatccatagtgatgtaagcggttacaaaacccggtataatcttgcgccgtcaaaaggcggcgctgatactgattcaattgtatagcttgcgattgctcctcaggacaagctgcggcgtagagcgtatgaattcgtctggctcccgtccttccgagaggagaaggaacatcgcctcaaaagcctttctcgcctgatacagcgggtcctgatagatagttccggtgacgatgcccgcctcgaggtaatggtcgagcgccgggaagacgtccgacgcgaggaatatgctctttccctcgtgcccgctttcggcgatggcacggcatatcggtaccgagttcgcgcttgtgcagtagacgccgccggggatccgggaaccggaaagtatgctcaccatcctgtcatacgcggtgtcctcacgatttcctgtctctatcacctcacgcacggtgagcgccattttctccgccgcggacataaatgaatcgacaatctcgttctgcccgggcgatgacctaccctcggtgaacaggacgacatcgcgtctttctccgacggtcagcgacatgaactcggccgcgagccgtccggtggtcacggtatcgttcatcgacacgaagcttcgcccgcactccggaaggtcgctgccgagcaggcagagcggtattccgttttcctcaagccggttgatgcgcgagatggcgtcccggctgaatattccgcttatgatgactccgtcgatcccgccgtcggcgaacccgtcgatcacccgagcggcgtcctcctcggctgcctctgccctgtcgagtatttgcaggtcgagttctaccttatagtccatatagctccggaaggcgctctgtatcccgcgctcaagtatactgtagtacaccctgacctgtccgtagatgagtacgccgatgcgcaaaggctccgacgacagtctcgacgccatgcggttcggtacatatccgagccttttcgccgtttcgagaatgagatcccgtttctcaggcttcaggcaggatttagggtcaaaagcgcggctcaccgcagcaatcgacattccgacctcctttgctatagtgtacatcgtgaccttcggtttcattttttagctccttgtaaccgtttacagtaattacagtatagcataactgaatggatttgtcaaggcttttcgtgatttttttgcaaaaatcttatcctctgacttattccatgtagtcggcttattctgctgactcaaaaatgcgcaccggattggactcgttttttgtccaatatggcaattgacagaacagtaccgtctatgatataattgaattacaagagagatcggtctgtctttcggacattttcgggggagttatttcccccgaaaaatatgtctcaaggttagctaaagctaaccttatctggccatgaaaggaatttaaaaatgaagaaaaatcgcagaataatcaccctcattcttgtcgccggaatgcttctttccttcgcgtcctgcaccggaaagcagtcctcgggggacgaaagcacgtctgacgcaccggagaccactgacggtgccggagtttccggagagacaatagccgccgacggcgcgcttgaggtcgcaaagcaggaatataccttcacgaagctcggcgagaccgacgttctctccgcgactgtcggcggcgtcagcgtatatgacgtcggatatacgagcggtgacgagagcgtcgctgctgttgtcggcaacgcagttgtcgctatgggaagcggaatgaccacgatcacggcgaccagaggctccgacacggttgttataactgtcaacgtgaatacttcctcgaaggtcgtcatcgcgggagacgacatggttccgcttaataccgcgtcgaatccgacggcggcactcaccgctgcggtggaagtcccgaccgttttcgacaaaactgacgcgggagtcacatggacgtcgagcaatcccgaggtcgcgactgtcgacgcagacggaaacgtcacggctgtcggcacgggcgtcgcggtcataaccgcttcaagcaactatcagataacaacgacgactgtccagtcgatgatgggcatgagcataacctcaaccgatacggcaatagctgatgacaaggtcgttgtcatggtcaacaacgagttcgacgcggagaagaacaaggagatcatcggaacctatacgggtcactatgactggcagggcttcgcggctcaggcgagcgaggagaatccctgctacacgaaggacaacttcctctggatccgctcgaagataatcctcgagctcaaggcggacggaaccttcacacagaaggtgctgaacgcgcagagagccgcatatccggattcgatcgacgattctctccccgaatcgacctatgaggagcaggtcgcgaagtacggcaagaacaactgctacatttacaaccgcgccgatcaggatccgacctccgaagagttcgccggaagcgacaagacttacgcgacaatcgagggcatggaagcgagcggaatgaggaactttgccgagagcggctatttcatggtaaccggcggcgagctgaagctctactacggcgtgacgaacggcatgaccggcgagtatcagtccgaggagttcgattacggtaagatcgaaggaaacgagttcgtgaacaacgagtatgttccgtttgtcaacatggtcaagatgagcggcaacatgactcaggttctgactaagtccgctgactgagacgaatgatgagaggaaagagaatgatttccgcgtttctggcgctgtccgctctgctgctcccgtcctgcgggagcgcggcgggggagccggagacgatggacgcgcccgccacggacgctgagacgacgaccgccggagaggtgatggtcacgggaatcggcacgatggtctggcacgttgacacgaccttcacggctgtagtcgacgtgacgatctctggcgacaagatcgagtctatcgcgctcagaagctcgagcgtcgtcagcactgacgcgttcaccggctggagagacaaccgcgagagctatctcgcacagtacaacggcatatctctcgattcgataaggaatcttgaggtacacggttcgaccgacgtcaccgatcaccacaatgtcggcgagataaacggcgatatcgacgccatagcgggcgcgacggcgagcagcgtcgtcatagcaatggcggtcaaggacgccgtaagcaaatacgattcgtaaaggaaggtattccggaatgaaacttcgaagaatagccgcggtgctgctgattgtctgcatggcgctcatgatgttcgcgtgctcctctcaggggagcggggacgaaacgacgccggacgtgacgagcggcagcgcagaaaccgagcttccggtcgcgacatatgtcgggagccacgcgacgagcaacgcgatgggcgacgttgtcagcggtcatctgataaatgtcttcgcagacggcagtgtgaaaatctactacggtatcaaggcgggaatgcaggggcttcactacggcgcttatgacgggaagctcgaaaacggcgttgtgacctacagcttcacgaaagccgacaccgaaggatcgactacagattcgttcgagctcccggacggcgcggagagcttcaaagcgaagatcttctgtctcgcgagctacccgaacagctcgggcggcggcatcgattatgtgaagatcccgccgatagttcccgacgagagcgcggagtatatattcatcggctcaaagaccggggacggcgatttcgggttctatatcgagctgaaggacggaaagctccgcgccgcggcttcggcggacgggaaaaccgacaccgtgaccggcagctattcgatcgagtattcggatatcagcgacatcgacgcgttcgacaagctgaagataaagtacagaccgtttttcgcggcggatggcgagaccgagaccgggataaagttctcggatacatcgttcatctcgctcactccggagagcgacggcggggtgcttccgaagctgactctcgcgacgatcgtcaataccgacggtacgcgcgacaactgaataccgtttttacacggcagcggctgggatcgttgtgccatcgcacggcggtttcccgcctctgccatatatctgtatattgggaaaaataaaataaagcctgaaataaggcaaaaaaaggagaaaaatcatgaacgcgttttttgaatgggcataccgcacgagaggaaattctgtcagagacctcgctgagggcaaggaagtctcgatggagaagatgtttttaagcttcatgtcgcacaatccggtattcgtcagcgacggacctgccggtcttaacggcgccgtcaagggaatcggcttcatcccgagggaggagtatctcgctgaggccatggaggcttataaaaagcatatccagtcttacgtcaagggcgacaggagctattccgagcgcggtctccagatactcctgaagtatctctacagcgaagaggcggagaagacgatagatttcgatcacgtctacggcgtcgagatggcgttcactaacagctacaagaactacatggagaatccgcgcgcgtcgatggtcttctatcagccgccgaggatcagcttcgagctcaagggcaaaatggagctgatcggtgagcaccacgcggaggacgaggaggtcgatccgttctcgcttccgctgctccagcagttcgtgaacgctcagcatgacgtctaccacctcccgaacatcgagggctggaagacccgcccggtctataagttcacgatcgaggagatctacgacaagtccgcgacgcagaacggcttcgggacccgtatcatgtaagccatgaagagaatattttctgttatcctcgcggtcgttattgccgcgtcggtcacactgaccggctgcggacgcgaggcgaaatattccgacgcgctgaggatcggcgcgtcggagattccgaagactctgatgccgtatgtctcgtcgcacacgtcgaacgtttatgtcgcgaacatggtctatgacacgctgcttggtagtatttcggaacctgctgactataaccttccggacggaagcgtctatactccgtatgatcaggacgagaactatttcggctttaccgaccgtctctgcggcatggagggggcttacccgagaaaggacgattcggagtacggatgggtgctctttgagccgacatcggaacagtacgagaagcagctcgcgagaaagggaatagtcaagggacagaacgaggctggagagaccatcgaggagaccgacgaggagttcgcggtccgctcggagcgtgccgttccggctcacaactggatggagtaccgctttgaggtgcgggacggatacacatggaacgacggcgtgccgtttaccgccgacgatatcgtctttaccttcaagtacgcgctcaagaattctggcgcgctcgcgagcatcgcgtatttccttgacagctactacgactgttattcagataacggcgatctggtgctcattctcgcgtcgaacaagctcagcgatatccggacgatctgctcatcgatcctgataatcccggagcatatctggagcggtatccgccacccggcgcaggagaagaacctcgacccggtcggaaccgggatgtatctcgcgaagagcggggactatattgaggacaactcgataaccctgaccctccgcgatgatctcgaccccgcgctcgaaaaagaggcgctcggcgataatccgatagagaagataacaatcctcagactacagaatgaggacgtgacgctgaacgcgctccagaagggcgacatcgatgtatcgatggattcactgaccgccgcgaaagcttacgccgtcgacgacaacgagcgttacgacggagtgaaggtttcaagctacgacagcgatttcatcacgacgctcgccttcaatgtcggaaagtacggcgcgttcaatgaggagaatatgccggagagctataatgtccgccgcgcgatctcgctcgccatcgaccagcaggagcttatcgacagcgttctttatgggaagggaacgggggtcggcgacgggctcgttcaggagacatatccgcacgcgctgaaaaacgcggacggaagctatcgcgctcatgagactgacgcggagctcgctaacagactgctcgacgaggcaggttatccgaagaactcagacggaacgcgtgacctgtcgtttaagattctcgccagcaccggcgctgagacgcttgtcaacgccatcggaaagcagctgaaggaaaagctcgggataaccatagtctttgatctcgcgaagagcgactattccgaggtcatcaagcagtcgaacggcgctgatttcgatatgataatcaactctgtgacattctcgcctgacaagctgctgatgtttgacgcgagattcgggcgttatcccaacggctccgcgagagtctggaacgtcaccggagtcaacgatcccgagctctcggagctcatgtgggtcatggacaccgagaccgacataaaggcacagtacgcgaaggcacaggatgttcaggcgcggatagccgagctttatgtcgagataccgctttactgcgcgaagaactactgtgtctacaccgataagaattacatgggctgggtcgagcagaagaacggctctgtccttaacgattattcgatcagatatctggtcagaaacaaataatgaaaaacggattcattctgaaaaaacttctggtgaacgtcggaatactcttcgtcgtcataactctgaatttcttccttccgcggctcatctactccgacccggcgacaccgtattacgcgggtgtgccggaggacgcggtggctctcaggcaggcgatacgcgaggaatacggcttcgataagccgatgttcgtccagtatctcgtgtatctcgggaagctgcttcgcttcgatttcggcacgtcctacatatacaaggagcctgtcttcaacgtaatgttcaagcgcatcccgtggtcgctcgtgctgagcctttccacactcgtcatctcggtgacgcttggaataatcttcggagccgtcgcggcgaagaaccgcggtaagtggcaggattcgaccatccttcgtctgtcgacgctgtcgaccgcgatcccgacattctggctcgcgatggtttcggtaatgctgttcgcgttcacgataccggtgtttccgtatcgcggggcgatgaccgagggatatacgcttgtgatgaacaaaccgatttttgccggggtgttcttcggctcggtgctgctgacggtgattctttatctgatattcagaaagggatttctgacattcacggttccgctcgtcgggctcgcggcggcggtcggcgtgtcgataccgtttgatgatattgctgatatcgcgtatcacgcgtttcttccggtcgtcatcaccgcgatatggagcacgatatcctacgcgctgcttgtccggaacagcatgatttctgtcgtgaacgaggattatatcctgaccgcccgcgcgaagggcgttccggcgaggaagatacttttcggtcacacgttcaggaacgctcttctgccgctcgtgactagcataggtctcggcatctccggactcatcggaggctcggtgctgatggagcagatattcacctggccgggaatgggaaacctgctgctcgaggcgaacaacaacggcgatttccagctcgcgcaggcgatacttctgctattcgcgataatcacgatcgcggcgaacttcataaccgatctcatataccataagctcgacccgcgcgtcgggatagtctgagaggagcgctgatatgaaattcataaaaaaactccgctcagggctgcttggcgcgtggaaattcttcctgaagatatggaaccacaaaaagggacgcgtcggcatcattatcaccggattcgtgattcttgtggcgatcttcgctccggttctgacaaaatacgacccgtatgattacgacgtcacaaagggcttgcagccgccgaccgcggagcatctgctcggaaccgacaagaacggagtcgacatcctgacagagcttatttacggcacgcgcatatcgcttctcgtcggactcgcgtcgggtatcggcgtgacgctgctcggagcggtgctcggcgttgtcgccgggtatttcggaaaggtcagctcgacgataatcctcaatgtcataaacgtgatgctcgtcatcccgacgcttccgcttatgatcatacttaataaggtcagctcaagctatgtcatgatgatcttcatcttcgtggcgttcggctggtccgggacggcgcgtatgatacgcgctcaggtgctctcggtacgcgagagcgggtatgtcagggcggctgagctctcgggcgcgagccggtggtatgttatgcgcagacatatccttccggcggtttcgaacctgcttatcatgaactgcgcgctgtcctgcgccggtttcatgatcgcggaggcgggactgtcttttatcggtctcggcgacccgaacagcatgagctggggcaagatactcgtccgcgcgcaggaatcggcgttcaccgccgggctgtgggcgtgggtgctggctcccggagccgcgatattcctgacggtcaccggattcatgcagatcggctacgcgattgaggacatatgcaatccgcgcatggtcaagaaaaacgccgcggcgaagtccttctcgaagctcgatgaaaagagcgtcggcagggttttcgcggcgatggacgatattcccgagcctgaatgcgcgaccgtggatcagccgcgaaaggagacgatcacatgaacacggaatgtcttaagatacgcggtctcaaggtcgtattctacagcggagagggctttataaaagcggttgagggagtggacctcgacgttcacgaaggcgagtgcgtcgccattgtcggcgagagcggctgcggaaaatccgtgaccggactgtcgatgatgcggctgctgtcgtctcctccggcaatatggcgcgcggatgaaatgacatatatgacgagaagcggggaaacgcttgaccttataaatgcctctgagatccggctcgaaaagcttcgcggggacgagatatcaatgatctatcaggacccttcgtcggctctgaacccggtcatgacgatcggctcacagatcggggagatttacaggtatcacacggaactgtcaaagaaggaatcccgtgaagcgggcattgagatgctgagacaggtaggtatccccgcgccggaaaagcgttacgatcagttcccgcacgagctgtccggcggcatgaagcagagagttctcaccgcgatggcaatggcacttaagccgagacttctcatcgcggacgaacctacgacggcgctcgacgtgacgatacaggcgcagatactgtcgcttctttcggatttgtgccgcagggagggaaccgcgctcgtgatgataacgcacgatctcggcgtcgtccgctcgatcgctgaccgcgtctatgtcatgtactgcgggaagatcatggagcagggaacctgcggagaaatacttgacagcccggcgcatccttacacaaaggggct

SEQ ID NO: 1422 - DNA, 11688 bp, Unknown
  16S sequences of unknown bacteria
cgccataggacgtagctctaagctgtatcctatggcgcttttgtcaacagggccgtaatacgaacgccccttaaggggctgcaaaagcgacaaaggcaatgggcttgaacttttgcaaaaagtgaaagccagcgccttgagacgctggccggtaatcattgggcttttagcccttgtgcaaaccacccgtttgacgggtggttatgatttgacaaagaactgtactacgcctataatacagataaccgtatgagtcgagtaatacagtttgagcggaaaggagcgcgtgccatgtcgctggagaacctggagctggacggaaggggaccgatctacctgcaaatcgtgcggtttgtgcggcgtggcgtcgtcgcggggacgatccaggacggggaggagatgccctcgcgccgggcggtctcggcgctgctgggggtgaacccgaacaccgtgcagaaggcgtaccggctcctggaggaagagggcgtgctcgtctcccgcgcaggggcgcgctcctgcgtgcaggtggatggcgcgcaggtcgcgcgcatccgcgaggcgctcctgcgcgaggaggtcggcgacctggtctcggcgctccggcagatgggcgtcacccgcgaggaggcgctgcgcgaggtggaccgccagtaccgcgaggccgccccgtgcgacgggagcggcccatgcgacgggagcggcccgtgcgacgggagcggcccatgcgatgggagtgttccgcgccagcaaggggcggaggcccaaagaggaggagagggaacatgaggaaatggacggcgatctggatgctggccgcgcgggcccagggcccttgggcgctggcggcgatcctggtctcgacggcgctcgtcgcggcggcgtttttcctggccgcgccggagggcgttgcggcggccggcggcgtcgaggcggcggttgcggacagcgcgtgcgcgctcgcgtcggggctggggctcgcggccctgtgcgcggcgctggcgctgccgctgagcgacctgttcggcacgcgcccggggctgacgctcctgcgcctgcgcgtgggggagcgcgcggccctgctgcacatcgcggggtttgacgcggcgtgccttctgatgctgtgggcggcgcacgcgtccgttctgttcctgctcgcggcgcaggccggggaggcggccgcgggcctggccttcctgcgggagggctacctgcacagcctgctgcccgttgccgacccgccgcgccttgcgcgcaacgccgtgctctgcctttcgctggggatcgcggcggcccgcttccccgccgtgctgcggcgcgggcgcaagccgctcgccctgcccgtgctgctgtgcgcgacgctcctcttcttttcccaggagatgggcgagtggggcggggacgtcgccctcgggggcctggcggcgctgatcgcggcctcgcagatctacgcgctctatgcgccggaggaggaagggggcgaagcggcgtgaagaagctggacgacctcgtccccgcgggcctgagcgcccggcgggagatcggctgggtccttgcggcctatgcgctggccgggctttggagcctgaccttcctggtgcgctactttggccggcgcgaaaacctcttcatcgtcaaggcggggcggcgcgtcctgcaggcgggcgcgcggatggagccgtttctcgaggtcctggacggggcgctgctggggtttgcggcggcggcgctgctgatggcgggcctggcgctgtggcacctgctctaccactaccagggcagccgcagcatcgacctgatgcgccgcctgccccggcgcagcgagctccccgtgcgctgccttgcggtgccggtgggcggcgcgcttggcgccggggcgctggccgcgattctccttggcgtctattggatggtctaccggctctgcacgcccgcggcggccctgccgggattcttttgagagggggaaaacgcccatgctggaatggatttctgtgcggaagaactatggaacccaggaggccctgcgcggggtggacctggcgctcgggccgggggagatcgtgggcctgttcggcgagaacggcgcgggcaagaccacgctgctcaagtgcgcgctgggccttgtgcgccacgggggcgaggtgcgcctggacggcgagcgcataacgggcaggaacgtcggccgcctctcgtttgcgacggtggagcacagcttcttcccgacgctgagcgcccgcgcgcacgcggccttctacgaggagcagttcggcgccttcgactatgcgcgctaccacgcgctggtggacttcttccgcctgccggagggcaagagcgcgcgctcgctctcgaccgggcagaagaaccagctcgaggtgaccctcgccctctgccagggggcggactacatcctcatggacgagccctttgcggggaacgacgtgttcaaccgcgaggacttctacaagctcctgctgggcctgctcaccccgcgggagacggtcctgctggccacgcacctcatcgaggaggtgcaggacttcgtcggccgcgcggttctgctgcgggagggacgggtgatcgcggacctggagagcgaggcctgggaggagacgggcctcttgcagaccgtcaagtccgcctacggctaccgcggggaccgcgtccagcgcgccctggaggacgccttcggaggggaggaatgaggaagtgcgcacgagcctttgcattgcggcggcgctgctgctcgccgcggttctggcgctgacgggccttggcggcacggcgcacgcctgggccgcggagccggactgggcggtcgacgtccgcgaaggggatgcggcggcgctggcgggcctttcgatgcaggtccggctgcgcagcggggaccgcctgcagtgggattcccgcgtggcgctggacacgggcgcgcaggagacggagttcctcgccagcctctcgcccattcgggaggggagcgcgagacgtccccgcgccgacctgtacaccggcgccagctttggcatcaccacgaccggcgccctggacgcggaggagatggagcgcgagggcatgatggccgcgcccatcgccgcgctctacgaaaagaccctggcggagggggacttcccgcgcctgtcggaagaggaggccgaggcgaaccagaacgcggccgccgcctccatggagatcgggccggaggaacccacggcccaggcgcgcgtggacctctccgactactacgacttcgcgcccctggccttcgatctgcacatcccgggcgcgcaggtggagatcccggacgaggcgcgcgcggccatcgcggcgttcttccgcatcccggtccccaaggggtcctgggcggacgtgtccatcgagatcgacgcgcaggggaacctcgtgagcgcaaatatgtccagcctttccgggccggcggccgccgcctacagcgcgcaggcgctcagcgccgtgacggaggaggcctgcttcctcgccctggcgaacggcggcgagggacggctcgacctttcccacgtgccgggcgggaacggcgtctatgtcctgccgctgcgcagcgaagcccggggctccggcgtgcaggtgacgccggatgcggacgcgctctgcaacgcctatccgctgcccgcggaggcccgggtgcagggcctgttcctggacgacagcggggaggcggtccgcctctacacccgcgagggggacgaattgttcctcacggttctggaccttgcgtcgctgcaggcgggccagggcgaggcgctgcagcgcgtgcgcgtctgcgcgatccaggaggaggactatgtgaacggcgagctggacggcggggacttcctgctcgtgcagcgcgcgtccgggtttgccgccgtgctggcgcgcggcgcagacggcctgtacgcgcccgcgatcgaggtggaccttgcgccgctgttcaacgaggcgcagacgggcttggacgcgggctttgccgcggactgggacggcgagcgcctggctgcggcggcccggccccggagctacagcgacgcgcccgtcgaaccggtcgcggcggtctacggcgcggaggggctgcggtgcctggcgcgtctgcgcacgcccctggccggcgcgccggcggaggaggcgcacgagcgcatggagctctcccaagagggctttgccgtcgaatttgcgcccaccccctgactgcacaagggcgcgagccttgacagcggaggaaaaccgtcgtatcctaggggaaacggcaccgccatagggcgggaaaaagggaggacgcgaaccatgctcttcttgggaaccggggcggcggagctctatccgaacccctactgcaactgcgaattctgcgagagcctgcggcagagcggcgaggccccgcgcaagcgctcgagcctgctgctcgacgcgcacacgctcgtggacctcgggccggacgccctggccgcggcccagatgtacaacgcgcggctctacgacgtggaccatctcttcctcacccacagccacgaggatcacctctgcatcacgaacctggaggtcctcaccatgacgccgcagcgcaacgagaagcccctgcacgtctacctctcggagccggcgcacgtgtttttgacccggtacatgcaggcgctgcgcggcgtctacgcccagggagagaccgggctggaaaccctgatcaagcgcggcgtggtcgagctgcattccttcccgtcctatgtgcccgtgcgcgtgggcggcatggaggtctttgccatcgagagcaaccacacggcccacggcccgaacgagcacgcgctcaactacgtcttttcgcgcgagggggaaaagctcctctacgcggcggacaccggcctgtacagcgaggaaaacctgcgcgcgctcgccggcatgggcatccagaccctggtcatggagggcaccttcggcgacgtgcccgtaaacccggagaccgcgacgcatctgaacgccgagcacttcgtgctgcagctgcagcgcctgctcgactgcggcgccttggcgcaggacgcgcgcgtctacatgacccacatcaaccaggtgcagcacctctgccacgcggcgtaccaggcctatatggacgcgcacagccccatccccgtcgtcgtcgcgagcgatgggctccgcgcgtgctgaaaatcccttgccgcacgggcgagaaacgaagcctgccccgggaagccttgcgcctcccggggcagtttccgccgcgcggacaagttttttggggcgaatttgggcacatgcaccaaaaaagaaaaatatctccgccgctcatcttgacaaacgcaaatgaaacctttactatcgaattaacgtagtgtaaaaatttgattgcgcgctgctgccgatgagacgagaaggtgtttagatgagcgaacgcggtctgctggtcaaactcggcgccgtggtggaaggatcggattactaccggttcctgtcctggcgtcgaatcctgttcgaggagttcggacacgaactctcccccgagaccgggatggagatgagccatctcatgcccaaggtggccgcccgcaggctgtgccgcgcattgggccgcctctatacgcctgcgcgggaggacatgtagatgaacaagctcacccgctactacgccgactacctctccgaggtggaggagggcgacgtcctgccccgggccacgcgcatcggcgcctattgccgggaggaggacctgcgctcctgcgtcatcgtgccgcggggcgaggggccctttcccgtggacctgaaccgctttttcacgtgcgtgtttcccacgcgcctgggcgaggactgctaccgcgcggcggtgaaccacatgaacctcgcgccggagacctgcgtgctcgtcctctccggggacgacagcgacctggtcctgcccccgggcgtcagccggacgattcctgcctccgcctttgacgcggagaaatgaaagaaacaaaaaagaggcgcgcacagcgctgcacctgtaaaatgaaagtagacacttacaaaagtgtgagtgtctacttttttcgtagtaaaatcagagaaaaaggagggaaggaaatgggaaagaaagggacaccacatcggaaatggagcaaagaggaaaaaaggaaaatatccggtcaattttctatgccgagtcatggggatcatcgtctggctcgcgatgtgtctttggaaacggggtgggtgttttctcacaatctggcccacaagtgttgtaaggctgcaggtattcattcaagggccagaaaaggacgttatagacggactggagaggaaagcatcgtattccccaatcaggtaagaggacactggaacgctgctgcaccgcttcagctcgtggtctccgacataaagttggaacgacttactggaaatggaccatcctcctggataccttcaacaacgagatcctggctcacagcgtcacatctcaaaggggaagcaataagccatagtaccactgccttgaacaactgaaaaagctgatggacaaaagagaagagcagacgccccaggtaatcttacacaccggccagggagctgtctactcttcgagggctttttgccaggcccaccacaatgataactacttcgttctaggtcgcgagggggaacgcccacggacaatcccataatagaggctttgaatggctggatgaaggaagaacgctatcttgacttcgatctagcccataccaacgacgttcctgctctcttggatgactatgtccatttcttcaatcgccatcgccttgccgccgccttgggttacaaaagccctcttcagtacaggaccgaacagggctttccttaaacttgcttttcttgtgtctgcttttgcttgacaagtgcaaggcgcgcacagcgcctcccctttttcgaacggaggaaaaggaaatgcagaaaatgggagccgtcgtctggggcgtgcaggacatcccgcgcgccgtccgcttttggagcgaagcgctgcactacaagctccgcgagcccgccagcgaggactgggcggtcctcctccccatcgagggcgagggaatgcagctctccctgagccttgtcacctccccgcacgcccgcaggcaccacatcgacccgtttgccgaccagatggagcaggaggtggcgctgcccggagggcgcggactacgtggtcctgcaggacccggacggcaatcccttctgcgtcgttgcgcgcggggcgggcgcggtcagttgcggatgccctccacaggcgcaaggccgatgaagcgcaggaagtcctggatgtgctcgtcccagtactcccaggtgtgcgcgccgggatgctcctcgtaggtgtagtcgaaggggttgcccgcaaggccctggaagaagtcccgcgtctcccgcgcggaggggaggacgaagtcctccgtgcccacggagtggaagatgcgcgggcggggcaggtcctcgtcgaggatgcgctgcgccgcgccgaacacgtcctccggcgtgcccttgcgggtggagacgtcctccgtgccgtaggtcatgatcatgcgcgcgcggcgctcgggcgtcatggcgatgccgccgcggttgaccgcgcccgcggaaaggcagccgatggccgcgtagttctgcgggttgttgaggccgatcttcatgcagcccgcgccgcccatggacagcccggcgatgaagttgtcctcccgcttgtcggacagggggaacatcgcgcgcatcttctcgggcagctcctgggaaatgtaggtgtagtacttgccgccgtgcgccatgtccgcataggaggaaaggtgcgcgttgggcatcaccaccgcaaggcccagcggcgcggcatagcgctcgatggaggtgcgccgctgccagatggtgtggttgtcgctcgccccgtgcaggagccagagggtcgggtgcttgtcgccccgcgcggccgcggccatgccgatctgcttggtcgcgcgctggggaaggatcacgtcgcaggcgacgcacatgcccagcgcctcggaaaagaagtttacgtgaagcagtgccatgctctctaccccccttttagttcttcgccgctttggaaatcggcagccaggaaagcaccgtctggatcttttcgtcccagtacttccactggtggtcgcccgggctctcctcgtaggtgaggtcgtagcccttggcgcgcaggtggtcgcgcaggcgcacgttctggccgtagagcccgtcctccgtgccgcaccacatgtagagcttgggcagcgccttgccggacgcggccaggcggtccgaaaccgcgaagaggtcgttttcgctccccgcgatggcctgcgccgggccgaagacgtcctcccaatagccgcgctcgcccgcgggcttttccagcgtcagggcgctgacgtccaccgcgccggagagcgaggccgccgcgcagtaggtctccggcgcgcgcagcgcgcacttgagcgcgccgtagccgcccatggacagccccgcgacgaacgtgtcctcccgcttttccgacatgttggggaagaaggagcggcagatcgccggcagctcctgggtgatgtaggtgaaccacgggaagccgatgtgcatgtccgtataccagcccagctgcgtgctgggcatcaccaccgcgatgccgtagtccgcggcgtagcgctcgatggaggtgcgcctctgccagatggtgtggtcgtcgctcatgccgtgcagcaggtagagcaccgggtacttcccctcgccgcgcttgccctccatgccgatctggccgcgggtgcgctcggggagaatgacgtccatctcggcgcacatgcccaggacgtccgaaaaaaagtcaacgtgcagtagtgccatcctcgccttgcctcctttgaaaaaatcgctcataattaaagtataacgcagagggcgaattttgtaaatcggaaaagcgccggcgccctatccgcgcttcgcagtctgctcgaggatctccagcaccttttttgtgccgttggccgcgggctcttcgtccatgcgggcgcgcagctcgtccttgctggcgtagagcgcgcgcacggcggcaagcaggctctcgggcgtgagacgggcctggtccagcacctgcgccaggccccgcgccgcaaaggaggcggcgttttccacctggtcgccgcggctcgcgcccttggggtaggggatgagcaggctcggcttcttcagggccaggatctcgcagagcgtgttgctgcccgcgcgggagacgagcacgtccgcgcaggcgaaggcgtcgcgcatcctgtcggtgaggtattcgatctggcggtagccggcgtagcggtccaggtccgggtccaggttgcccttgccgcacaggtggagcacgtcaaagtccggcaggagcttggggagcgcggcgcgcaccgcggcgttgatggcctgcgcgccggagctgccgcccgtgaccatgagcacgggcttttccccgctgagggagaaggccgcaaggccgctcttgcgctggccggcaaagagctcgtcgcgcagcggcgtgcccgtgtagacgccgtggcgcacggccttggccgtctccggaaaggtggtgcagacggccttggcaaagggcgcgcagagcttgttggcaaggcccggcgtcaggtccgactcgtgcagcaccaccggcacgccgtgcagcgccgcgccatagaccaccggcaccgagacaaagccgcccttggaaaagaccacgtttgggcggagcttgcccatcagcgccgcggcctgggccgtgcccttgagcacgcggaacgggtccgaaaggtttttgaggtcccgataccggcggagcttcccggtcgcaacctcgtagaacggcacgcccgtgggctcgaccagcccgcgctccatgccgccgaccgagccgatgtagacgatgtcccagcccgccgccgcaaggtgcgggatcagcgcgaggttgggggtcacgtgccccgccgtcccgccgccggtgagtacgattctcttcaaggcaatccctcctgccgtgtttccatcgttttcccattcattatgccgcgttcgcgcccgcttgtcaaaggaaaaaaagccgcaaaaaccgtgtcggaaggacggagaccttgtcggatgcccttgcgcggagtacaatgggagggtaaaatcccaaatcaaggaggaagagacatggacaatctcaaggaggaaatcgtctccaaggagcggaagtttgacggcgtggtcatcgacgtggagcattggcaggtccgcctgccggatggaagcctgggcctgcgcgaggtcgccctgcacaagggcgcggccgcggtcgtgcccgtggacgagcaggggcgcgtgcccatggtgcgccagttccgcgcgccgatcggccgcgtgacgctggagatccccgccggcaagctcgaccaccccggcgaggacccggagctctgcgcccggcgcgagctctccgaggagacgggccttaccgcggagtcggtcacaaagctcgtcgccctgcgcaccacgccgggcttttgcaacgagacgatccatctctacatggcccgcggcctcacccagggcgagcggcacctggacgaggacgagttcctcaacgtggagtgggtccccctggaggagctgacggaccgcatcgtccgcggggagatcgaggacgccaagaccatcgccgccctgctcatggcccgggaaatcctgcggcgggagcgggaggcgtagagcgcgcgcgagcgcggaacgaaggagggggagtgcgatgcggaccgaggaactcacggccggctggctcgcgcaggggcgcgtgccgggcgcaggggtgtgcgacgtgcggcgcgaggtcgcgctccccttcctgctggcggacctgtgcgacgcctgcgggcgggaggggctgtttctgcgcgcctgggagctctcgcgcgaggtcgcccggcccgcccgccgagccgccccgcagccacgccgagcgcgtgctcctgacgctggacggggtcctcggcgcgggcgagctgttcatcgggggcaaggcgcgcgggcggctgcggccgcacatggaggtcgacctctccgaggacctgcgcggcgggccctgccgcgtcgcgctgcgctttgccccgcacctgccgcgtctctaccccggggagcgcgggcgcgagctgccggtggagagcaagctgctctccgcccgggtgcgcagcgtctaccgcctgcgcatcgagggggtcgaggtgcgggggaacctggcgcgcgtgcgcctcttcgcgtatggggcggggcgcgtgcggctctgcctgcggctcctggccggggaggagctgctcttttcggagaacgtggaggtgcccgtgcaggtcggcagccaggtggtcgagcggcccgtcgaccgtaaggggcatgcgttcgccgtgctgcgcgtgcgcgcggacctggccggcgagggctgcgacgaggccgagggcttctgcggcccggagggggaggcgcacgccttcgcgcacttcttcgcccggccggacgaggcgatgctccaggcggcgcgccgggcgggctttgacgcggcggcgctgcacgtctacccggacgaggcgctgcgccgcgcctgcgcgcaggcgggcctgatcgccgtgccccagcgcgcggccgtccgccgctgcacgctcctgc

SEQ ID NO: 1423 - DNA, 1944 bp, Unknown
  16S sequences of unknown bacteria
cgcctgccgcaaaggccgcgatgagcagcaccagcacgcccagcaccagccgccgtttaatcctccgctttctgcaagagtaccagcgcctcctcggcttccatcccaatcacaacacccctttgctttgccagctcactgcaggatgccaccggcagatgcagaagggactgcgcaggatggcacttggtcacacagagcaccagcccttcttcaaagatcagccgcgacagatactgattgaccaggatcatcttctcgttcatgacaaattcgaccggaaaccagtgcagcgagccataaagataatactgcgtaccgatcacttcacggtggatgtccattctgtctcctcccctatcaatatatgcggagtttcgacgaattacaccagatcgcgcaaagaaaaaggatacagccgcagccgtatccctcagtcatcaataattttccttgcggacctcgaaataagaacgagcgtgcttgcataccgggcagatctccggcgcgctctttccgcgatgcagatgaccgcagttgaggcattcccacagcgtctcttcgctcttatcgaacaccgtgccatcctctatgttgctcagcagcgcattgtaacgctcttcatggctcttttcgatctccaggacgccctccatggtctcggcgatctcatcgaagccttcctctctggcttccttggccatgcgcgcgtacatgtccgtccactcatagttctcgccggcagcggcatccttcaggttttccgccgtagacggcaccgctccgccatgcagatacttgaaccacagcttcgcatgctctttctcattgttcgctgtctgctcgaagatgttggcgatctgcacataaccgtctttctttgccttggaagcatagaatgtgtatttgttgcgcgcctggctttcgccggcaaatgcctccatcagattttgttctgtcttggttcctttcagattcatgattcacaacctcctgtctatactctcattataacctgtttttacgatcgtgcacatgtttttttttcaacgatcctgccgtcccagccaggatcgcagatcatcgctgaggtaacgcacatattcctcgctcaggcacagttcatcatatgcgcgaagcagcgggatcatgcgtgccagcagatcctggacaaacgcttgcgaatcgctgagctccgcttgcagcacaggggatgatcccgccatcgagatcagctccccgcgcaggctgcgcgtgcgccggtacagatccgcatacaggcgtgtccgccccgcctcttccagtgaatcatagatcccggcctcgatcagctgcggcaaggtgaacccgctgaacagcgagggatgagcaggatcatcattctgcgtgccatagaccatgggcgcttcttccagcagctcgggacgctgaagcagccgggccagccgcagcgattccggatgcttctgccataagcagaaaggcccgcgctcatcggtgagcgcatcaaccagcatctccatccgcctaaacagcggcacaggctgaggacgatctgtctgcgcgccgtccagatcgaaataatgacatccctgcgcatgctcgctgaagtgcaccagcctgcccctgcggacacagaaacatcggccgtcgctcagctttggcccgcacgcatcctccagcagcgaaaggccgttgacatacagctgcgatgcacctcgtggcgatatggaacgatcgctcagatccagcgtgatgttcagcgtcgccgggatcagctgatcgtgaaagcccagcgcgatgagctccccgccatattcgatcagttctccgatatcgagcggatcgaaataacgagcctcattttccaaagcgccgtcgatcttcttcacccgcagctcaagctggccgcggtaagcgaagaacgcggtgttgaagcggcgg

SEQ ID NO: 1424 - DNA, 18992 bp, Unknown
  16S sequences of unknown bacteria
ccccggctcccttgtgtaaagggagctgtcagcgaagctgactgagggattgtagatttgcgaataagcctctgatttatcacccaccgccgtttgagttgtttgttcgtaaacttatatgttaaacacacatatccgaatacgtctgaaacggcctgttaacggtccttttcggtttgccgtcgcatagaggcgttaagcaacgggtgaacaaattcttcgttttgtaatattgaaaagcttgttgcggcgtgatataatcggcttgagaagaaaatgcggcgagaaccgcaaaacaggagtgaagctcatgaaagaagtcaaaacaccgaaaaagccccttattttttattatgtcatcgttttgctggcgctgcttgtctttaaccttatcgtttcgcccatactgctcaacgccaaggtgcaggaagtggactacggcacctttatgaagatgattgaggaaaaaaacatcggcagcgttgaggttgacgactcggaaatcgtttttaccgacaaggacaaccaaaacatctacaaaaccggtgaaatgaacgaccccaccctgaccgagcggctttatgaatcgggcgcaaaattcacccgaaacatagaaaagggtatgtcgccgctgctcagcttctttttgacggccattctgccgatacttctctttgccctcatcggacagataatggccaaaaagcttatgtctcaggccggcggtcccaacgccatggccttcggaatgggcaaaagcaacgcaaaggtttatgtcccctcctccgacggcataaagtttgccgacgtggccggcgaggacgaggcaaaagagaaccttgccgagattgtcgattacttacataatcccaagaaatattccgacgtgggcgcatccatgcccaagggcgtgctgctcgtgggccctcccggaacgggtaaaaccatgcttgcaaaggcggtggccggcgaggcaaacgtccccttcttttccatgtccggctcggaatttgtggaaatgtttgtgggcatgggcgcctcaaaagtgcgcgatcttttcagccaggccaaggaaaaggctccctgcatagtgtttatcgacgaaatcgacgccataggcaaaaagcgcgacggccaaatgggcggaaacgacgaacgtgagcagaccttaaaccagctgctgaccgagatggacggcttcggcggaaacaacggagtcattattcttgccgccaccaaccgtcccgaatccctcgaccccgctctcacccgacccggacgtttcgaccgccgtgttccggtggagctgcccgaccttgcgggaagagaggccattcttaaggtacacgccaaaaaaatcaaaaccgccgacaacgtggacttccacacaatcgcccgtatggcgtcgggaacctctggcgccgagcttgcaaacatcatcaacgaggctgcgctccgtgccgtgagaagcggacgcaccgtcgtcgaacaggccgaccttgaggaaagcatagaggtggttatcgccggttatcaaaagaaaaacgctataatgaccgacgaggaaaagaaaatcgtgtcctatcacgaaatcggccatgcccttgtggccgcccttcagaccgagtcggctcccgttcagaaaatcaccataattccccgaacctccggggctctgggctacaccatgcaggtggagcaaaacgacaaggtgctcatgaacaaggaggagctgcttaacaaaatcgccaccctcacaggcggccgcgcagccgaggaggtcgttttcggaagcataacgaccggcgcctccaacgacattgagcaggccacaaagcttgcccgcgccatggtcacacgctacggcatgaccgacgaattcgacatggtcgccatggagacggtgacaaatcagtatctcggcggcgatgcaacccttgcctgctcggccgacacacaaaaggaaatagacaaaaaggtggttgaaacggtaaaagccgagcacaaaaaggccaaggccctcctcgaggcaaaccgcgcaaagcttgacgagcttgcaaactatctttatgaaaaggaaaccatcaccggcgccgaattcatgaacattctcggcaaataaatcaaaactcgttttccgctcccaaagtaagctttgggggcggtttttgattattatcacggctttttacccattatatgtgcgaaaaggtcagacaaaggtcaaattctttcgaaaaaattttttaaatccccgattgccgaaaatctttgttttcccagtatttatgcgggtttcggcgcgtcggaattttgtcgctcgccgcaatttgtgaacaatttgtaaatttgactatatttgaccttgacattctttgacctttgctgtatactgtgtaacagaaagagaaaaaaggagcttgagggcttcgggaaaggctttgaaagttcccttcgggcacaaagaggtgccgaccgaaagggagcgaaagagccgaaagcccggccttgaattcctctcaaaatattgaaaagagttgaacggaaaaatgagaatgagcgatatggtggcacaaagaattttggagctgcttaaggagcaggacggctttgccgaaataaaaagaggcgagcttgccgaggacctcgggtgcgtgcccagtcagataaattatgtgctgacctcgcggttcacgcccgagcacggatacaccgtcgaaagccgcagaggcggcggcggatatatccgcataacccgagtcaaggtcgaccgctccaccgccgtcatgcatcttgtcaactccatcggcgacagcattgactttgccaccgcaaaggcggttgtgggaaatctttccgaacagggatttatctcccgcgacagcgcgtcggtcatgctggcggcaatgaacgatcattgctatcgggggcttcccccgcaggtgcgaaacgcccttcgcgccaacatcttaaaacaaatgctcataagctgaatgaaaggaagatatatatgctttgtgaaaaatgcggaaaaagacaggcaaccacacacatcaaaaaatccataaacggagtttacgaagaacatcattattgcagtaaatgcgccgccgaaaacggagtggaaagcttcccctccttcggcgccttcggagaaaacggactgttttcctcgctgctgggtctgcccttctcggcacccgctcagcgatcggcctccgacgcggtacgctgcccctcctgcggaacctcctttgccgaaatatcccaaagcggcagagtgggctgcgcgaaatgctatgacaccttcagaaagcagctgctccccaccgtcgagaggattcacggcagagccacccatgtgggcaaggctcccgaaaccgagctcaccgaagaggacaaacgggaaatgaagctttccgagcttaaaaacaagctgaacgccgcagttgaggctcaggaatacgagcaggcggcaaaataccgcgacgaaataaaggaaatggagggcgaacaaaatgagcagaaataaatggtatgaaaaaagcggacccgagggcgacatcatcgtcagcacacgcgtccgtctcgcaagaaaccttaaggattatcccttcccctcaagaatgaccgccgaccagataaactgcgttaacaaggcggtttgggacgccgttcccgacaaggaaaactatgattttgtcgagctttcctctctttcgtcggccgagcggttggctctttgtcagcagcacctcataagccccgaatttgccgaaaagaacgacggccgcgcagtcataatgaataaagaccgctcgatttgcataatgctttgcgaggaggatcatgtccgtattcaggtgctgtgcgccggatttgaccttaaagaggcctacggagccgccgaaaaaatcgagtcggcactcgaaaagaagctgcactttgcctttgacaaggatttaggctatctcaccgaatgccccacaaatctcggcaccggcatgagagcgtcggtcatgattcacctgcccgctcttgaggcggcaaacggtattgaggcattgagccgcgcggtcggcaaaatcggtctgacgctgcgcggaacctacggagagggctcgggagccgacggctcgctttatcagctgtcaaaccagataaccctcggtatcgacgaaaaatcggcaatcgaaaatctttcggccgtcacaaagcaggttaccgaaaaggagcttgccgcccgcaaaacggtgaacagagactcccttgaggacaccgtttaccgctcgctgggactgcttaaaagcgcacggatgctgtcgggagccgagctttcgaagcacctgtcaaacctccgtctcggaggcgcaatgggcatggaggacatcccctcccccgaaattctcaacacccttgaaaacgagctttgctccggcgaaattgccgcaaaaaacaaggactgcaacacccccgaaaagcgggacaaaatccgtgccgccgccgttcgggaaaaactgaaataattatttttcatccttttaaaggagttgatttgtatgtataaattcaacggatttaccgaaaaggccaacagagccttaaaccttgcaatagaaaaggccgaaaccatgggtcacacctacatcggcagcgagcacctgctgctcggtattcttgccgagggcaccggcgcggccgcaacccttttggcctccgagggaataaccgaggagaaggttgccgagctgcttgccgaaaaggtcggagagggacttcccacaagtctttcccccgacgacttcacaccccgctccaaacgaattctcgaaatgtccattgccgccgcccgctcgatttcgggaggatatgtgggcaccgagcacatactgctcgccattatcgaggagggccagagctatgccgtcgcattccttaaagagctcggcgtaaaccccgaggagctttcctccaaaattctctcggcctcggagggcttttcgggcgccggaaagagtgcgtccgcaggcaaaaagtcggacgggaaatgccccacccttgacaaattcggcagagatctcaccgccgaggcaaaggccggaaaaatcgaccccgtcatcggcagaggcgaggaaattcagcgtgttatacaaattctcacccgccgcaccaaaaacaatccctgccttatcggcgagcccggcgtcggtaaaacggcaattgccgagggtcttgcccttaaaatcgccgacggcgaggtgccggaaattctcgaaaacaagcgggtggtctccctcgaccttaccggcatggtggccggcaccaaatacagaggcgactttgaggagcgcataaaaaccgcacttgacgaggtcaaaaagagcggcgacgtcattcttttcatcgacgagctgcacaccattgtgggagcgggctcggccgaaggctccaccgacgccgcaaacatcttaaagccctctcttgcccgcggcgagcttcaggtcatcggcgcaaccacccttaacgaataccgcaaatacatcgagaaggacgccgcactcgagcgccgtttccagcccgtcacggtgggcgaacccaccgaggaggaggccgtggaaattcttaagggactcagggacaaatacgaggctcatcaccacgttaaaatcaccgacgaggccataaacgccgccgtaaagctttcctctcgctatatttccgaccgttatctccccgacaaggccattgaccttatcgacgaggccggctcgagggtcaagctgcaaagcatgactccccccgaaaacatccgacttcttgaggacgagataaagacaatttcggccgaaaagaccgccagcgtcaacgctcaggattttgagggcgccgcaaagctgcgcgacagagaaaaggaaaaaaccgaacagcttaaaaagcttaaggaacagtggcacgaaagcaaccgccatgcgggcggcgaagtgactgccgaggaaatcgccgaaatcgtatcgggctggacgggaattcccgccaccacccttaccgaggaggaggggcagaagctgctccgtcttgaggacaccctccacaaacgtcttgtgggacaggacgaggccgtcagcgccgtgtcgagagcaatccgccgcggcagggtcggtcttaaagaccccaagcgccccaccggctcattccttttcctcgggcctaccggcgtcggtaaaaccgagctgtgcaagacccttgccgagacaatgttcggcagcgaaaacgccgtcatacgctttgatatgtcggaatatatggaaaagcacacggtgtcccgtcttgtgggttcgcctcccggatatgtgggatatgacgagggcggtcagcttaccgaggccgtccgcagaaagccttacagcgtggtgctctttgacgagatcgagaaggctcatcccgacattttcaacatcctgctgcaaattctcgacgacggcgtgctcaccgattcccagggtcgcaaggtcaacttcaaaaacaccgtcataatcatgacctccaacgtcggcgcgcgggccatcagcgagcagaaaagcctcggattcggcgacaaggacacggcggcaaaggacgacaaaaccattaaggacgaggttatgaccgcccttaaggctcagttccgccccgaattcctcaaccgaatcgacgacatcatcgtctttaagcagcttgaaaaggacgacatcaccgaaatcgcccgccgacttctcaaggtgttgtccgaccgtatcttcgacaacatggagatcaccctgtcctttaccgaaaaggcggtggaaaagcttgccgacgcgggctttgacaaggtttacggcgcacgtcctctccgccgagccattcaaaacgccattgaggattcgctgtcggaggaaattctgtccggcaagataaagagaggcgacaccgtcctttgcgacgcaaccgacgaaggctattccttcactcccgccgcctcggcaaaaccgaccggcgacgccgaaaagagcggagaaaaataaaggaacagcgcactttgccaaataaaaacggccgtcgaccgaccgccgtttataaaaccgagagcagccgcaaaaggcgaattgccccaagctgcacagacggtgcaaaaaagcctgcctgatgcagcaaattaaattttaagaaacaaaccgatttcgtttttcaagcggagtcggttttgtttttttataggttttttcgaaagaaaatgccctgttttcggttaatacacgggacgagtctttcagcatgatttttcttgacttttttttgtgtatatattatattatattatatatgtacattgcggtagtgtcggtaattgtattcggcgatacaccactcttccgcggtaccctttgaccgggcttcgaccgcaggcccgtttgcggcattacacatcttgacgaattttgccgaaaaattgcggttaatatataggaggtgtaaacacccatggacatcgtatcgctactgatcggctttgcggtcggcgggcttgttttcggaatcgcatgtttcttcgccggaataagccaccgcaagaaaaaagccgagggtatccttgggtccgcagaggaagagtccaagcggatactcaatgacgctctcaaaaacgccgaagccaagaaaaaggaaaccattcttgaggcaaaggatgaaattcatcgtttgcgaaccgaatccgacaaggaaaaccgcgagcgccgcagcgagctgcagcgtcaggagcgcaggctccagcaaaaggaggagtctctcgacaagaaaaccgacaacatcgagaaaaaagaggacgccctccgcgcccgtcaaaaggaaatcgaaagccgcttgaatgaggccgaagagcttaaaaagcgccagtttgaaatgctggaacgtatttccggtctgaccaccgagcaggcaaaggattatctgctcaaaaatcttgagggcgagcttgaccacgacaaggccctgcttatccgagagtatgaacagcgtcttaaagacgaggcggacgaaaagagccgtcacattttatcccaatgcatacaacgctgtgcagccgaccattcctccgaggctaccgtttcggtggtgccgctgcccaacgatgatatgaaaggccgcataatcggccgcgagggacggaacatccgtgccatagagaccgccaccggcgtcgaccttattatcgacgacactcccgaggcaatcaccctttcctgcttcgaaccggttcgccgcgaaattgcccgactgacccttgaaaagcttattgccgacggacgtattcaccccgcccgcattgaggacatggtggaaaaggccagacgcgaggtggagcacaccatcaaaaaagagggcgaacgcgccgttcttgaggttggtattcacaacatacatcccgagcttgttaagctgctcggaaagctccactaccgtacaagctacggtcagaatgtgcttaaccactcccttgaggtctcctatctttcgggacttcttgcggcagagctgggtgaggacgaaactcttgcccgccgcgcgggacttcttcacgacatcggcaaggcgcttgaccacgaaatggaaggctcccacattcagctgggcgttgaggtggccaagaaatatcacgaaagcgaagccgttgttcacgcaatccacgcccatcacggcgacgtggaggccaagacggtcattgcctgtcttgttcaggctgccgacgccatttcggccgcacgccccggcgcaagacgcgaaaacatcgaaaactatatcaagcgccttgaaaagcttgaggaaatcgccatctcctttaacggagtggagtcctcctatgccattcaggccggccgcgaggtccgcataatggtcaagcccgaggtcatttccgacgatcagatggtcatcacggctcacgacatcgtcaaaaagatcgagagcgagcttgattatcccggccaggtaaaggtcaacgtcatccgcgaaagccgcgccgtcgactatgccaaataaaatttaatcaaatgcaaatactcccttcggtcaaaccgaagggagtatttttttgccgacaatcctgtttttcgaaaactaaatggcgaaaaagcgccgtccgaaggccccgagggaaaagccgaaggtcttttgctttacctcctcgcaggcataaagctcttttgtcataagcgtctcgccgtcaagggaaaataccgcgtgtcccaatatccgaccctttgcgacgggagcgtcgacggacggttcaagctctatttttacctcaatatcgccgcctctgcccttttcggtcagcaggcggttattttttgccccctcgagcttaacataggacttttgcccgccccttaccggcacctcaagcagcgcctcctccccgatttggggaaaggcggtctcaaaattcgcaaagccgtaattgagcagcgcctttgcggcggtgaatcgcaaatcgcttgtctggccgtcgagaataaccgccacaagctcggtgccgttcttttttgccgaggcggtaacgcagtagcccgccttgtcggtggttccggttttgaggccggtggctccctcgtaaaatcttatgagcttgttggtgttgacaagctgcgttttgccgtttcgaagggtgtcggtccaaattgtggtgtaattttttatgacatcgtgctttaaaagctcgcaggccatttttgccacgtcggccgccgtgctaatgtggccgtcggcgtcaaggccgcttgcgttgacaaaatgggtatccttcatgccgagctctgccgcccgcttgttcatgagaacggcaaaggcctcctcgctgcctgcgatgtgctcggcaacggcgaccgccgcgtcgttggcagaacccacggccaccgccttcaaaaggtcggaaagcaccatggtctccccttcctcaagccatatctgagagccgcccatggagcaggcgtgttttgaggcggtgacggtgtcattaaaggatatttttcccgactcgacggcctccaccgtcagcagcatggtcattattttggttatggaggcgggcgggcggcgactgtcggcgtccttttcaaaaagcaccgtgccggttgacacctcgcaaagcagcgccgacgaggccggaatgtcgggcatgacatttcccgaggcgggaagcacgggcggctcctcaaagctttcatagagggtatcgttcatatattcggtgaccaccctcggctcccctgcgaaagcgttttcatcggcgcagacccccgtttgaacaagcaaaagggcaagcaaaacggcggcaaagacccttgtttttttcatcttcttcctccttatttcctcccccgaagggctgcttttcgcaagacctgcgaaaggctctcccttatcggggctttttttaatttttatgaaaaaaatatttttttattactttgttgcatggttttatgcaaccgacggcccttttcgggaccgttattgtaagccgcacgacggcttgcatatgtaacaggtgctcaaggaggacagcgatatgaaaccgaaagaaaaagaattctgtgagcttttttgtcagacggcaaatccgagggaggccgcctttcgggcggggtataagctcttccccgaaaagaaggccttggcgctgcttgaatcggaggaaatacaaagccgcatcagacagataagagagaaacgcttttcggaaaaagacgattttaaagccggtctgaggcgcatagctttcggctcgattgccgacgcagtgaagcttatgctcgccgacagcattaccgaccgggaaatcgaaggactcgaccttttcggaatatccgaaataaagcggcaaaagggaggcggcatggaaattaaatttttcgaccgtctcaaggctctcgaaaagctttcacagctggaacaaagttcagaatccgctgtcctcccgcccttttacgaggctctcaaaaagggagccgaagccctgaaagagggagaacgcgatgaactttaagcccttttcgagaaaacagcttgagctgctttgctggtggaccgagcagagcccctataaagaccgcgacgcctgtatttgcgacggcgccgtgcggtcgggaaagacgctttgtatgtccatttcctttgtgctttgggccttttcggccttcagcggcgcctcctttgccctttgcggcaaaacggtgaccgccctcaagcgcaacataatcgttccgctgtgcgaacagcttggggagctgggctttcactgtgaaatcaaggcctctcaaaaccacatgatcgtgtcaaagggggcgcggttcaaccgattttactttttcggagggcgggacgagtcctcggcggcgcttattcagggcatgaccctttcgggagcgctgcttgacgaggttgccctcatgccccgctcctttgtggagcagacggtggcaagatgctcggtgagcggctcgaaattttggttcaactgcaatcccgagcacccgcggcattggttttatcgggaatggatattaaaggccgagcaaaaaaacgccctgtatcttcatttcaccatggatgacaatcccgcactttcggaagacattcgaaagagatacgaaacgctctattcgggggctttttacgaccgattcgttaagggcctttgggtggcggccgacgggcttgtttatcccatgttttcggaagaaaaatttgcgcgggagaccgaggaccgctttgacgaatactacatttcctgcgactacggcacccttaatcccatgtccatggggctttggggggtaaagggcaaaaaggcccaccgcatggccgaatattactattcgggaaagcaaagaggcgagcaaaaaaccgacgaggaatattatgccgagctggaaaggcttgcgaagggcagaaacatttcggccgttatttgcgacccgtcggccgcctcattcatgacctgcatacgccgtcacggaaaattcaatgtcattccggcaaaaaactcggtgagagagggcataaaccttgtggccgaagcgctcagagaggggcggctgtccttttcaaagagctgcgccgacacattcagggaattttctctctaccgctgggacgaaaacagcgttaaggactgtcccgtcaaggaaaacgaccacgccatggacgacatacggtattttgtttccaccgtgctttcaaaagaggaggactgctttgccgttatttcggtggacagatagtcaaacatgaagcttcattttacatacaaaaattaagaaaaggagaatttgatgaaaccatttgatttttttaaggcacggtctcaaaaggaagaaattcccgcctttgtgccggccgtggcgaaatcgggctgctgtttttcggcctttgaccgatatgtgccgctgggcaagccggaattcggactttacgactcggttcgcgagggcatacccattgtcgacgcggcgctgtcaaagctcgtgagcctgtcggggggacttaaggtgacctgtgccgacgagcgggcgcaggagggacttgaggattttctgtcccgagtgcccgtgggcgactgcatgaacggtatagaagcctttatcgcccaatatctcgacggacttctcatgtacggcacggcggtggccgaaatcgtgccctcggccgattttgacacggtggcggctctttattgctgcccccttcaaagcatcgagcttttgagaaaaaagggcggcggagtcgacattgcggcgctctgcggcaccgaattcaaaaaggtgaaatatcccgagcttttcaccgtcagcgtactcggtcccaaggccggcgagctttgcgggaattccctgcttcgcagccttccctttgtggcgggtgtgcttaccaaaatctatgaaaccgagaaggtcaatttcgaacgcatgggaaacctgcggtttgccgtgacctacaagccctcctccgacccgtcggacaaggcctttgcgaaggacagagccaaacagatggccgacgcctggagcaaggccatgcgggaaaacaaggacggacgggtcagcgattttgtggcggtgggcgatgtggacatcaaggtcatcggcgccgacgcaaaaaccctcgactgtgaaattcccgcgcggcagatgaccgagcagatagtttcgagactgggaattccgccctttatgctggggctttcgtggagctccaccgaacgaatgtcctcggagcagtcggatatgctgacaagcgagatttggggataccgccgcataatcaccccggcaatcgaaaagatatgccgaatgtggcttgccctcggcggctttgacacaggcgtcaaaatcgatttcgaggacatttcgctcaaggacgaggtcgagcttgccaaggccgagctttaccgtatgcaggccgagcaaatcagacataaaatcgaaaacgagaaaggatgatttttttgaaggaaggttttataaccgaaaaaagcggggcgcccaccgaggccgagcttgaaaagataaatcggctctcccgcagaatactcaaagccgacgaggtatttgttttctcggtggtgctttgcgacaacgacgtggacagggactttgaacggttcagcgagcagtctcttaagactcttgccgctctctatatcggaaaaacaggaatattcgaccattcgtgcaagggacgggatcaggtcgcccgtatcttcgatacgcaggtggaatatcccgacggacagcagaccaaaacaggagagcgctactgccgtttaaaggccagagcctatatgccgaacaccgcgaaaaacgccgacatgattgccgaaatcgacgccggaatcaaaaaagaggtcagcgtgggatgtgccgtcgcaaaggcggtttgctcggtgtgcggcaaggatcagcgggaaagcccatgcagccacagaaagggccgtttttacggctcgggggcggacaggacactttgctattacaatctcgagcagcccaccgatgcctatgaatggagctttgtggccgtcccggcgcagccaaaggccggcgtcacaaagggcttttcccaaaggaagggaggtgaacaaatgaatttcgaccaaatcgaaaaggaacttaaaaagggttcggtcacctttaccgaagagcaatgcaaactgtttcgagaagaactttccgagcttaaaaagcttgcctccttcggcaaatgccagctggaaaatctcagaaaggaggtttcccgtctcggcggtatcacaaaccccgacatcggagccaaaaactttgagaaattctgcgaaaatctcgagcccgaaaagcttttcacccttaaaaagctttttgaggacgaaatcggcaaggattatccccttccccgccaggtaaatccccaaagcaaccgcgaaaagccccaaaacgacaaatttattatataaaagaaaggacaaaaaattatgtcatacgaaaatatcactctcgaaaaaggaatgtacaacgtcagaggcggaattaccgccgccctggaatccatcgacccctcggaaaactataaaggcaccgaccttgagggactggacgccttccagcgccagctcaagcgttttgacatcaaggtggcggggccctgctccgacacggtggaaaaattctactcctcctcgtcggcagccgcacttttccccgaatatctctgccgttcggtcaagacgggtatgcaggagaaaaacctgctcagcaagatagtcgccgccaccacccacataaacggcatggactatcgcagcattgtcagcaaccccgccgactcggctcttgagcttaaggaggtcgccgaaggcgccgccattcccgagaccaacgtttcggtcagctcctcccttgtggagcttaaaaagcacggacgtatgctcaccgcctcctacgaggctcttaaattccagcgccttgaccttttcaccgtcacattaaagcagatcggcgcccacatcgcaaagcagcagttcaacgacgcaatcaccgctctgaccaccggcgccgccgcctccgaccccgccgacaaggacaagttcggtcttcccgacgtcatgaagctttggcaggctcttctcccctatgagctcaacaccctcatcgtcagccccgacaacatcaccaaaatgatgtccaacacctatttctccaattccgatttcggcatgaagataggctctcccgacggctttaagacgggtctcggatttgacatcatcatcgcaaaggatcagcagaagctggccgtgggctttgacaaaaactatgctctcgaaatggtggttgcacaggacatcgccgtcgacagcgaccgtcttatcgacaagcagctggagcgcaccgccatcaccaccatttccggcttctccaaaatcatcggcgacgccgtaaagacccttaacttcaccgtcacccagaacacgggcgcttaatatggatatactgctgatttttgagaccttccgcactctcacggggcttccccgtgacgaggcggtggggtggtataccctttgcgacgcggactgcgaggacctttcaaaaaaggtaaagcccgaggcgctttgcgaaaagaaccgcgttgcactttgttcggccgcggccgccgacgcctttcttaactatgttttggtgtgcgccgcaaccgagggcgacaccgatttctcggccggcgacgttacggtaaaacaatcggccgccgaaaaaataacagcggcgactcagctcaaaaattcggcctttgccgaaatcagcccgctgctttgcgaccgaaacttctattttgccaaaacggaggaggagcaatgaaaaatcccgccaaagccctttcaaaatacattgcaaattacggccgcacggtgacgctgtcggcagacggcaaaacctactcggctccctaccgcgcctttatacagcctctgcggtataaaaacaagatgtatcttatgggcatacgctccaaaataggccgtatcgaccaatctcattttctctatatcggcccctgcgaggtgagtcttacggatatttcggcggactcacgaataaaatgcggaaccgacaaatattacatcgtcaaggccgaaacggtgtggaacggggacaagcccttttacaactgggcggtcattcggacggttataggagaggaggccgggcaaaacggttagtctgagcaacatcattctcaacacaaaaacaaagctggaagccaaggaaaacctttccgacatcaactttatttgcggttttacgggagaggtcaagcccgcccccctcacgggggaatatgtcgccataggcattaaagacgcctatgagcaggtaaaggagatatattccgacaccgaaccctcaacccttctttacaatcggcaattttcggcgcggctttcccttgacattttcgtgcccgaaacctcaaacggcatcgagtgctataaaatgttcatgcgtatttcaaactatgtcgagtcgctgtcggacgaattcgcctttgcggggtcgggctgcggcacggttcaatatgaacgggacgaaggcgcctttgtgctcaacgcctatatagacataaaaaaagatttcaaaaaataaattttcgcctccataacgaaatccccgctccgaatacacggaacggggattttgctttgatttgtttatatgcttttgcactcggcctttatttcgtcgaacttgtcggtaagctccttgtcgggagccttggtcagcaggctgacgacgataatcacggcaaggttgagaaggaaggcgggcagcagctcgtatatgtcgagaattgtgccggcaaaggcgggacggacgaggaatttccagataaagaccatggctcctcccgaaaccattccggcgacggctccgtatttgttggcgcgtctccagaagagggcgcagagcaccaccgggccgaaggcggctccgaagcccgcccacgcaaaggaaacgatacggaaaaccgagctgtcgggatttctcgcaaggaagatggcgattatcgaaatgaccacaaccgaaattcgcgcaagcagcatggactttttaaccgacagcttgacgccgaagctttcctgaacaaggttttcggaaatgctcgaggcggcggcaaggagttgggaatcggcggtggacatggtggaggcgagaatacccgcaaggactattccgcccgcaaaggccgcaacatagccgtatttactcaggaatttggcgatgtccacaatgacgctttcggcggcggcattgtcggcatagcttggcacgattccgtttttcatgagagaaaatccgataattccgataagaatggcaactcccatggcaatggtcacccaaaccgaggcgacgcggcgggaaagcttaagctttttctcgtctccgattgccataaagcggagaagaatgtggggcattccgaaataaccgagtccccaggcaagggtggaggcaaccgtcagggcattgtaatttccggtcacgcccttggccacgtcgtagccctcaaaaacattgagatagcccgaaagctcggaaacgttggcgaaaaccttgtcgaacccgccgatgagaccctctccgaggccgagcacgataagcagggcaaccgtcatgattatgctctgtacaaaatcggtgaaggaggcggcgaaaaatccgcccagcgtgcagtaaagaatgataaccgcggcgcttattatcatggcggtcatgtaatccattccgaaaagggaggaaaagagttttccgcaggcgcaaaatcccgacgcggtgtagggaatgaagaaaaccactatcatcagcgcagaaatgcaggtcagcacctttttaccgtcgccgaaacggcgggcaaagaaatcgggaatggtgaaggcgtcgatgcggtggctgtaaacgcgaagtcttttggccacgaaaagccagttgagataggttcctattgcaagacccaccgccgtccaaaaggcctcgggcacgccggtcataagggcaaggccgggcattcccataagcagccagccgctcatgtcggaggcttcggcgctcatggccgtcacaagggggccgagctgacgtccgccgaggaagaagtcggaggaggttttgtttttcttgctgaccgcgaaaccgatggctatcataatcgccatataggccagtatggtgatcagcactatccagtcgtttgttgtgaacatttccgtcacactctccttaaatttttgttaacgggcaaagtataccatacggaaacacagaatacaatacagaacagagtacagaacaaattctgtactctgttttaatgttttggttatttttcgctttatttcgcggaaaagcgacaatactttttaatatactcgacttgatacaaaaaataaactttttatttttttatttttttattctttccatgaaaaagggcataagacggccggccgattccttaagggaaaattcgccgttgcacagcccccaatcgtatataagcgaccgctcgcaaaaggcatagtaacgcacaatgtcgttgaccgtttgcttatcggtcagctgacccgacttttgccccgcaagcaccagctttcgcagcaggcggtagtaaactcggttgtggtcgagaagctgtttttcgcccttggcggtcagctgcataaagccgcttgacaagctcgagatcaaccgtgttttcaagcatatcgaacagctcgcggtttaaaaaaagcagctgctccacacaatcgccgttcacgtcgaggctcggctcaaggctttcgtatttttggtcgaaaaggtcggcgagggtgccgagcaatgcgtccttaccgtcgaaataatgataaaacgagcctttcgacgtgcccgattcgaaaatta

SEQ ID NO: 1425 - DNA, 8122 bp, Unknown
  16S sequences of unknown bacteria
gctggacgcatacagtccgctcgccgtgctgcggcgcgggtataccatgaccgtcaaggacgggcgcgtcgtcaggtcgtcggcagagctgcatgccggagaccgcatccgcgtgcgctttggcgacggcgtgaaagacgcagtgattgcagaggaggatgacgatgccaaagaaggaatcatttaaacagtccatggacaggctggacgagatcatcgccaggctcaatcaaaatgaggtggagctggaagaagccatcacgctgtttgaagaagggctgaagctggtcaagcagtgcgacgcccggctcaagcagttcgaacagcgcgtcagcgtattgagcgaggtcaaagaagaggaggggcaggatgtctgattttgaagcgtatctgcgttcgctgaaagaaggatgcacgccttcgcgcacggtggacgcgatgttttattccctgctcggcgggggaaagcgcgtgcgcccgcggctgttgtttgccgcgctgcgcggatacggcctgcctgagcagacgggctatccctgcgccgcagccatcgagatgatccatacatattcgctgatccacgacgatctgccggccatggatgacgatacgctgcgccgcgggcgcaagacttgtcatatcgccttcgatgaggcgacggccatcctcgccggggacggcctgctcacggatgccttttcgatcgtcctgcgctgcgcgtgcacggatgcgcagaaggtgaagctcgtctccctgctcagcgaatacagcggcagcggcggcatgatcctgggccagacgctcgatatcgcagccgaagcaatgcaagagctggacagggcgcagctggaggagatccatctgcacaagaccggttgtctgctcacgctgccgctgctgtgcgcggccgtgctggcaggacatgaggaagatctgccgatcctgaaacagatcggcagcctgatcgggctgtctttccagatccaggatgatgtgatggatgtgacggagagtcagcagcagctaggcaaatcgaacagcgacatcgccaaccacaaggccaccttcgtcaccctgatgggcgtggaggatgcacgtgcgctgagcgatgcgtgctatcgtgaggcaaaggcgctgtgcgcgcagcttcacctggatacacagggactgctgtctctgttcgatcagctgagagaacgccgcagctgatctggcgtaaaggagggacaaggatatgcatgtctatgacatcagcggacctgcagacatcaggcagctgtcgatcaaggaactggaggcgctggccgctgagatccgtgcctttctcatcgagtcgatctccaggacgggcggccacctttccagcaatctgggcatcgtagagcttacgcttgcgctgcatgtcgtctttgattctccgcgcgaccgcatcctgtttgatgtcgggcaccagagctatgttcataagatcctcaccgggcgggcgcggcagttctctacgctgcggcagtataagggactgtccggctttcagaagcgccatgagagcgagcatgactgctgggaagcgggacattcgtccacatcgctttccgcagcgctgggcatggcagtggcccgcgatctgaacggggaacactatcatatcgttccggtgatcggagacggcgccatggccagcggcatgtcgatggaggcgctgaatcagatcggcggtgaagagcggaacatgatcatcatcttcaacgacaattccatgtcgatctcccgcaatgtcggcgccatggatgtcgcctttacccggctgcgcaccagccgctcatacacgacgctgaaaaatgacctgcagcaggggctctcgaccagcagattcggccgcagcctgctgaaggggatgaagaacttcaagaacgccatcaaagacaatgtggtcgacacctcgatattcggtgagttcaacctggattatatcggacccatcaacgggcatgatctctctgagctcatcaaggtgctcaaggtggccaagcagcataagggaccgatcgtcgtccatgtgctgaccaagaagggcaaaggctatccatacgcggagaatgacaaggaaggcgcatggcatggcgtcgcgccctttgatcccaacagcggcaagccgctcgcagcgctgccggctgggcattgttcctggagcgaagcgatcgcgcgcatcttgtgcgatctggccagggatgaccgcgatatcgtcgcgatcacaccggcgatgaaggccggcgcgaagctggatgggtttgcccgcgaatttccgcagcgcttctttgactgcggcatcgccgaggagcacgccatgacctttgcggccggattggcggcaagcggcaagcgcccgttcatctctgtctattcttctttcctgcagcgcgcttacgatcagatcaatcacgatgtggcccgcatgaagctgccggtcgtcatcggcatcgaccgctgcgggctggtcggtgaagatggagagacccatcacggcgtctttgacatcacgatgctgcatgccatccccaatctgatcatggcgcagccaaaggatgtgcaggaggccagggcgctgatgaagacggcgttcagctgtgcgcagcccttctgcatccgctatcctcgcggcagcgtgccgtatacgaaggaagaaggagagccggcgccggtggggacatggacacgctgggccccgcagcgcgaggcgcgtgtctgcgtcatcagctacggcagcgatatcgaccgcatcatctccaaggtcagggccaatgacatgccggtggagatcgtcaacgcccgttatttcaagccgctggatgaagcgatgctcgatgatatcctgtatcgctccattccggtgatcgtctatgagagcgatatgctcgatggcggattgtccagcgccatcctgcagtatatcaacgatcaccgcatctgctgccatctcatccggatcggcatcggcgatcattatgtggagcaaggcagcatcccgcagctgcggcgcgcggagaagatcgacatgaacacgctgttcaaggagctggaggagctgtgcgcatgaggctcgatcaggcgctgagcaagatgctgcagacccgaagcagggcgcaggatgccatccgggaagaacgcgtgcgggtcaatggacagctcgtcaccaagaacagctttcaggtcagtgagacagatcatatcgaagtcatagaaaaggaagatgacttcgtctcccgcgccggcgcgaagctcaacggcgtattggatgactttggcatctcgctgcatgagcgcgtcgtgctcgatgtcggcgcaagcaccggcggcttcaccgacgtctgcctgcgccggggcgcatcgctggtctatgcgctggatgtagggcatgatcagctgcatgaacggctgcgcagcgatccgcgctgcgtcaacatggagggccgcaatgccagggcgctgcgcgcagactggtttccccggcccatcagcttcatctgcatggatgtgtcattcatctcctgccgcacgctgctgagcgtcatcgcgaaggaactgccgaagacagaggcggggatcctgatcaagccgccgtttgaggcgggccggggatacttgaacaagcatggcatcctgaaggatgacaatgtcatcatccgcgtgctgcgcgaggtctgtgaggaggcggcgcggctgggctggagcgttcggcatctgaggaggagcccattgccgggcagagacggcaaccgcgagttcctcatgcatctgtgcggagaagacaaacaacggacatacgatttcagagcgctgctcagcgagcactgacgatcaaacatggaggtgagagatgtgctgacacagatttacgtgaagaactttgtgctgatcgatgccgtcaggcttgacttcgacagccgcatgagcgtctttaccggagagaccggtgcgggaaaatcattgttgatcgatgccatcggcctgctttgcggacagcgggcctctgcgggctatgtcaagaaaggggcggatcgcgccctcatcgaaggcgtgttctctctgcggcagagctctgcggcccgtgccatcctggaagagcagggattcgacatcgacgaagatgaactgatcatcagccgggagatcaacgcggaaggcaaaagcagcatccgggtcaatcagcgcgcggtcactgccgctttcctgcgtgagctcactcctcacctcatcgatatccactctcagcacgacaaccagtatctgctgcagagcaagtaccatctgcgcctgctggacagctattgcgccgatgacgcgctgctgcaggaagtgcgcacagcataccgtgcgtatcacggcctgcaggaaaagatgcagaagacgctggcggaagagctcaacgaagaagacctcgatgatctcacggaacagctcaatgagatcgacgccgccaagctgcgtggggatgagcccgctgagctggaggagcgcatccatgtgatgaaccgcgccgaaacggtgcagaagcagctgttggaggcgctggatctgctggatggggatcatggcagcaatcctgcgctgtatcgggcggtgcgcacgctggaaaatgccagcgacctggacagcgtcgctgcacatgccaaggcgctgagcgacgcctattatgagatcgaggagcacatcagcgcgctcaggacgctgctcgatcatatggagtatgatgcgcaggcgcttgacgatatgcaagagcggctgtttctgtatcataagctgtaccgcagatacggcggcacatatgaagcggtcatggcgcaccgcgctgagtgcgaagcgcgcatcgacaggatcctgcaccgccaggaatacctcgatcgactgcagcagcagctcgatgaggctgaagaggcttatgagaaagcggccggccgcctgcatgcgttgaggacggaaatggctgagcggctggagaaacaggtcatggaacagctgcaggatctgatgctggagcatgcccgcttccgcatcgccatcacgcccgcaaggccatcttcctcaggcagcgatgccgtcgagtttcaggtggcgatgaaccgggaacagtcatttaccccgctgagcaagagcgcttcaggcggagagctgtcccgtctcatgctcgggctcaaatgcgtgtttacccgtctgcagggcatcgagaccgtcatcttcgatgagatcgacaccggggtgagcggccgtgtcgcgctggccatcggccgcaagatgcagcagctggccgaagacacccaggtgctgtgcgtgacccatctggcacaggtcgcggcctgcgggaatcagcagctgctcgtggagaagcaggatgatggcagcgtgaccagcacgtccatccacatcctggatcatgaagcgcgcatccggcagctcgcgctcatcgcatctggcagcgtgagcagcgcatcgctgcaagcggccggcgaattgctggaaacggcacacaggtaatattatcctgaatgaatgacacccccgggggctacaatagcgcttaggaggtgttttttgatgaaaaggcgcttcgctttcctgctggctgcagtcctgctgtttttccccgtcagcgtctatgcggacgatgagctcatcctgggcggtgacagcgtgggcatcgagatcggctatggcgggctctatgtgagcggcacatacgatatcggtgaggacatccatccctcagatgtcttcaagcccggggacatcatcacatcgctcgaccatcggccgatcaacgatatggatggtttttatgcgatcttaaagccccgccaggatccggtcaatgagatcgccgtgacgatcaaaagaggggatgagacgatcgagacgacgatgaagaccgtattcgatcacacgcggcataccgtgacctgcggtctctatctcaaggagaagatgaccggcgcaggcacgatgacctattatgaccctgccacgcagcgctatggcgcgctggggcatgaagtacagggcgtgccggaatcttcgcagggcgagctgtatgaggcgagcgtgctctcgttcacccgcgcgcagcgcacacaggccggcgccaaacaggcccgcatcgacgcagatgcgctgatcggcacgatcgatgcgaatacgcccatcggcatctacggcgcctatgagcaggtgccagatgaagcgacgatgcttccctgggccgcgcacgatgaggtgaagctggggaaggcgcagttttataccgtgcttgaaggcgagcagatcgaggcgtttgacatcgagatcaccgctttgtaccccaacacgcaggatgacatgaaggggatcgagttccgtgtcacagacagccgcctgctcaaggagagcggtgggatcatccagggcatgagcggttctccgatcgtgcaggatggcaagatcgtcggcgcggtgacccatgtcgtgacctcttccccagatcaaggatacggcgttttcgtcgaatggatgctgcagcacacccgatcttcctaaaaaacgaccaaaatcgacctttcttcggaaaaaagacgcaaattgcgtgcagagcgtcgcttatgatccgttttccaatgaaatcttaagaaattcacctttgttcgacaccgtttgcgattccctcctctataatttgaattgaggagttggaaaataatggaaacaaaactgcaaatctatctggttgatgacagccaggatatgattcaaaaaatgaaggacggcctgcggtcaagcaagctgttcgaagtcatcggaagtgcgctgaatggggaacagtgtctgcatgagctgcatgcgcacaccattgacattctcgtgctcgatctcatcatgccaacggtagatgggatggaggtgctggccagcctgaagaagcatcatatcgaggtccggcacatcgtctgtacgacaccgatcctgaacgacttcatcatcagccagcttcagcgctatgatgtcgactacatattgatgaagccctttgagctggattcgctggaacagcgccttcgggtcatctgcggattctcgccgaaagtgccggcaactgacccgatgatccaggtcaatctcgatgcggatgagcagcagcgcatgcagaagctcgaactggaaagcgagatcacttcgctgctgcatgagatcggcataccggcacatatcaaaggatacatgtatctgcgcacggcgatcctggaaacttatctgaatgtggatttcctcggacagatcaccaaggtgctctatccggagatcgcccgcaaatatgaaacgacggcaagcagggtggaacgggccatccgacatgcgatcgaagtggcatggaaccggggaaacatcgatgcgatcgatgatatcttcggctacacgatctccgcatcgaaggccaagcccactaattccgagttcatcgcgatgatctctgacaagctgcgcctggagcaccgcctgaaaagccgcaaggcttttgttccacagtatcgctgaacatgctataataggggaacgaaagcgaggaatgatgatggcgggacgagtgatctttcatgtggacatcaatgcgtattttgccagcgcggagctgttgaagaattcggcgctggaaggccagcctgtcgctgtggccgggctgagcagacgcagcgtcgtatcgacggccagctatgaggcacgcgcctatggcgtgcacagtgcgatgccgctgcacgaggcgctgcgaaaatgtccggatctgatcgtggtgcagggagactatcagtggtatgaagagctcagccgccgtttttttgactttctgcgccgctttacgctgtcggtcgaaccggcgagcatcgatgagggatacatggatgtcacggagaccatccgccgttaccgccgtccgctcgatctggcctggcagatccagcaggggctctatgatgagctcaggctgccggtaagcatcggcgtggcgcccaataagtttctggcaaagatggccagcgacatgcgcaagccgatgggcatcacgatactgcgccgccaggagatcgccaggaaactgtggccg

SEQ ID NO: 1426 - DNA, 3961 bp, Unknown
  16S sequences of unknown bacteria
agcttttcgctttcgccgctataaaagttatgtaatccggtagttacggaatggactacaaatcctgtggcgtaaagaataataaagagaattagaatatatctcggtatgctgtccttattctttttgtaaaaagctattgccttattctccaatatctcaataattttagacaggcgcacttaaaaactctcctttctcggttatatacggctttgtttccttaacatacagctcggacggcagccgcagtatttcctcggcggtgtcggtacttaacgggtgcagcaccgcccttttgccccttaatatttcctttactgcgtttacctgccagtcaagcagaaatatatgcaccccgtactccgccgccgtttccatccgcggtatatccatatctatgcctattaagattttttccgccgcgtcgtaataattcttttcgggcggtttgtatttcgcctttaaaatgctttcggctatgatccttcggtggtcgcggacggatattatacgcatttgtctggcacccgcctgtgacaaaggaaagaatgtaaccgggcaatcgagccgacgaacggcacttaataccggcagcgctcttgaattggtggtcttgcgtgcggaatattctataatcctttcaaggtttttatctcccgtaaatgccgcggcgctttttctgccgcctgttaaaatgttcattgtaaaggtattgcgctcggcttcggggtacaagccgtcgttttcctcggttatgtagtacacggcgcgggcggtgtttttggtatataacattccgttaaagcgtgccgtgcctaatggattcttattcttttcacgccttaaagcaaaggacggtaaaaatgaaagcggactgtttcggtcgggtacggagctgcaaaatacatccgtctttccgccgaagaagaataacatcaggttagcggtgttcaatctgcgaataagatagtttcccattccgcggcttttgctgtcataatcaaaatgcaagccgagattatcaagcgtatgtttacccgattccgttatacggacgctctgaccgttacggcttattcttaactgccccgcagctgtcaaagcccttaaattttctttgtttaaaaatgtgcttccggcaggtaggtctctacaccaggcacataatttcaaaagctcaatttctgcattggtgtataacacaagcgcactacctcccatacccgtgtaacatttgtcttttaaaacggtcagattttatccagaaaactccctgtttatgcgcagtttagtattgtgcgcttttttttaaaaccgaaagcctgaaatttgccgatttttttaagcttgcgcactataccaattcgtgcgaaagccgcatatccgtaaatattccggcttcatcatccggcagtacaaagatatgacaggcgctctcattccgctgctcggtaaataatccgagggacatttcaaagcggtcgtcatccgggaaaagcctgccctttaaaacattctgtaccgccttaaagcccttgttgtcgtggtcaaaaacatcgctgcaatcccgcgggcagaactctattattccgagatacgctttgctgaaaaacggcagctttattccgtcaaactcggcagagtttaaaagccttaaaatactgtcggtcacatactgcgtgccgcctgttactctgcaatggggcagcagggcgttcagctttatatgtacccacccttcgggcgttacggatatttctccgtatatttcctttgccttgccgggcttaatttccgtgcttgtttcttccttgcttttcagttgccagtaaaggcggcgcatttcaatacacgccatttcctgctgttgtaatgctacctccagcagattattaaagcgttcgctttccggcggcacgcctattagcgaatccacgcaagccacgcttgccaaaactcgctttttcatttctttaagtaattgaaaatttgtaaacaatttaaaaatcctttcataattattgactttttaaaataatcggttataatataattaagattatcataatttagattatgcaatatggacggtgatataaaatgaaatttctcggaagagaaaaagaaatccttgaccttgaaaaggaatatgccagagacggcggctttgttgtaatatacggtcgcaggcgtataggaaaaacaacgcttataaagcagtttataaagagtaagaccgcattttatttccttgccacgaaagaggttgagtctcagagcatgaaacggtttgccggagtaattgccagaacaacgggcaattccgtactgcaaaaagccgctttttcggattggctggatttatttcaggccgttgccgattacaagccgaacgagaaaaaagttttggttatagatgaatttccgtatcttgtaaaggtaaacgactctttcccgtcaatacttcaaaacgcttgggacgaaattctcaaggacagcaatgttatgctcatactttgcggatcgcttataagtatgatgaaaaaacacgcgttatcctatgaaagccctctttacgggcgcagaaccgcacaaatgcgtatagcgccgctgccgtttacaaccgtttatgaaaatcaaaagctttcatttgaagaagccgcagagcaatactcaataaccggcggagttccgaaatatatggaatttttttcagacggacagcctctctatgaacagataaaggaaaatgtactttcaaaaaacggttttctttatgaagaacctaattttctgcttaccgacgaggtacaggtcccgacaaactatttttcaataatcaaggtcatagccgacggaaatcataaattaggaacgatagccggaattttgggtcttgaaacctcagcgctgacgccgtatttaaagacgctttccgaactcggctttatagaaaagcaagtacccgtaaccgaaaagaatgcggaaaagacacgcaaggggctttactttatttcagataattttctccgtttttggttccgttatgtttatccgtataagggcgagcttgagcttgacaatacgcagatttctttagatgagcttgacaaggatttcaaggaaaagtttgtcgcctttgcttacgaggatatttgtaaagaaatattcgcaaggctttgttcagacaaagcaatcgactttacgccatctaaaatcggctcatactggctgaatgataaaagtggcaacacgcagattgatgttatggctgttgacacggtaaacaagcgcttatttgccggtgagtgtaaatatcacaatcaaccgattgacgcggatgtgtactttgagcttgtcaaaaaggtcgataattcatccgaaatcaaatctgcttttaaaggctacacggtaatttacggcgtattttcaaaaagcagatttacaagccgtatgactgatataagcaattcaaatcccaatctatttcttattaacgaaacctcgatagtataattcaaaaaagacttattccaagcgggatgagtcttttttattttctttcccaacctgcaccaaacacatagtcacagtagcgaccaagccgccgaacattgctccgcacacaaaacatataactcccattttctattcctccgttcccttatattatttccgttgttccggttttactcttttcgcaaggctttcgcggtcggtggttataaggtcaaactcggtgtccgacgaacgtatctccaccgctatacggtttcgccccgcgcataaaagcccctcgcctctgcccgcgcggataacctccgccgtttcactttcggtaagcataagcttttcctgtaatttgaccgcctcggtttcctcaagctgtaacagcagtttaagtctgctgttgccgagtaatgcgtccccgaatttaccgtcgttcagcgcgaagtaa

SEQ ID NO: 1427 - DNA, 6672 bp, Unknown
  16S sequences of unknown bacteria
tcgttgacggtgacgatatgcacaccctcgccggtcagggcgttcaggtaggcgggcagggtggccaccagggttttgccttcgccggtcttcatttcggcgatgcgcccctgatggagcacgatgccgccgatgagctgcacggggtagggccgcatgcccagcacgcggtcggaggcctcgcgcaccgtagcaaaggcttcgggcagcagggcgtccaggctttcgccgcctttgtagcgctctttgaactgggcggttttgcccttcagctcttcgtcgctcagggccttgtacggcgcttccagctccaagatcttgttcacgatcggcttaatgtctttcagctcacggtcgctgtaggtaccaaaaattttatcaaaaagtcccatacgcttcttcctttcgggaatgaatttttagacacgttaatagttgaagtataccacagcatatccctatatgcaaaaggaaaaacgcgtttttcgcggcaaacgggacatttttacagattattcataaatattcagcaggacattgttccgtgaaaaatttgacgttaaaaattagattaagtgggcgcgtgaggtggaaaaggaaggcatatgcactaaaaggatccgcccaggtacagggaaaaaggagaagttgcagcgggaggggacgttttgctggacggggcaaggggggtatggtacagtggaacaaacatggggcggtaaagggggcgaggcaggatgcagggggcagcagagactgcgggcagtgttaaaagattaacgttaaattattaacaaataaaaatgaaaaaagttgtggaaaacgtagaaaagataaagaaagatcgataaaatcttgcaaaaaggaagcatcttgctataattttaaccatcgatctgaaaaataaaatttttaagtgaagaaagtgaggcaatcatatggaactgaaggataaggacatcgttattgtagggtatgcgcgatccgcaatcggcgactttctgggcggcctaaaggatgtttcgctggtagatctgagcaccacggtagccaaggctgctatggagcgtgccggcgtgaagcccgaggatgtcgatgagctgggtatgggctgtatctataagcacggcaacggaggaaaccccggccgtcaggtggaaatcaagtgcggcatccctgccgaagcatgggcctatacggtggatcagcaatgcgcctccggtatgaaagcgctggatatcgtccggcggagcctgctgacggacggctgtgagctggccgtggtggtgggcgccgacgttatgtcccgcgcgccgtatctttgcctgaacggccgcaccggcttccgcatgggtgatgtgaagatggtggatgccctgaccaaggaaggcctgagctgcgcgatcgcagggtatcatatgggcgttacagcggaaaatctggcagataaatacaatatttcccgccaggagcaggatgaactggctctgatgagccatcagcgcgccattgcagccatcgacagtggccgcggcaagcaggatatcgtccccattgagatcaagacccgcaagggcgtaacggtgtttgataccgacgagcatccccgtcgtgatgtcagcctggaaagcatggccaagctgcgccccgcgttcaagcccgacggcggcacggtgacagccggcaacgcctccggcattaacgacggcgcctgcgccatggtggttaccacggccagatatgccaaagagcacggcctcaagcccattgccagagtgctggcggtggagagcaaaggcgtgcctgccgaagtgatgggcatcggccccgcttacgttatccccaaggccctggaaaaggctggcctgacggcggatgccattgattactatgagatcaacgaagcctttgccgctcagttcctggcctgcaaccgcgagctgaagctgtccatggacaaggttaaccgcaacggttccggcattggcctgggccatcctgtgggcatgaccggcgcccgcatcattaccgcctgcatcagcgaaatgattgccagcggcgagcagtacggcgtggcctctctgtgtgtcggcggcggccccgccatggcgacggttctggaaattgtgtaatctacatatactttgcacattttgccgaatactgtaaaaaagatccgtgtccgcaactgcggacacggatctctttttgtgtttgtttttttacagctccacgctgccctgaaaaacgttttttgcgtcgccggtcatatacacggtgccgtcggagtcatagcggataatgacggtaccgcctttgaggtgcacggcaatgtcgcagtcgcgctcgcagtagccgttaagtacggcggccacggcggcggcacaggcaccggtgccgcaagcccaggtttccccgctgccgcgctcccacacacgcattttcagcgtggcccggttgatgacctgaacgaactcggtgttcacatggtcggggaagcagctgtgcagctcgaaagcggggccgactttggcgatatccaaagtgtccgcgttgtccacaaaggttacgcaatgggggttgcccatggagaggcaggtcacggaccagcacttgtccagcacttccagaggccggttgatgatcgtttcgccgtccatagaaaccgggatatgggccggatccaaaatggctttgcccatgttcaccataacggaaatcacagtttcattctggatgtacaaatgcaggctgcgcacaccgctgagggtttcaatggtcatgcggctcttacgcacgatgttgtgctcgtagagatatttggctacgcagcggatgccgttaccgcacatcttgccctcgcttccgtcgcggttgaaaatgcgcattttcgcatcggccacggtggaggggaggatcaggataatgccatcagaaccgatgctgaaatggcggtcggacaggattacgctgatggattcggggctgggaatctcatactgcatgcagtcgaagtagatataatcgttgccggtgccttccattttggtgaagtgaagcttcagcggcgttttgcgcatgcggttcagatccaccagctcggtgctttcctggctgtagcggctcaggagcgagcgggccagcgcgttggccgtgtccagagaggtcaggcaggggatacccagctccacggttttgcggcgcattttcacgctgtccagctggggcagacggcccttggaatcggtggagatcacatagctgatcttgccctcttccatgagggaaaccgtattttcctctgcgccgtcgctgaccttggctgtgtggtgcacggtgagtcccacggcttccaaagcccgggccgtgccttctgtggcgtacagcgcaaagcccagttcgtcgtatttgcgggccacgtccacgatttcatgcttgtcgctgtcgcggacggtgaacagaacgccgcctttcttgttcatgttgtatccggcagccaccagtcctttgtagagggcttcttccagattcttgccgatacccagcacttcgccggtggatttcatttccgggccaagagccacatccacattggtcagtttttcaaaggagaacacaggcactttgcaggctacatacggaggtgtgcggtacaggcctgtgccgtagcccaaatcgcggagcttttctcccagcatggtacgggtggccagatccaccataggcacgccggtcaccttgctgatgtaagggatggtgcgggaggcacggggattgacctcgatcacatagattgtgttttcgtacacgacatactggatattgactaggccgcgggtgttcaggcccagggccaggtttttggtgtaggcgatcagatcttcggtggttttgccgtccaggttccaggcggggtacacagcgatggagtcgccggaatggacgccggcgcgctcaatgtgctccataatgccggggatcaagatgtcttcaccgtcgcagatcgcgtccacttccaattccgtgcccatcaggtatttgtcaatcagcacggggttctcgatttcatggctgaggataatgtccatatattcgcggatatcatcgtcggtaaaggcaataatcatgttctggccgcccagcacgtagctgggacgcatcaaaacggggtagccgatttcattggcagctttcagcgcttcttcgcaggtcatcacagtgtggccggcggcgcgcttgatgtgcagcgtttccagcaattcgtcaaaacgctcgcggtcttcggccatgtcgatggaatcgccgctggtgccgatgatgtgtacgccgttgctctccaggaatttggtcagattgatagcggtctgaccgccgaaggcgaccacaacgccgtagggcttttctgtttcgatgacgttcatcacgtcctcgccggtcagcggctcgaagtacagccggtctgctgtgttgaagtctgtcgagacggtttcggggttattgttgacaatgacgacctggaaccctgcctcgcgcagcgaccagacacagtgcaccgaggcataatcaaattcaatgccctggccgatgcggatgggaccggaaccgaacacgatcacagtcttgcggggatcgttgcgctcggcaatgaattcggcggcttcgttttcctcgtcgtaggtgctgtaaaaatagggggtttcggcattaaattctgcgccgcaggtatccaccattttgaacacggcgggaatgtggcagggcaggggctggccggagatacgctcgatcactttgtcgggataaccaaatttttttgcggtgcggtaaagatcctctgtcagcggctgggtttccatctgcgtttccaggtctaccaaatggtgcagcttttccaggaaccacaggtcgatttttgtgatctcatgaatttcctggcaggaaatgccccggcgcagggcttcaaagatgacgaagagacgctcgtcatcctgatcgtacagtttctggtgcagctcttcgtcgctgcgttcggcctgcttttcctgacgcaggcaatccagagaaatagcggcgccgcgcacggctttcatgataccctgctcaaaactctggccaatggccatcacttcgccggtggctttcatctgggtgcccagcgtacgcttggcgtatacgaatttgtcgaagggccacttgggcagcttgaccaccacatagtccagcgtcggctcaaagcaggcaaacgttttgccggtaacagcgttgggaatttcgtccagagtataaccgattgcaatcttggcggccacgcgggcgatggggtagcctgtggctttggaagccagggcggaggaacgggatacgcgggggttgacttcgatgactgcgtattcaaagctgtcagggttcagggcgaactggcagttgcagccgccctcgatgcccatggcggtaatgatgtccagtgcggcagagcggagcatctgatactctttatccgccagagttactgtgggggcgatgacgatggagtcgccggtatggatgcctacagggtcgaagttttccatggagcacaccgtgatcacattgccgcggctgtcgcgcatcacctcgaattccacttctttccagccggcgatgcagcgttccaccagaatctgggtaatgggactcagccgcaggccagcttcgccgatacgttccagatcggcgcggttgtagcagatgccgccgccgctgccgcccagagtaaaagcggggcgcacgatgacagggtagctgatttcctcggcaaatgccagcgcgtcctccagtgtattgacgactttggaaggaatcactggctggccgatggcttccatggtatctttaaacatctggcgatcttctgctttgtcgatcgtatccgggtctgcgcctaacagcattacattatgttcctccaggaaaccggatttggccagctgcatagaaagggtcaggcccgtttgcccgcccagtgtggacagaatgctgtcaggcttttcttttttgatgatgcgcttaacggtttccagtgtcagcggctcgacgtaaatatggtcggccatggcgttgtcggtcataatggtggcggggttggaattgaccagaacaacttccaggccctcttccttcaacgcacgacaggcctgcgtgcctgcatagtcaaactcggcggcctgcccgataacgatcggaccggaaccaatgaccataacttttctcagttttggattcagcggcataaacgattccctccaagattcgaaatgatggatgatggatcacgaggcaacacctcggtaaataaacctttatcttaataagttaaccacacagacttatcctctgtcaatatcagaaaccgaaaactttttcgtcgttttgaggagattcccgtcgtttttttggagggaggatagatgctttttcgtatgcggagaagggagcggaaccgaggtgtacaatgcagggtggagaggactcgaattttgttcagaggagatggaggttccgtttttttccagccgctgtctaccatgtctaccggatgtctacccaaatgggaaagaaaaacaactgggggacaagaaatagaagaaaggcagcgacagcatctgccggcgaaatgtctaccaaattgaacat

SEQ ID NO: 1428 - DNA, 15977 bp, Unknown
  16S sequences of unknown bacteria
cccgcatagcgggtggttttttgtttcgcttcgctcaactgcctaaaggcatgaaatgagaaaaaaggccaccttccggtgacctttttcgacaggctgaggaccccgcaagcgcggggtcctgtttttgcgctagggagtgggggagaccgcgcattcgcgccgcagatagcgctgcgtgtagggacagaccgcaaaacagagcccgcacaggtccgtttcgatgccggtcgcccgcttcatccgctcaatctgcgcccttttgcaggcttccttgtgaaagagcgcttcgcgcgccatgccaggattccactgcgcgccggtcagcgcgccggccggacagcgctgcacgcagaccgaacaacttccgcagcggccctccgtcgcgggggcgtccggtggcagcggcgcgtcggttaagagacggaaaggcgaacggcgctgccgaacgcctctgtcaccagcagacagcttttgccgatccagcccaaccccgcccgcgtcgcgaccgtcttgtgcgggagcggcgttcgccagtccgcgtcctgatggacggctttcgtcgtgttggcgattgcgcgataccccctttcccgcaagaagcccgcgccgctggtgacgatgtcgttgagctgggcgtttaaggccgcataggcctccaggtacgcaagcgttggcgcggtttgcaggtcgcggacgatctctgccggcacgggaatcgccacggagacgcccaactgcaattcgcctgcgacgatgccgcgcaggtctgccacgcccatcagcgccgcgcccttttcccgcagcagagaaaagaacgcggccttttctgcatccgtcatccgtcccatcccctcttccaatcgtttgccctgcgcgggcgcagggcgcttgcgcaaagtatagcagatggggaggagaagggcaaggtttacaggtccaacccctgcacccactccgcgacggcgctctgcgcctcggccacgctgttgcgggagatggagagcccgtcctcgatcacggtcgcgccgggctgcagttcctggatggtggaaatcgtccgggagaagccgctgccgccgtggaccgtgaaagggaggatcgtcttgccggataggtcgaccgactccaggaaggtgtacagcggcatgggcaggtcggcgttccagttgggatacccgaggaagaccacgtcgtagcggctcagatcctccacctgcgcggccagggcgggccgcgcgccctcagcgagctcgttgtaggcgaactccagcagcgcgtcgtgttcgcccgggtaggtctgctccgtctcgatgcggaacaggtcgccgcccacctccgcctggatcagctgggcgacgtactggttgctgcccaggaccgcaccgtccaccacgacgcggctggccccggccacggcgtccacgccgtccgtctccggaacggagaagtaggcgatcaggatgccgccggaggcgtccgacgcctccggcgatgcggcgggcgaagccgggtcttccgcaggcgcgtcacttgcggcgggggactgcgcgggcgtctccgcgggggcctgcgcggtgggcgttgccggcgccggcgcggcgctgcaggcggacagggcgaggaccaagagggcggcgagaaccagggacgaaattcgcttcatcgctgcatgctccttatgtcgcgtgtgtgggggagggcgacggctgcggcgcatccgtcgcctcttcttccagcgggaccaattccattcgcacggtgccgtaggcatcccagagatccccggcgccgctttccgcatggcctacggggatgataggcacgaccgtctgctcgtagaagtcgtcgtagaagatggccaggtccgggccgggcggccagtagccgaagtcgccgacctcgtattcgcgcgtcgtctcctcgtccgtgacgagcgcgcggggcaggcgcacggccttggcaaagccgttgcggtccatgacggtgaactccagcgggagcatggcggcaaggtccgcggcggcgcgggagtcgttgatcgtgatccgcacctcgacctcgtcggccgtcagccggatctgccgcccctccacgctctcgtactccccggggatgggcgaggggaggggcgttcccggcggcgtgcccgtgcacccggtcaatgccaggagcagcaggccgcaaaggagcgcgctcgctcgtttgcgcatgtgcaattcctccgttttcttgcgtctcaggggaggaggcccaggccttgcagccagggctcgatgccggcctcgtcattggcggtcagcccctcggcgatggccgcctccgggcagagctccgaaaagatgtgcaggctgttgtcgatggagtcgctcgcgctcgtgcagaagggcacgatcgtcttgccggaaaagtcgtagctctccaggaacgtggcgatcatggccggcgcctcgtcccaccagatggggtagccgacaaagatcgtgtcgtattcctcgacgttgtccacgctgacggtgatctccggccgcacgccctgcaggatctcttcttccgcctcctgctgcaggtcggcatagtcctccgcccgctggatctgcgcgagcgttccgccggtgcgctcggcgatctgctcggcgaccgcctccgtgttccccgtgtgggagaagtaggtgacgagcacgtttccctgcgccggcgcgtccggcgtggcggtgggcgtcggggttgcggtctcttctggctgcggcgagggcgtcgcctcgaccgtcggggcggcggtggcaggggccgtggttgcgggcgccgcgctctgcgccggggggcttccggccgcgcaggcggacagcgccaggacgagcgcgagcgccaaagcgatccccaggggcgttctcttccaaatcatgcttccatcctcctttttccttgcggtttacacccgggcgttgcagtagtccgcgatgtcttcgtagatgtcgtagccgatcaggggcgtaaagtaggcgcggccgacctccatccacaggaagaaggtgctctccgggatctcctccgggctcgaatccctctcgtttgcgttgtccaccaggacaaacgcggggtagagcaggatcaggccgcggatctcgtcggcgtgctccgccgcggcgagggcggagacggcgccgccctggctggtccccagcaggaagatccggtccggatcgacaaagtccagcccctgcgccatcgcaaggatcgcctccaggtccgcctgctcggtgaagaccgacatctccagcgtcgtgccgtcgctgcggctgcccgggttcctgccgcagaagtcgaagcagtagaccacgtagccccgcgccgccatcgcctcggcgtactgcgcgcaggaccgccaggagccgccaaagccgtgggagcagaggagggcgggcatccggtcccccgtaccctgggggacgtagagcacgccgtagatgcgctggccgtcccgctcggtccagagctcctgcgtttcaaacgcgtagattgcctcgtcagagacgaggggcgccgcctgcgcgcagagcaggaggacgaggctgagcaggaacgccgtccagggggatttcctccctcgcttcaccgccttccctgcgccgttacaggcactcgcagaggatctcatagatttcgtcccggctcagctcgtgcgggccggtgcggatcacgttgcaggtgtccgcgacgcggcggagcagcttgggcgtgatctccaccttggaggcgagctggctgagccgtgtgggcaggccgcacgcctggacgaactccgtcagcgcctgcaggccctcctgcgcggtccggcggccgaacacctcctgcgcaaagcgcgtgaacttctccggcgcataggggaggatgtggcggtagtacgcggggtggatcaccgcgaggccctggccgtggttgcagtccgtgtacgcgcccagctggtgctcgatctggtgggcctggaagtccgtgcggcggccgaccttcaggatgccgttttccgccatggcggagtcccacatcaggttgccgcgcgcctgcatgtcgtcgatgttctcgagcaggcggcgcatgttcgtcacggtgttgcgctggatcgcaagcgccacgtcgtcggacacgttgtccgcgtccgaagcgcccagatacgtctccatcgcgtggctcagcgtgtcaaacgcgccggagaggacctgcatgcgcggcaccgtcgcggtgtaggcggggtccagaatcgaaagggaggccgccgtcccgacgatgggccccttccagagcttgtcctcgcaggtgatgaccgcgccggagttcatctccgcgcccgtgccagaggccgtgaccaccgcgcccatgggcagccccgcggaggggaaggccccgcgctcgtactccatcttccagaggtcctcctcgagcacggtctgcgcgcagatcaccttgcagcagtcgatcacgctgccgccgcccaccgccaggacgaagtccaccccgcgctcccgcgcgagcgccgccccggcctgggccttggcgtaggtcgggttcggctggatgcccgggaagtccacgacctccttgcccgcctccaggagcaggcccttcagctcgtcgtagacgccgctgcgcttgaccgagccgccgccgtaggccagcatcaccgtgcggccgaccttggccagctcctgccacagcgcctgcgcggcgacaccgtggccgaagtagaccttcgtgggataggtaaaggtaaaggcttccatacttctgtcctccttcttctcactttgctgcgaatttccgggccgtctcgtcgatgatctgcatggcgttcaggctccggggatagccgatgtagggcaggcactgctccacgacgctgtagagcttctccgggccgttgcccacgccgaagttccccgccgtgtggccgcggagctggttctcgcacccgccctgcgccagcaggaagcagaacgtgatcatctcccgctccgcgtcgctcagcccgccgcgggtgtagtagtcgccaaagcagttggccgccagccaccggttgacgttccgccgcaggggcgggcagtccgtctggcgcgcggccatccccgggccgaagagctgcacctgcttttccaggcctgcggagaaccgcgtggcggcgtccgtcgtcccctgcgggggcaggggcagcggaacgccgtgctgctccaggacctcgtttgtcgcctccaggaagtcgcgcacgcgcccgatccccaggtacgccgtggcctgatacaccgtctccttgaccgccgccgggtccagcccgccgcgcagcgcctcgccgagcatccggcggtactcgcccgggccctggcagcccagcagcgtcgagaggacgcagagcaggcgctcccgctccgtcagccggctctcggccgggacctccgccccggaaaagtccgctgcgatctgcacccattccggatcggtcgcaagcagccggcccgcctctcccgcgaactgcgcccgccgcgcctccatcttcttgtcttccatgcttgcttgcctcctcgctcctgcgtgcagcccttgcgctgcaccgttgaccgtgctatactccgattgcatcttccggttgatggatgtgagtatagattccggttgttacaaccggtcaaggggtttgcggaagattttccggaaaactttttgtgaacatagaggtatgtcggatgtacacgatgatggaggcctgccgggagacggacatgacctatcaggcgctgaagttctactgcaacgaggggctcgtccccaatgtcaagcgggacaagaacaaccgccgcgtctttgacgagcgggacgtgaagtggattcgcgacctggtgtgcctgaagaagtgcggcatgagcatccaggagatgaaggcctatctcgacctgtgcctgcagggcccgtcgaccatcccggcccgcaaggagatgctcacgaaaaagcaggaggacctgcgccgctccattcaggagctggaggagagcgtcgcctacatcgactggaagcagaacttctatgacgaggtgctctcgggcaagcgcccctacgtgagcaacctcatccgcacctgaagcgcgagtttcaaaatcgtttaagattcgttattccgcagtttaacggcgcggcgtaccatggacggcagaaaccgagaaagggggacgccgatccatgaacgacaccatttcgccggacgccgaaaccggcctgcgcgccgaccaggtggcgcaaaagcgcgcgcaggggcggcagaacgtcctggacgaccgggccacgaagtccacggcccagatcctgaaggacaatgtctgcaccctgtttaatctcttcaacctgcgcatcgccgcggcgctggccctggttggcgcctggtcgaacctcctgttcctgctggtcgtggccctgaacaccctgatcggcatcctccaggaggtccacgccaagcgcctggtggagaagctctcgctcctgtccctgccgacggcacgggtcatccgcgacggcgcgcccgcggagatccccacacaggacctggtcgaggaggacgtgatcgagctggagacgggccgccaggtctgcgccgacgccgtcctcctcaccggggcggcggaggtgaacgagtccctgctgaccggggagtccgaccccgtgcgccggtccgcgggcgagcacctgctctccggcagctttgtcgtcagcggccggtgccgcgcccgcgtggagcatgtggggaaggagaactacgccgcccgcatcgcccaggaggccaaggccctgcgcggcgtgcgctcggagctcttgacctccatgcgcaaggtgacgcgccttaccggctattggattccgttcctgggcgtcctgctgttcctggaagcgctgtttctgcgcggcgatcccgtgcaggacgccgtcgtcgcaacatccgcggggctgttgggcatgcttcccaaggggctggtgctgctgaccagcgtcagccttgccgcgggcatcatcgccctgtcccgttccggcacatctccgagcccctgacgaccctggccgagggcgtccgccagatccgggacggcaacctcggccatcggatcgcgcacgcgcagcgggacgaattccagccggtctgcgaggcgttcaacgggatggccgaccggctgcgggcctccgtggagcagtcccagtgcgaggaggaggggcgaaaggagctgttggccagcatctcccacgacgtgcgctcgccgctgacctccatccgcgcctacgtcgaggggctgctcgacggcattgcagatgcgcccgaaaagaggcctctgcggaggcgtacgcgggccgcgggctgcgcgcccagtgctggggcatcccgccggacgtgtacatcgaggcggaccccacctattttcgaagcatcctgacgaatctgctggacaacagcgcaaaataccggaagggggagcggggccgggcgaccatcgcgggggagcgggccgggcggcagatccgcctgttcgtggacgacgacggccccggcgtgcccgaggcggcgctgcccaagctgttcgacgcgttctatcgcaacgatccgtcccggaacaatcccgaccagggcagcggcctgggccttgccatcgccgcaaagagcctggagcggatgtgcggctccatccgcgcggagaaccggcccggcggcgggctgcgcatgacgacccacattccacttgcagggagggactagcgccatgaagcgaattctcctcatcgaggacgacgaaaccattgccgccatcgagcgggactacctcgtgctcagcgactttgccgtggacatcgccgcgaccggcggcgagggcctggccctggggcgcaccggcaagtacgacctgatcctgctggacccgatgctgccgggcctggacggcttttccgtctgtcacgcgctgcgcaaggcgctggacatccccatcctgatggtcaccgcccgccaggaggacatcgacaagatccgcggcctgggcatgggcgcggacgactacatcaccaagccgttttcccccagcgcgctggttgcgcggatcaaagccagcctcgcgcagtacgtccggctcaagggcggcgcggggcgcgcgcagatccagatgggggacatccggattcaggaggattcccgccgcgtctttgtggagggctgggaggtgacgctgaagaataaagaatacgaactgctcctgttcctgatgtccaatccggacatcgtcttcagcaaggaggcgctctacgagcggatctggggctgcgacgccctgggcggcaacgcgactgtcgccgtgcacatcaaccgcctccgggagaagaccgaaaaaacgccctccgagccccgccacatccagacggtctagggcgcgggctatcggttccggccatagagaaaggggaaacgcgctatgctctggttggggtttgccctcggctccgcgttctttgcggggatcaccgccgtgctggccaaggtcggcatgaagaacgtgaactccacgctcgccactgcgatccgcacggtcgtcgtgctgatcttttcctggtggatggtcttcctcgtcggctcgcaggcggaaatcgcccgcctttccgggtgcacgctgttctatctcgtcctgtccggcctgtcgaccggggcctcctggctctgttacttccgggcgctgcagctgggggacgtcaacaaggtcgcacccatcgacaagtccagcacagtgctgaccatcctcctggccttcctcctgctgggggagcccgtctccgcgccgcagatcgtgggcgtgctggggatcgggaccggcacgctgctgatgatctcccggaaggagacggacaccgagggaaagccggacggcagatggctgctctttgcctgcctgtccgcgctgtttgcgagcctgacctcgatcttcggcaagatcggcgtggagggcgtggagtcgaacctgggcactgcgatccgcacggtcgtcgtcctgggcatggcctggctgatggtctttgtcaccggccagcagaagggcatccgccgcatcgggcgcagggactggctctttctcctcctctccggcctgtccacgggcctttcctggctgtgctattaccgcgccctgcaggacggcccggcgagcgtcgtcgtgccggtggataagctcagcatcctggtgacgatcgttttctcccgcctgatcctgcacgagaagctgagccgccgggcggccgtcggccttgcgctcctcgtgctgggaaccggggccatgctgctgtgagcccgagggaaccccggcgcaaaggacccgcgagcgcgtaccggcgcctgctggcgaacgtcttcctcttcggcctgggcagccttgggtccagggtcctcgtctttctgctgaccccgttctacaccagcatcctctcgcagacggaatacggcgtgacggacctgctgatccagacggggaacttcctgctgcccctggcctcgctgggcatcggcaacgccgtgctgcgcttcggcgcggaggagaggatgcaggcggacggcgccttcaccgcggggctgatggtcgtcacggcgggcaacggcgtgctggcgctgtgcagcccgctcctgcagcgcatcggctttgtgggggagtacgcggcgcttttgcagctctacggcctctgcgccaatctccacgccctgtgcggcgccatggcccaggcgctcgggcgcgtgcggctctacgcggcgacgggcgttctctgcacggccctggtcgtggggctgaacattctgctgctgtccgtgctgtgcatgggcgtcgccggctacatcctctccaacgtcatcgcggacgcggtgtcggcggcgacgctcttcttcgccctgcggctctggcggtccatccggctaagggcgctgccccgcagcctgctgcgcgggatgctccgctactgcctgccgctgatccccgcgacggtctgcacctggatcatcaacatctccgaccgctacttcctcactgatgtgctggggagcgacgtatccggcctgtatgcgctggccaacaaggtcgcctccatcctgctgatcgcctccggcatcttcacctccgcctggcacctctccatcgccgcgggccggtcccgggcggagaaggagcgcttcttctccaacgtgttctccgtctatgaggcgtgcgtctggaccgcggccgcggcgctgatggcgtcctgccggctgatcgtgcggtttctggctgcgccgggctacttttccgcctggcgttatgcgccggtgctgatcctggccacggccgtcgcctgcctcggctcgttcttctcgtccgtctacgtcgccgaaaagcgcagcgccgcgacccttgcgacctccgccgcgggcgcgctggggaacctcgtcgggaacgccctgctgatcccccggtggggggccatgggcgcggcggtggcgacgctgctgagctacctgctcatcttccttgcgcgggcgctgcacgcgcagcgactgctgcgcatccgctgggcggtcgcgcgctccctcctttgcgcggcgatcctgggcgtggggtgctggctcatgcagggcgagcgcctcgcggcgtccctgctgtgctgcgcggccgtcgcgctgctctgcgcccggccgctcctgcgcgcgctgcgggacggcgtgctccccctgcgccgccgcggccggggagacgcctaacgcaaaaaaccgcgatccgcaaaccctcccaaagagggcctgcggatcgcggttgtctttccgtcacgccaggatctgcgcgatgtccgccttccagcagaggctccggtccgcgatctcccgcggagcataggcgtccgtcttgctgatgcaaaggtatttcgccttggggttctccgcaacctgctgccagaagttgaacttgatgatgccgggcgtgttcaggcccacgcccagctccagatagagcgtggacgcatttttgtgccggcggacgaagtcccggtagcgcccggccgcgcggtaccagccctcgtcctgcacaaagcggtcgtccgcgcgcaggttcatctccatgggcgcgccgcagaccgggcagcgggggacgagctcggccggcacgcgcaggttctcctgcgcttccagcatccggcggaccgcctcctcgttgtcgtaggtcttgtcgtgacagggcttggagcactgccaaaggccgtagtccccctgcgtgtagaacagccggcgcttgtcaaagcccgccttctgaaagcagtggtccacgttcgtcgtcaggacgaaatagtccttgcccgcaagcagcgccaacagctgcgcgtagaccggctttggcgggtccgaataccggttgcacccgatgaagcggctccagtaggcccacttttcctcctgcgtggggaaggggtagaacccgccggtgtacatgtcgtggaagccgtatttcgcctcgaaatcggcgaagttcgcgcgaaaccgctccccgccgtaggtgaagcccgcggcggtggagagccccgcgcccgcgcccacgaggacggcgtcggccgcctcgatctcctgcgcgagccggctagcggccggcgagcagtccttcgtagattcgaagatcgcgttcctgatatacattgaagatcacatccatttcgtgttgcagggtcttgcgcgccacgcgcacggtctgcacggcgatctgcgccgcccgcgcgctggggaagtggaactccccggtggagatgcagcagaaggccacgctgcgcgcgccgtgcgccgccgcgagcgccaggcagctccggtagcaggcggcgagcagcgcctcgtcccgcgccgtgggccggttgcgcacgatgtgcccgaccgtgtgcaggacgtaccggcttggcaggttgaaggcgggcgtgatcttggcccggcccgtcggctccggatgcccctgcgccgccatgagctccgcgcaggcgaggcgcagctgcacgcccgcataggtgtggatcgcgttgtcgatgcatccgtggcaggggacaaagcaccccagcagcgcggagttcgccgcgttcacgatcgcatcgcagcgcagggtcgtgatgtccccgcgccaaaggcggatgcccggctcggcctcggggatccgggccgcgtccgtgacgcccttgcgccgcgtctcctcctgcaggtaagcatcctgcaccgcgaggaagtccgcgggcgcggggaccggctcccggacgttgcacagcgcgcgcagcaggcgccgctgcgccgtctcgtccccgggcagggccatcgtctcgccccgctcgcgcaggagaaactccaggaggaagcgccggcgttcgtcctgcgtcatgctaggacctcctctccaccgcgccgaccgggcagtgctcctggcagctgccgcagtgcaggcagtgctcctgctcgatgcggaacggcgcgccctccgcgatgcagccctgcgggcagtgcgccgcgcacgttccgcagccgatgcaggcctccgtgatccggaagcccttcggcgcgaccggcttggccccgagcgcatacgtctgccggaagatgggatgcaccccgaggtggaagtattcgacctgctcctcgcggatggcaaagacgatgccgatctcccgcgtgttcccgggatagacgttcgccaggtacggctgctccgcaaagatctggtcgatccgcatccgctgctcctcccgggcgacgggcgccgcccggccggagaggcggatcctctccttgtacttcgtgtagcccaggacctggacccggccgtcggccagcagctcgcggcagaagtccttgccccgcgccgtgaagaagtaaagcccgtccggctcgtaatggatggcgctgatgttgcgcacctggggcgcgcccgccccgtccaccgtcgcaaacgccagcacgcccacgtattgcagctttttcaaacacgcctgcaaatccatctcgtcttcctccttctgtcaaaaccgcagcacgcgcccggccttgcggggcttgggcgcggggtgcgcgtccccctggcgcggatagccgagcagcagctgcatcaccgcgtagtgcgtcgccggaatcccccagctttgcagcgtctcctggccaaaggggtctgcgaacgccgtccacccctggccgatgtagcacgagccgatccccagcgcgtcggcggcgagcatcatgttctccgcggccgccgcgcagtcctctgccgcgaagaggaagttcttcggcgcaaagagcgtcacgaccgtgggcgcgccatagaacgcgtccgcaatgcgcgcgtcgtccgcgatgctgggctgctcgcgggagacgaagctcgtctctgtctccatgtgcggatgggaattcgtgcgcttgatgcgccccagccgctcgttgaccgcccggtcctggctcacggcgaagaggacgctctggcgcccgcccgcgctgggcgcccagagccccgcctccaggacctgccgcagcgccgcctcgtcgacctgctgcggcgaaaaccgccggatcgagcggcggtgccgaatcgtctccaggacgtctgccatcctcactcaacctccttccagcactgcgggtccggcgcgtaaaagtccccgtcccgcccgctggccaccgccggacatccccggcagtaggccagcaattcgcactttgcgcacttggagaaccggttgtagtcgcggtaggcctccatcggcccgatccacaggtccgccaggcggtcggcgaacacattgcccacccggctgttctgcacgcggcggcaggcgtagacctcgcccgtgggcaggatcgtcaggtggcagttcccgcagttgcagccgccgtagatcatgcccggccgcgcatcctccggcaggcggaaggcgcccgtctcgtatgcatacagcgtccaaaggtggtccttcttgttgaagtacgtctcgcagcccgccgcctcataggcccggaacttgcggtcgcagtcctccagcagcttgcggtagcgcagcggttcaagccccacgtccttttcctcgctggtcgggcaatagcgggcgaaggcgaagacgttcgcgcccgcctgcacgaccgcgtctgcgatgtcgggcacctcgtcgatgttcgtgccggagaccgtggtcatgatcacgctgcggattccggcgcggttgatgcagccgatcttttccagcgtgctggcgaagctccccggcttgcggaaccaatcgtgcgtcttttccatgccgtccagagagagctgatacttctcgcagccgagcgccttcagccggcggcagaccgcgtcgtccaggtgaaagggatttcccaggatcgtgaacgggatctgcagctcgtgcagccgctccagcaggcgccagaagtccgggtgcaggatcgggtctccgcccgtgatgtagaagtaggggaggcggccgtacgcccggcagaactccaggcagttctccagggtcttctgcatctgctcccaggtcacggcgtcgagcttcttgcaggcgttttcggaaaagatgtagcagtgcttgcaccgctgatcgcattcgtcggtgatgtgccactgaaaggcgaaataagacttcattttgcaggaccttgctgtatatccggaatcgggcgcgcccgaaggaaaggacggaatcggtcccggcagaccgagcgccgggacccgtcgggaatgggggagcggcttacttgtcggctgcgccgcaggcggaaccgcaggccgcaggcttctgctcgggcttgccggccgcgccgcaggcggaaccgcacgcggaaaccgtgcgctccttgttccattcgatcaggttcttgagtgccatgtcgcattcccacgtgttttggattcagcgggctgtgcgccctctgtgatttccattgtacgcattttctttttttccacaagtacgcacttttttctcactcggttaccaaatggtaaccgagtcgggcgcattgcataatgcgccgggcgatggtacaatgccaaaaaagaaagaccgggcgaaggaggcgccgatccatgcggacaagggaagagatgtccgcctgccccgttgcgaccaccgtccagcgcatcgggagcaagtggaaattgttgattttgcgcaatctgctcgcgcggccctggcggttcaacgagcggaagaaggaccttgcgggcatcagccagaaggtgctctcggacagcctgcggccgatcctggacgccatgcagcgctggggcgagggatacaaggcctcgctccgctgacggacggcggtccggaatgggggccgtttccgcgaagggcgcggagacggcctccttttttgcgcgcgttttgtcagggcgcggcgctatcccgcatgccgtcgaggatctgcgcgatcatccggatgacggccagcaggtccgcgtccacgcccgcgccggcctcaatgcgccgcagctcctcgagcacgcgccccagctgctcccggagcgccttgtagacccggggattgccctgcacgaccacctcccgcgcgagcagcctgcgcgcgatgtagtcctgcttcgtcaggcccgagagctgcacaaacgactccagcagcgcgtcctcctcgggcgagacgcggaaggcgacggtcttgttccgccagcggttgcgctcgtcccgtcgttttcccgccatcaccagtcgcccctttcctcgttgagcttgtccgccatctccgcctgcttggaggggaacaggtgcgcataatggtaggtgatgtcgatgctctcgtggcccacgcggtcggcgatggccgtcgcggaaaagcccatgtcgatcagcagggagaccgcgctgtgcccttacggtataattacgacaaaccggaaaagccccgtatatcaagggtt

SEQ ID NO: 1429 - DNA, 22183 bp, Unknown
  16S sequences of unknown bacteria
caaaagaacttggctctaccgcttgacaatgtaaaaaaaaggaagtataataaatgaaaatccgaacaaacgttcgcataaaaatagaagaaaggagtggagagatggtaaaaaaggtctattgtccgaagtgcgggcacttggaaaaaatctatatttagaagaaacagacggttggtttctatgcagccattgtcatacacaagtaggttaactttgaggcatgaggagaaggaccgttgttccttctcctcatgccgaaaaaagcagaagaggtgaaagatgaaaacagaagacatgaaaaaattgcattcgccgggtgcggcatatcgggcgaagcccttttggtcgtggaacggaaaacttgacgaaaaagaactcaaatttcagatagacgttatgaaggaaatggggttcggcggttttttcatgcattcccgtacagggcttgaaaccgagtatatgggggaagagtggttttcgctgattcgttcgtgttccgagtatgccgcgtctttggggctggaagcctggctttacgacgaggatcggtggccgagcggaacttgcggcggtatcgtgacgcaaaagcgggaaaatcgtatgcgttttatctccgaataccgctccgacgaaaaagcggaggcctgtccggacgtggagcggattattgcccgttatgccgttcggctcgacggggacggacgactttcggactgcaaaaaggtttcctgtaaaagcgagacgccggaaggctacacgtatgccgtgtatgcggaagaactgatgaagtgcaccggtttttacaacgattcggcttatctggacaccatgaacgaaaacgccgtcgaagagtatctgcgttcgacgcacgaccgttacgcggaaaagctcggagatcttttgggcaaaaaattgaaaggaattttttgtgacgagccgcatcgcggcgaaatcttaaacgggttcggcattacaaatgaaaatcagtttgcgatgattccgtttaccgacaaggttttcggggcgttttacgaaaaatacgggcgcgaggtatgtatcccgcggatttattacgggaaatcgggggaagcaacgaatgacgaagccgccgcatatatcgacgttctcgacgatttgttcgtccgaagttttgcccgcaaatatcaggagcgctgcaaaaaatacggacttacgtttacggggcatattttgcacgaggacgaattgtcgtctcaggccgcgatgtcgggctcgatgatgcgcttctacgaatacatggattatccgggcatagataaccttaccgcgcacaacgactgttattgggcggcgatccaatgcgcgtccgtcgcgcggcagcttgaaaagccgtttgtgctctcggagctttacggctgtacgggctgggatgtgccgctgcgggaatataagcgtatcggagactggcaggcgctgttcggcgtaaatctcaggtgcccgcacctttcctggtacacgatggcgggcgaaaccaagcgcgattatcctgcaagtattttgcaccaaaacgcttggtacaaagattgggatttgctcgaaacctatttcgggcggataggcatgattctgtcggggggcgagagaaaggccgatttgcttgtgattcatccggtcgagcagatgtggaaacttgtgcgcaaaggctggctgtatgcgcttacgccgaaaattccggaggtcgagcggctcaacaaactgttcgaggcacagtgcaaagagcttatcgcggcgtgcgtcgagttcgattacggcgacgaggaacttatggcaaagtatgcgtccgtaggttcggacgagacgggcgcgtatcttaaagtcggggccgccgtttacaggaccgttatggtagccgagtggcagacggtaagagaaggcacggcggagcttatacggaaattcgaaaaagcgggcggccgcgtagttgcggcggcaggcgaactttcccgcggagatatcgtttccgcgccggaaggcacagcttgcgcgataaggacttttgacggcgagaagtggctgtttgttctcaatcttacagcgaatgaaacggcgggagcgctcgttttagcggagacgctaaaggatttttgcgccgaagaatgggatatggtcgggttggagtcgctgggaaggcggtctttaagcgatctgacgctggccgcaggccaaatgcgcgttttcaggctgagcaaggaaaaaagctctttcgtttccgaaacggagaaagaagaaatcgttttgcccgagaaaatgccgtacaagctgggcgagccgaacgtgcttgttctcgacaaagcgcggtgctttctggacggagacgtcttctgcaaagacccgacggaagttttgcgtatcgacagaaaattgcgcgataaattttcgcttacctatcggggcggggaaatggttcagccttggtacgcggaaaaattcggcatgaacgcaaacggggtgtgcgggaaagtccggcttgtctatacgtttgattcggatatcgaatgcgaagccgaaatcgccgccgagtacgacaacatttcctgcaacggaattgccgccgaaaagacgggcagacggtgggtggacggttgttataccgtttacggcgtgtccgtgaaaaaaggacgaaacgaaatttccgccgaaataaagttttgccgcgaaagtaatatcgaagcgatatttttactgggagaatttgcgctttcgccgtcgtatagggtgagagcactgccgaacgcgctggcaacggaaaatatacaggcgcagggcttccctttttacagcggctcgatttgctataaaacgggcgtgacgggcggacggataaaagtttcggcggagagtctaaacgggacgacgttgcatattcacggcggaaaaacagaaaaaacgcttgcttttattccgtttgaggtatatactgatttagtgagagaattggaattggaattattttttacgagacggaacacgtttgggccttttcacttgaaacgtcagcccgcggaagcgtacggcccgttttcttttgtaagtacgggcgacgagtggacggaggattatgtattgatctctcagggatttcgatgcaaaatatataaaatcaaggaaaaataaaaatggctgacagagaagacgtagcgcgccttgccggcgtttcctcggcaacggtttctcgcgttatcaacggtaacgcccgggtaaagcgggagacgcgcgacaaagtaaacaaagcaatcaaggcattggactattatccgaattcgattgcaaggaatttgcgtatggaaagcagcaacatggtggcggtaatcgtcgatgatctgtgtaacgcttatgtttccgaatgcgtcgaaattatgtcgcgtgaagcgcgcaagtacggttgttacgttatgctgtttgatttggttcacgacaatctcgacggcattatggaagaaattatcggcaacaaggtgcgcggcgtggttaattccacgatatcgcaggtcagcgatagaaataaacagaaatttgcgcgcatgaacataaaaaccataaacgttacgataaaagacgagcttatcgtgcagattcgctatgaacaggccatgcgcgaggcgtttcgtctgcttgcggaaaaaaacaaaaaaaagcctgtttatatgggcggtttgtcttccgattggttggaatataattcccgtgtacaagcgttttttaagctgagcaaagaattcgggatgcagacggacgccggctccgttatttccggaacctatccgcgagataaatattcgtttatcggttatcgggagacggatcggctttttaaagaagggcgcgagttcgattccgtgttttgtctgaccgacgctttggcgatcggggttttgtgcgccttgtccgagcacggtaaaaaaattcctcaagaggttgccgtgataggctgcgacaacataaagcagtcggaatatacggtgccgaagctgacgacgatcgacacgcagagtgaagaggtttataaaacgtatattcgttatcttttgtcggaggataaagaaaccgattacgcatttgatacgacgctgatcgtgagagaatcgatttaggaggcggggaatgacgaaaaattttacagagattagggaacaacaccccgaaccgcagtttgcgcgtgaaaatattttatcgcttgacggcgaatggcaaatatcgctttgcggcgacgaatttgtgaaaattaaagtaccttattgtcccgagtcggaattttcgggcataggacataccgattttattcgtacgtgcgagtaccgaaaaacttttatttacccgaaatccatgaaaacgggacgaaccttattacgcttcggcgccgtgaaccattttgcgcgagtgtttgtaaacgaccgctttgtaggcgggcacgaaggcggatatacgccgttttatttcgatgtgaccgactttttgaagaacggtgaaaataagcttgccgtgtttgtcgaaaatgatttggagaagcgtaatccatcgggaaagcagtcgcggaaaagggaatcgttcggctgtttttatacgagatgcaccgggatttggcaaagcatatggctggaagccgttcccgataattatcttcgcatggtgcggttttatccgaatatcgccgaaaataaagttgttttggagattgccgccgaaggcgaggatgcgttttcggcggaggtttatttgggaacgtcgcttgtgggtcgctgcgacggaaacgttaagcatagcggaaaatttacggtcaatttgtcggaacgccgactgtggacaataggcgacggcgtgctttatgatgtttgcctgtctttcggaggtgatacggtctattcgtatttcgggttgagagaggtcggttacgatgggtaccgctttttgctgaacgggcaatccgtatttcagcggctcgtgcttgatcagggatattacgaaaaaggcgtttatacgccggaatcggatacggactttgccgaagatatagagcgtgcccgtcggctcggttttaacggcgcaaggttgcatcaaaaagttttcgcacccaggtatttatacgagtgcgataaacgcggctttttggtttggggcgagtatgcgagttgggggatcgattattccgacttgcgcggtttcggcgcatttgcggacgcttggcgcgaggcggtggaacgagattttaaccatccgtgtattgtgacttggtgcccgctcaacgaagcttggggagagttggaggattcgtcaaaaaaacgcgatcgccgttttatcgacgggatttacgcttttacgaaagttttggatccgactcggccgtgtgtagatgtaagcggtggtatgcacgcgacgaaaacggatattgcggattttcattgttacgacggatttgattcgttaaaaacaaaaatggaaaaagcccgtcgcggcgatatggattttttgaatatgtatttacctgaggaagggatttcctattcgggtgagccgcagcatttaagcgaattcggcggcgtgacgtttggcgggacgagggtagagcaaacgcagtgcgtgcgggaacagtccgcatggggatatagcgcggcggacagtgaagaggcatttatcgcaacgtacgaaaacatcgtatgcctactgctcggaaacgaaaagctttccggcttttgttatacgcagttatacgatatagaacaggagcaaaacggtttattccgttacgatcgcaaagctaaattttctcaaaaatccatgttccgtctccgccttgcgaacgaaacaaaagccgcaatcgaaaaatagaatacatatccgtattcggagaaaacgatatgcgcgaaatattgggaatggatacagagatattgcagagatataaatgttcccctaaggaaccatgaggatcgttcagatttattttttatatcaatcaggaaaattaaaccagtgcttacggatattccgtaagcactggttgccgtttataaaggttttttattagtcggcataccgtgtacttttttcgaattatttatccgtacaaaaagaatgtgtatgcctcaccatataccggtatcatagaaacggaactgaatcgagcaggtgagttttataaagttcattttctgctgcgaaacgtagatagcacagagaaagaaaaaaattggtatctgacgattgcaggaacaaatatagagattgaaacaaaaaagtaaaagataatttttaataagttaaaacctcgagattttataaatatacgcagttgaaattttaatggaaagaaaaacgaataaaaatacaaacctaaaaaatacacccaaaatacacccttgacaatttttagtttgaaaaatttgtctgttttgggtgtacaatatacataaaatattcaaaattgatttaaatattcaaaaaataggtcaaaatagtcaaaaaatacattatttttataaaatttatcggttcccaagctgattccggcgagttcgactctcgtcacctgctccatgaaaaaagccctttttggggcttttttgcttgaaaaacggcgtttttggctcattttcataaatgtatagacaaaaaatacacccgaagggatatatacgtcccttgacaggccgaaatgaggatttttataaagctccgaattatcggggtttttttaattgtttaattgagtatgcttcggaagttaaatctcggtgaggtttattttcagtaagaagctaaccttaacggcgtacagcttgcggttttgtaaaaatcgctgtaaatatcgctaaaagcagttgggttgaaagcaacgcttaaatttcattatggagattcagtggaatggattgagaaaaaattctcgaaaaaaggaagattctttcttgaaaggggccgtataacgcttatattgatttttatttttccatagaaataagtcggataaattgatattaataggggaaatttgatataaaaagaaaaaactttagattataataaaactacaaatagaaaagggagggaaaatatgacagaaaaagaaatcgaagcgctcataaaaaagatgaccttagaagagaaggcaggtttttgttcgggggcggacgtatggcatttgaaatcgaataaacggttgaggataaaatccataatggtttccgacggccctcacggccttaggacgcagagggaggagagcgacaatctcggcatcaacggcagtattgcagcggtgtgttttccggcggcgtgtgccaccgcggcatcgtttgatcgggaattatcctataaaatcggggaaactttagggaaagaatgtttggctgaaggggtttccgtgctgctgggacctgcgatgaatattaaaaggacgccgttgtgcggccgcaatttcgagtatttctccgaagacccgtatcttagcggagaattggcgaaagaatacgtagagggcgttcagagcaacggcgtgggcgtcagcgtcaagcattttgcgttaaacaatcaggagaccgatcgcatggtcgtttccgcagacgtaggggagcgcgctttcagagaaatttatctctccggcttcgagaccgtcgtaaaggaggcttctccctatacgataatgtgctcttataatcgcgtaaacggagaatacgcatcgcaaaacggccgccttttaacggatattttacgcggcgaatggaaatttgacgggtttgtaatgagcgattggggcgccgtagtggatcgcgtcaaaggcctagccgcagggttggatctcgaaatgccgggcggcgacgactttaccgataaacagatcgcagcggccgtgcagacgggtgagctcgacgagaaaattttggacgaagcggtgaaacgtattcttcgcgtagcggcaaaatgtaaagcggacgaggagaacgcgccgggcatggatcttgtaaaaggccatgaaaaggcggtggaagccgcgcgggaagatagaggtcgagacggttgttcggcagcgcggaaggatacgccagatcggggatttttttaaccctgtcccgatagagcgtataattgtccggctttttgagctcggacgattcaaagctcccctgcatttttttcgctatcacgtgagggagccgtaaatatacgcccagcgcgaaagagaaaacgaggaggagaaagccgcctgcgacgatcagcgctatcacggggggcgtcatacggcgacctccgaaaacgcggccagcaaggcccgcctaagctcctcatagcgcgtcggatcttcggaatagatcccctgcgaggcatgtctgtcgtcgagcatataatcggaaaaatcctcccgcaaaaggacggcttcggctaacctgcaggcggtttgttcgggtacccgtttcaatagctcgaaatgctgtattccccgttgcagcgctttataacggagggaaagcagaaatccgccgcggcggttgggatagacgaaacacacgtcgcccgacggcagggaaagggtattgtaggagatgttttcgagcggggctttcgtccaacagtaatgcgcccaacggagaaagccgtcgaaatttaatttatacgcgaggacgccgagcagctctgcttccagaagccggcttttcaaaaccgtgttgggatgatcgggaatattgcatacgtaaaagagcagtttccgtcgttcgcctttgaagcttaagagaaaatcgcgctgcttgcaggtacagggaaaagacgccgcacagcagttcaggctgtccgcaaattcctcgatgacggaggcatggtcgagcgcaagcttgaatttcgcgttgggctctatatttttaataaactccatgctcttgcgataggcggtcatatccgacggctcgtcgccgctgatcagcgttttttcaaaccaaccctttgttttgaaaaagttaaatgcggccgccaggtaagcggcgaggtcgttttccttttcgatatagcgatacgccccgtccgtttcgtcgaggtagcggatcagcacctgttcggcatgctgaacctgcgcggcggggaaatagggcattttccatatgccgagcaatccatacacggagatatcgcccgtcatgccgtatttttcacataagtttacgtagcgttcgacggcgctgaaatcatacgaaaaatttccgtttgtctttttgacgacgcgggccatagaatattcgtacagctccgcgggggtgctttgcataaggtaacagccccagccccgccagggacagtcgcccagaagcaccgtcaccgacttctgtcccagctccgccaatgtttttacggctttttccatgacggcaaagtgttcgtcgctccaaagctccgttccgtaatatctcgccaggttggaattatgctgccagagatcgagatagattgtataatcgcgcggcgagggcagcgcgcagggatagacttccagcgtcagctcccgatgcgcggcgaggcgttcgtttgtcgctccgacgcaaacgtaggcgtcgatcgttacgctgtaacggcccgccttcgcgtccgcagggacgagtatatcggcccagaccgcgggggggacgtttccgtcgaaatccccgttgggcgcgtcgtcgagaatttcggcaaagggaaccccgtgggcgtccggcagatatttttcgacatataagcgtacctcgaaaggggccgtcacccgcacccgatagacggggcgggaaacgtgcatgccgagggcgggcgcgcttcccgtattgactcggcaggcctcatgctccgcgtcgagaaaaatctggaaggacgcgcggtcgtttcgcgcgcaaaaaatctccgttatttccttcggggcttcggagatggcgctcgccttatacagctcgtctgcaattgcgatgtttcctttcattgctatattcctccgcttatttgagataaaccgtgacgagcgccacgcccatgggaggaacgtcgaaatgaagcttaagcttttccccctcccgctccgcgacgagaaattcgtttttcaattccgaggcggattgaagcgccgatacctgcgcctgcgtgacgtattccgggcagccgatacgctcccattcctttatcgcgttggcgtgttcgtcgtctatccgtacgatttcgggggaacacccggcaaacttttccccctctagctctatctctgccgtccggacggaaacgtcgtgcagcagcgattgatgattgacgcagagaagctggacggtgttgttggaacggtcgcggaacgcataaatgtccaacgtttcccaagcgaatttcttttgatatctctcttctcccagacggtgaaggagctgaaaggcgcgatagggcgctttggccacgttttgcagcgtgagcaggccatagccgccgtggaaggcggcggaggggaagccgtcctcttcgaggatatccgaaaaggtccaataggaataggcgtccgccagccccatattgtcggggatcgtcttggcgataaaggacgcgccgaagctgccgtcggaaggcagtctggcaaggctgctccattcggtgtaaaagaggggaagatttcccgcttcctttctggcgcgcttggccatttccgtcaaaacgcctctgttgacgtctttccagatgtttttgcgaaaggtgacaaattcgtttgccagcgcattgacggcggctttatcggttttgtccagctcggaaaattctttgaaaaagttgcggctgttttccacgccgtagccgagcaccacgtccgtggggtaatgatgcgtggaaatgaaatcgaggggaacgtcgtttttttcgcagtattcgcgcatttcgcagatataggcgttgttgctggtggcgggaccgccgacgcggaacgcctcgtccgcctctttgatcgcccgtgcggtcatcgcgtacagctcgtagtaatccgccatcgtgccgctccagaagccgccgtttttcagccctccctccccgccgagattcggctcgttccaaacctcgaaataccatctgcgcacttcgcttcggccgtatctttcaatcagatgagagagaaaggattttatcagccatacccaggcttcggggtcgttgggcggggtcgtcactcccttgtaatgaaaaatcgtctgttcgcccgatttcagacaggaaggaagaaagctcagctccacaaacggcttcattccgatttccagcagaaagtcgaagatgttatctatattggaaaaggaaagcttataggtgccgaggtagggggactttttcatcacgctcatatcgtcgtcaaagataccgtgaaagcgcacatagcgaaatccgagctcgcgcgcgcagcgggtcaattgccgccggtaatcttcgcgcagggccgtagccgcatggcagcttccgacgcacatttcccagtaacgttccaccctctccgtggcagagtttacgtttaaggcataaatcataaattgcttcgctcctgttttttatcagtataacataaaatttgcacttcttatatcaatatttccgaaaaaataacaacatatcttgacaaaagaacgaatagaaattataatataaagtagccgaagggggggaagggagatggaagaatacgaagcgatattgaactatctgtatgagagcagccgtattcccgtttggatattcgaaaatgaaaaaatagtatttacggatttttcgaaagagactcttcggaaggaagaggaattgaaaacggtgttcgagtattttttgaaaaatgcgacggaggagccgaccatccgtatcgtggcggaggtggaaatgttcgcttttttccgattttcagacggagacgggcggaagctatgctttgtttcgggccccgtattttgttttcatcccgcccagatcatcgggaaaagaagcttgatcagcgagtacatttatgcaaaggaacagataaaggcacggctggcggatactccgattgttgacgtgaggtcgtactgtcgttttgtgcgtgcggcggccgcgttgcttttgcataagctttacgaaacggaaaacttaaaaaataattgtgtgggagatttgacaagcgacagcctgatcgattcggctctggcgcgggctatttttgacattcgggaggaagagctgatctccctgtataacttggacagcgaacatcgtttggtggaagcgatccgaaacggcaatctggcgttggtgacggaccgcgtgggagaggtaaaatattcggtcgatagattgcgcgcgccttttgcgcaggaaacgaagcgtcagcgcgaatacgaggtggtggcgctgataacgatcgccacgcgcgcggccgtctcgggcggtttggacgtggacacggcattttcgatgagcgatctctatcttcaacgcatagacaaacataagaccttccgcgagctggaggagatcgcccgtcacgcgatacgttctttttgcgagaaggttgcagaatgtaaggataaagaattggggaaatattctccgcgcatacaaaaagccataaaatatatccgcacccacctgcattatccgatatctcttgccgaagtggcgagctatacggaaatcagtccgaaatatctttcctccaatttttttaaggaaacgggaaaaaaattcagcgattttatacggatcgaacggattcgggaagcctgcctgttattacgcaccactaaaatgtcgagtatagagatagccaattcgttgtcgttcagcagccagagctattttatcaaggtgtttctcgatgtgatggggattactccgcaaaaatatcgcggaaacagttcggctgaatttgaaaagaggacgcgcgcttaaccgtttggttgaatttgaaaagataatttacgcttattttttaaagctgaaaggccgccgtatctgaaaagacaacgcgcgcttaaccgtttggttgctttacaaaagccccgttcggggcttttttgctttttcgacataaaatatcttccttttgcggaaaataacggtaacggatacaacgggcagactatgccctgccgcggtgaaaggggggaagtatttatgaaaaagcagtcgtttttgaagggtgcggcgatcatcgcggcgggcggatttatcgccaagctgatcggcgcgctctaccgtattccgctcaccaatctgatcggcggctacggcatggggctgtaccagatggtatatcccttttattgcctgctcttgaccgtttccgcgacggggattccctcgtcgattgccaaaatggtggcggaacggcgcgcgcagggcgtttcgggaaaacccgttttgaaaagcgcgtttttactctttttgttgatcggcgccttcggaacggtgctgatgatgggcatagcgcccctgctttcccgcatgcaggactgtcccgaggtgaaaaacggatatctcgccttagccccttcggtgttgctcgtatccgcgatctccgttttccgcggctggtttcagggagagaacaacatgctgcccacggcgctctccgaggtgaccgagcaggtggtgaaggtgggcttcggcctgctgtttgcttacctgttccgctccgacgtgcaaaaagcggtgacgtatatcctgctttccgtgtctatttccgaagcctgcgcgcttttgctgatggcgctcctttatcgccgcgcccctgctcccctcgtcgggataaaggacgggggcagggtttcgctgaagtcggtgcttcgcttaagtatccccgtgacgctgtccgccgcgctcctgcccctgtcctcccttttcgacagcgtgatcatcgttcggcttctgaagcgatataccgccgaggcggtgacgctgtacggactgttttcgggcggggccgtgacgattatcaatctgcccgtgtccgtctgttacggcatagcggcggcgagcgtgcccgccgtgtcggcggcctccgccgtccccgcgggagacgtgcagggtgaagcggaaaaaagcagaaaaaacgcgcggcggcgaatgctgtacgcgctcttggtgaccctcgtcgtttcggtgccctgcgcgctggggctcttcttttttgcgggccccgccgtgcgtatcattttccgcgccctcaagccctcggaggcggagacactggtgaagctggtgcgcctcttttccgtcagcgcggtgacgctctcctgcacgcagaccctttcggcctgtctgacgggaatcgggaagccgacgttcgcggccgtttccatggccgtcgcggtggcggtaaagacgatcctcaattttgcgctggtctccagcccgaaaatttccgtttacggcgcggcgattgcggcggacgtttgttatttggttgcattcgcgctggatttggtgtataatttaatcgttacgaaacggaaaaaaggagacggaaaacatgatcacggtagtcggactgggcgcggaagcgggggatttgacggagcggggaaggcgggcgatcctgtcggcgaagaaggtggcggtgcggacggcgcggacccgctcgtataaaaatctcgaagagctcggtgtagagcatatctgtctcgacgatatttacgaaaagagccgcagcttttccacgctcaacaaaaatcttgcgaaagcggtggcggaattgggcgacggcacggtatattgcgtagatggcgcggcgtccgaggataactccgtgcgcgccttaaaaaagcgtctgcgcggcaaaatagagatcgtggacggcgtttcgcgggtgagcgcgctcgtccgtgcggcggggtttgaaaaatgctcctatacggcggtttccgcctacgaaatcggtgaggccgaagcctttaccgcgccgctcgtcgtgtatgacatggacgaccgcgcgcttgcgggcgacgtcaagctcctcctgcaaaacgctttcggcgacgaggcgcccgcattgtatatatgcggcggcaaaaccaggaaaatcaagctgttcgagctggacagacagcccgcttacgcctacgattccgcggtggccgtggaatatgtaaacctgttggagagaaaaaggtttacattgaacgagctcaaggaaatcgtggagcgtctccgccgtcccgacggctgtccgtgggacagggtgcagacgcccgaaagcatcaaaatgaacgttatcgaggaagcatacgagctggtggacgcgatcgattcgggcgacgacggcaaagtgctggaggagacgggagatattctgcttcaggcggtgttccacgcggtgatgaacgaggagcgcggctcgtttaaccttacggacgtgacgacggggatctgcgaaaagctgatcacccgccacacgcacattttcggcaaggacaaggcggacggggaagcgggcgcgctgtccgtgtgggaaaggaacaaaatgaaggagaagcaccaggagacgtacgcggacgcggtaaacgacgtgcccaagggctttcccgcggcgttgcgggcgcaaaaggtgggcaagcgggcggcgaagagcggctttgatttcgcctgcgtagaggacgcggcgaaaaaggtggaggaggagctgaaggaatttctcgaagcccgtgcctcgggcgacgccgcggaaacggaaaaggagctgggcgatctgctgtttgctgcggtcaacgcggggcggctggcggactgcgactgcgaaaaggcgcttaaggaaagcacggataaatttgcgcggcggtttacgctgacggaaaaactggccctcgaggacggcagggaggcgaaatcgctgacggaagaggagtgggacggctattatcgccgcgccaaaaaagccctcgaggacggagggcgcgtatgaaactgcggcggataaagatcggcccgatagagacggaaaacaacgtttttctcgccccgctggcgggctacacgaattatcccttccgcaggctgtgcgaaaggtacggtgcggggctgacgtttacggaaatggtcagcgcgaaggggctgaaatacggcagcgaaaacacgaaggagcttttatacacgacgccgctcgaaacgccgcgtgcggcgcagctgttcgggcgggaacccgacgtcatgcgcgcggcgtgcgaaagcgaagccctcgccccctttcccgtcgtcgatataaacatgggctgccccgtgccgaagatttataaaaacggcgaggggagcgcgctgctggaagcgcccgagcttgcggaaaaaatcgttgcggaatgcgtgaagagcggcaaggccgtgacggtgaaattccgcatcggcgtatcgggagacaaattggtggcaaaggaatttgcgcggcgcatggagggcgcgggcgcaagccttctcaccgttcacggcagaacgcgggataaatactattcgggcgaggtggattacgggcagatcgccgcggcgaaaggggcggtaaagattcctgtgatcgccaacggcggcgtgttttccgtctccgacggggaaaagctgctcgaagagacgggggcggacggaatcatgatcgcgcgggccgcactctacgatccgcagattttctgcgcctttacgggaaaacccgccgaggataagcgggaaatgatagaagaacagctgaaggagacaaggcaggtgtttgacgaacgcttcacaacggtatttatgcgcaaaatggtgtccttttatatcaagggcatgcgcggcgccgccgcgtataaggagcggctgttcgcctgccccgatcccgaaagcgtgcttgaaatcgtccgtgaaatttttccctgacggccgaaaacgtctgtgcggaggcataaataatcgaaagtaaagtaatcgaaagcgtttgcgcggcgggcgtaaagggttgaaaataaccgagagccgaagcgctacgcttcggctctcgtcagacggtcagcaaaatctgtcgaggggagtgaaacagcggcggcagaccccgccgtttttttgcgcgcattccccgcagagggtttccccgcattcgggacagaaaaaggcgcttcccgcggaaatttgttttttgcagccgctgcacgcggccgttctcgctcggtccatagtcatcgaaagttacctccctatcgagtattcgcaaaacgagcgcgaaaaattcgttttttccgcggaaaacgattatttttccaaaaaaaaggaaaacgcaaaaacggcgtcttaaatgcgtttgacccatgctgccgtataactttgtcgaagacgagggaaaaacgcgcctgcggccgaaaaaaggcccaaaacggagagagggggaagaaagattgagaaaacaccgcaaaacgctgtacttttttttgccgttatggtataatagaaaagtgaaaaataagcggacgcttttctttagaaaagcgtgcaatcaggagtaaaaaagatatgtcggaaaaagttgagggcgagtacggcgccgaacaaatccaggtattggacggtttggagcacatcagaaaaaggcccggtatgtatatttcttccacggacgccaaggggctgcaccatctcgtgcacgaggtggtggacaactccatcgacgaggcgctggcgggctactgcacgcacatcgaagtggtgctgaatgccgacggcagctgcaccgtttcggataacggccgcggtattcccaccgatattcatccgaaggaggggatttccacgctcgaggtcgtattcactaaagtcaacgcgggcggcaaattcggcggcgattcgggctataaggtctcgagcggcctgcacggcgtcggcgtcaaggccgtaaacgcgctgtcggaatggctggaggccgaggtttttcaaaacgggcacgtctataagcaggtatataaccgcggcgtaccgcagcggtcggtggcggtggtcggggattcggacaagacgggcacgcgggtgacctttatgcccgacgacgaaattttcgagaccaccgtattcagttacgacgcgctcaaggggcgtttgcgggagctggcttacctcaataaggggctgcgcatttccctcgaggacaagcgccccgaacaggaaaagaaggattccttctgctacgaagggggtatccgttctttcgtcgaggagctcaacaagacccgcgacgagctgctgttcccccagcccgtctatttcgaggaaacggacggcgatacggtgtgcgaggtcgctatccaatacaacgaaagctataacgaggtcatttacagctacgccaacaacgtcaacacgatcgacggcggcacgcacgtcgaggggctgaaaatggcgctgaccaaggtcatcaacgacgcgggcaggaagctgaacgtcctcaaggaaaacgacaagctgacgggcgaggacgtgcgcgagggcatcacggccgtcgtgtccgtcaagctgatcaacgcgcagttcgagtcgcagaccaaggacaagctgaacaacagctcgatccgcgcgttcgtcaataagtgcgtcaccgaacacatgggtaccttcctcgaggaaaatcccgcggtggcgagagagctggttctgcgctgtatcacggcccagaaggcgcgcgacgcggcgcgcaacgcacgcgatctcacccgcagaaagggaatactcgaaagcacgacgctgcccgggaagctggccgactgttcggacaggcgccccgagctttgcgaaatctatatcgtcgagggcgactcggcaggcggcaccgcgaaacagggccgcgacagacgcttccaggcaattctgccccttcgcggcaagatactcaacgtcgaaaaagtacgcctcaaccgcgttttggaaaacgaagaaatcaaatcgatgattacggcgttcggctgcggcatactcgacgatttcgacgagagcaagctccgctacgaccgcatcatctccatgaccgatgccgacgtggacggcgcgcatatccgtatccttttatataccttcctcttccgtttcatgcggcccctgatcgaacacgggcacgtgtattcggccctgcccccgctctataaggcgagcagcaagggcaaagaggactatctgtattccgaggaagaaaaaatcgcctacgacgcgcaggcgacctcgaagatagaatatcagcggtataagggcctcggagaaatgagcaaggaacagctttgggaaacgaccatgaaccccgccacccgtaccctggtgcgcgtgacgatggaggacgcggcggaagccgataccatgttctccatgctgatgggcgaaaatcccgaactcagaagaaagtttatcgaagagaacgcctctttggtgaccgatctggatatttaacggagtaaagaaatggcaaagaaagaaacgagccccgaattaaccgaggaattcaaaaagacgctggccatgacgaaaatgctggacatggaggtggacgaggaactgaagcgttcgttcatcgcctatgccatggccgtcaataaatcgagggcgatccccgacgtgcgggacggcctcaagcccgtgcacagaagaattttgttctccatgcacgaaatgggcttatacagcgacaaatcttaccgcaagtgcgcccgtatcgtcggcgacacgctgggtaaatatcacccccacggcgacagctccgtgtatgacgcgttggtgcgtctggcgcaggatttcaccatcaatttcccgctggtggacggtcacggcaacttcggcagcgtggacggcgaccccgccgcggccatgcgttacaccgaagcgaagctgaccaagctcgcgggggaaatgctcaaggatctcgacaaggagacggttgactttatccccaatttcgacggcaacgagtccgaacccacggtccttcccgcgcgttttcccaacctgttggtgaacggctccgacggtatcgcggtgggcatggcgacgaatattccgccccataacctcgcggaggtcatcgacggcacgatcgccatgatcgacaatcccgaaatcaccgtggacgagctgatggattatatccccgcgcccgatttccccacgggcggcatcattatgggcaggagcggtatccgcaacgcctaccgcacggggcagggcaaaatcgtcattcgttcgaaatgcgaaatcgaggattacggcacgggcggaaacgcgcgccagagaatcgtcgtcacggagatcccgtatcaggtgaataaagccatgctgatcaagacgatcgcggacatggtcaaggataaacgtctcgaagggatttccgatatccgcgaggaatccgaccgcgacggcatgcgtatcgttatcgaatgtaaaaaggacgccaatgcgcaggtggtgctcaacaccctctataagcgcacgaacttgcaggtttccgacggtatcattatgttggcgctggtcgaaaacggcaccgagccgaaaacgctcaacctccgccagattctttattattatctcgaacatcaaaaggaagtcattacccgccgcacccgtttcgaactcaacaaaacggaggagcgcgcgcatatcgtggaaggcctcgtgctcgctttggcgaatatcgacgaggtaatcaggatcatcaagcaatcggcggataagtttgccgcgatagccgctttgacgcaagcttttgagctggacgagaaacaggccaacgcgattttggaaatgcgccttcagcggctcacttccctcgaggtggataagctcaaggaggagctggccgcactcgaagcgacgattgccgatcttaaggatatcctcgccaacgaataccgcgtcatggcgattatccgtgccgacctcaccgaaatcaaggggcgttacccttctccccgccgcacggagatttccgtcgattacggcgatatcgaggacgcggatctgatcgatagagaggacgtcgtcatttccctgacgcacacgggatatatcaagcgtctgcccgtttccgaatataaggcgcagaaccgcggcggcatgggcattaccgcgcataagcccaaggatgaggactatgtggaaaagatgttcatttcctgcacgcacgacgacattctgttgttctcgtcgctagggaaagtgtattcggtgaagggctacgaaattcccgaggccaaccgcaccgcgcgcggccgcgccgtggtgaatatcgtccgtctcgaccagggcgagaagatagaatccgttttacccgtcaaagagggcgacgggggatatatcgtgattgcgaccaaacgcggcgtaatcaaaaagacctccaccaaggaatacgaacgtatcccgaaaaacggcaaaatcgccatcagactgcccgagggggacgaagtgatttccgttcagcttaccacgggcgaaaacgagcttcttgtcgcgtcgaagcacggcaaatgtatccgtttctcggaggcggacgtgcgcgcgatgggccgaacggccacgggcgtgcgcgcgatgaggctgacggacgacgacgagctggtggatatgctggtggtcaatcccgaattggatatctttacgttgacgtcaaacggttacggcaagcgttcgtccatcgaggattaccgtctccagagccgcggaggcaagggtatcaaggcgggcattttcaacgaaaagacgggcgagcttgtcaacctgaaattggtgtcggacgataacgacattatgatcatcacgacgggcggcacgatcattcgtatgcacgccgactcgatcagccgtatcgggcgctcgacccgcggcgtgcgcgtcatgaatgtcaaggacagccttgtggcgacggtggacgtcaccgagcgcgacgacgaggaggaagtggcgttgcccgaggagacggcggccgacctgtcccccgaggaattgacggagggcgcggaggcgctggaagaggaggacggaggcgacgaagtcgaggacaccgaagaggtggacgagggcggagagaccgacgaaccttccgacgaagaataaattgaaagcagaacaggccgtttcctgaatttgggaaacggcctgttttttactgtttgggagagtggggagaattcgacgaggcggaggtttcccgcccgccctccccctc

SEQ ID NO: 1430 - DNA, 5327 bp, Unknown
  16S sequences of unknown bacteria
agtcgggcatgccgcaggcagagccgctgtttgccatcgtgctcagcgatatcctgcgcaaggatgtcgatcagacgctcgattatttccgcaatgagggcgtggacatcaagatcatttccggtgaccatgtccgcgcggtgtctgccatcgcgcgcaaggcgggctttcacgatcatgcgcagtgtgtggacatgtcccatgtcagcgatgagcagatcgacgccgatttcgtcgaccgccattccgtcttcggccgggtgacgccgaagcagaagaagcagatcgtgaccatgctgcagcagggcggacatacggtggccatgacgggagacggtgtcaatgacatgctggcgctgcagcaggcagactgcagcatcgctgtcgcggcaggcagcgacgccgtcaagcagatgtcgcaggtcgtcctgctggaatcggatttcggacagcttccggacgtgctgctggagggacgccgcgtggtcaacaacgtgacgcgtgtggccggcatcttcttcatcaagacgctgtattcggtcgctgtctctttgctgtgtgtcatcctgaacatgccgttcccgttcatcccgatccaggtgacgctcatcgacctcatgatcgaggcgatgccttcgttcctgacgatgctggagccggatccggccaaggtgaagggacgcttcctgcctaccgtgctcaagcgtgcgcttccgccggccgccgcggtcgtctggagcatgctcgtgctcatgggcatcaccgcctggctctcgctgccggcagacggctggcagagcacgctgtacttcatcgtagccctgctctcgatgctttcggtcatcctctcactgcggccgatgaacgtgctgcgctttgtggtatgcgtgctgatgatcgccggcttctttgcggccgtcatcctcttcccatcgctgctgcagctcaccaacaccgcgcaggtctccttcctgctgccgtgggtgctgatcagtgcgctggcgatggagctgctcgtctggctgctgctgcggcgcaaagcgtaagctgattttgatccgctgatgatcttgagcggccggtatctgccggctgcttttctattgccgcatggaaaaaatgatgaaaaatttagcactcaaatattgacagtgctaaggatttggcatatactgttagcagacgttagggatgagtgccagagaagggagtgagcgggatgctgacagaacggcagatagcaattttcaaggcgatcgtggatgaatttacacgaactgctgaaccggtcggctccaagacgctgatgaaccttctggacttccagtgctccagcgcgacgattcgcaatgagatggcggcactggaggaagccggcctgctggagaagacacatacgtccagcggccgcattccaagtcacaaagggtatcggttctatgtggagcacttgatggagagacagctggacagcgaagtgaagtattcgctgcagaaggtattcagcgagcgtcattattcgatggaggaagtcgtgcagaaaagctgtgacatcctttcgcagatgacgaacctgacttcggtcgcattagggccggagagcaagtaccagcttctgcagcatatccagctgattccgatctccagccgcagcgccgtggcgatcttcatcaccgaccacgggcatacggaaaacaagacttttcatttcgacaccgatgtgagcgtcaaggatatcaagacctgctgtgatctgctcaatgataagctgagcggcacgccgatcaaggatatcgtcgacaagatgcaggagatcgaaccgctgctggccgcgcaggtggccagacatgaagtgctgtttgaagcgtttgtttccgccttcatgaaatttgccagcgacaaggtctactgcagcggacagaacaacatgctgtatcagcctgaatatgcggacatcaacaagctgcgtgaggtcatgaaggtgctggaggacagctcgctgtttcggcagttagctaatcacgagggcaatgtggccatcgagatcagcggcgacaatgacctgatccaggtggacgacatggcggtcgtctccagcaagttccacatctcagatggtgaagaggggcagctgatgatcgtcggtccgacccgcatgcagtacagcaaggtggtcgcgctgatggagtacatgagtcaggtcatcgaggatctttacaaaaaagaagaataggagggattcgcgtgcaggatgaaaaggaaatggtaagagaagaagaaaacgagacgccggaagcgccggatcaggaagaggcgctgaagcagagcgaagcggatacagagacagagcaggaggaagctgctgaagcggacaagaagccgcgcaaagagaaaaagctgttcaagaaagatcgcacggcggagctggaagcgaagatcgctgagctggaacaggcgcttgccgatcagaagaatgcatattacaaagcatatgcggacacggagaacttgaagaagcgtctgcatgcggaggccgaaacgaccaggaaataccgcatccagagctttgcgctggagctgctgccgatcctggattccatggagcgggcgctggcggtgcccagcgaggatgagcatatccagaattatgtcaagggctttgagatgatccacaaccagctggtggccatcctggaaaaagaaggcgtgaaagagatcgaggcactgaacaagccgtttgaccacaactatcaccaggcgctgatgcaggagccggtggaaggcgtggaaagcgggatcgtcgtcgaagtgctgcagaaaggatatatgttgaaggaccgcgtgctgagagcagcgctggtcaaagtgagcgagtaagttaaaggaggaattcatatgagcaagattattggtattgacttaggtacgacaaactcttgtgttgccgtcatggaaggcaaggaatgcaaggtcatcacgaacccggaaggaaaccgcacgactccttcagtggtcgcatacaagaatggagagcgcatcgtcggtgacgccgcaaagcgtcaggcggtgaccaacaagaacacggtttcttccatcaagcgtctgatgggcacgagcgaaaaggtagaaatggaaggaaagcagtatacgccgcaggaagtcagcgcgatgatcctgcagtatctgaaggcatatgcggaagactatctgggcgaaaaggtcgaaaaggcggtcatcacggtgccggcttacttcaacgacgcgcagcgtcaggcgacgaaggatgccggacgcatcgccggactggaggtcgagcgcatcatcaacgaaccgaccgcagcagcgctggcttatggaatcgacaagaccgacaaggaacagaaggtcctcgtttatgacctgggcggaggtacgttcgatgtctccatcctggaactggctgacggtacatttgaagtattgtccacaaacggtgatacgcatctgggcggcgatgatttcgacaatgtcgtcgtcgactggatggtcgataccttcaagaaggaaaacggcatcgatctgagaaacgataagatggcgatgcagcgtctgaaggaagcaggcgaaaaggcgaagaaggatctctcttccatggtgcagacacagatctccctgccgttcatctctgccggcgcaagcggaccgctgcactttgaagctagcctgacccgcgcaaagttcgatgagatgaccagacatctggtcgagcgcacgatggagccggtacgcaacgcgctgcgtgatgccggattgaccaagaacgatatccaccaggtgctgctggtcggcggatccacgcgtatccctgccgtacaggaagcggtcaagaaggaactgggcaaggagccgaaccactctgtaaacccggatgaagtcgttgcgatgggtgctgcgatccagggcggtgtcatcgccggcgatgtcaaggatgtcctgctgctggatgtcactccgctgagcctgggcatcgagacgatgggcggcgtcatgacggtgctgatcccgcgaaatacgacgatcccgacgagcaagtcgcagatcttctctactgccgcagacaaccagccggccgtacgatggcagccgataacaaggagctgggcatgttcaagctggatggcatcgcgccggcacgccgcggtgtgccgcagatcgaagtgaccttcgatatcgatgtcaacggcatcgtgcatgtatccgccaaggataagggaacgggcaaagagcagtccatcaccatccagaactccagcggcctgagcgaagaagagatcgaccgcatggtccgcgaggcggaagagcaaggctgaggacgacaagcgcaaggaagacatcgagacgcgcaaccgcgccgagagcttcatcgcgcagatcgattccacgctggcggacaacggcgacaagatcgacgctaagcagaaggaagaagtccagaagctgcgtgacgagctgcagaaggcgctggatgaaaacaacatggaagaagtcaagagcaaactgcaggtgctggagcaggcgatgcaggcagccagccagcagatgtatcagcagcaggcacagcagagcacggataacgcctcttccgcaaacaacggcggcaaggacgatttcgtcgacgctgagttcgaagagaaaaagtaaaccagatcattacaattcctagtgcttgcgctaggttttgtaatttgtaaaagacagggttgcaaagcagtcatttacctgttatcctaaaacaatgcagatccctgcacataccgggcagactgtactgagtcagggtgagctgcagcatgcaatagagaggtgagccagatgagcgaaaaacgggattattatgaggtcctcggcctgagcaaaggggcgagcgacgaggaaatcaagcgagcatatcgtaaaatggccaagaaatatcacccggacatcaataaggagcctggagcggaagagaagttcaaggaagtcaacgaggcgtatgaggtcctcagcgatccgcagaaaaaggcggcctatgaccagttcggccacgccggcatggaaggcggcggctttggcggattcggacagggcggcgctgatttctcaggcttcggcggtttcgatgatatttttggctccttcttcggcggcggtttcggcggcggaagcagacgggcgaacaacggcccccgcaagggaaatgaccgcttcatgcagatgcgcatcgatttcatggatgcgatcttcggcaagaccgagaccatcaacatcgatgtggatgagcagtgtaaggaatgcggcggcagcggcgc

SEQ ID NO: 1431 - DNA, 29207 bp, Unknown
  16S sequences of unknown bacteria
agctgtttctccagatgggaaaagatctggactatgaatttgtgtacattgcaccgcaggaactgatgcttcagtatttttatgtatcatttctgtttggtatctgtgtgacgatcccggtgctgttatatcaggcatgggcatttataagaccgggtcttaagaaaagcgagaattttctgtttctgatcgcaatggtgtttggactgctgtgtttttgcacaggcgcaatttttgcatataagatcatgcttccgtttatgttgtattttttcaatactttaagtataggaagcggagtcagcgcatatatcagtgtacagaattatctgtccttccttctgatggtgctgatcatatttggaattgtatttgaacttccgatggtatcggtagtattgaatcggctgggacttctgaaagtatcttggatgaaggccggccggagagttgtgatcgttgtgatcttcgtaatcgcagcactgatcacacctcctgacattgtatcgcagatcacagtagccatacctgtgatcctattatatgaatttagtatttttctctgtacggtctgtgaaaaaatcggacggaaaaaggaagacacaaaagaagaggaaagggagtaaacaatggcgaataagatttcaagaagaacattcgtaaaaggtctggcagcaggtgcagccagcgtggcagcactgggcgtacttggcagtgtggagatgaaatatccggcagagggagccggtaatggagtaggagcaggaaccattccggtaccggcaggaaatatgtcctatacaccgggaacctattctgcaagtgcaaaaggaattgcaagtgacgtaacagttaccatgacttttgatgagaccagcatcacagatgtacagatcgatgtatccggcgagaccccggacatcggtggtaagatcggtgatgagatgagtcagaagattctggcagctcagtcctgcaatgtggacggagtatcaggtgcaaccgtaactgcagatgccatcaagacggctgcagcagactgtatctcacaggcaagcggacagaccgttgttgttgaagaggcagcagctgaggcgtcaggagactggctgggaactgcaccggagatcgctgaatctgatattactgagagtgttgataccgaggtgctggtagtcggatgtggtaccggtggatggatcactgccatgaccgccgcagaagagggcgccaaagttttggtcgtagagaagagagagtctgcaactggtatccgtgaggatatcggagctatcaattccagacttcagcaggaagcgattcaggagaatccggagcttgccatcaataagatcgaggctatgcaggaactggttcgttatggtgccggttatgtggacagcgatctgatccgtgtatggattaatgaatcgggagagatggtagactggctgactgatcttctggaaaatacaggaaattattacatgagcctggaggcaggtattggtgatacctctgatccgggaagagataaggcatatgctaccggacacagcccgcataagaccgaggctgctgccaaggatgacaccatcaccctgaacagcaccttccagcagcattgcgatgatctgggggtagagtggaagctttccacttccttggtaaaactggagcaggatgagaacggtaaagtaaccggtatcattgcgcaggatgagaatgacaagcattatatccgtatcaatgcttccaaaggtgtgatcatctgtgccggcggttatgcatgcaacactgagatgatgcaggcactgcagccgcagactctggagatgaagatcaactactctttgggatctacttgtgacggatccggtatcaaagccatgatgtgggcaggtgcaggccttgatccgactcatgcatccatgatgttcaaccgttgctgctgtctgccgaccgagactgcaggttacaagaccaacggcaaatggttctggtttggtgagcagccgttcctgaaagtaaacctgaacggaaaacggttctgcaacgagtcaggcccttatgagttcatgcttcactctatggagatgcagccgtatcatacctactgtgatattttcgatgcaaacaacaagcagtatgcagagcagtttgatgaggtaggatgctgccgtctgttcccgttcccgaacggtgcagccagcaacatgggctatgattatgtatggagtaaaaatgaagaactgatcgaggcaggatatcttcagaaagcagatacgctggaagagcttgctgagaaattaaatattccggttgacaattttgtggcaactgtaaaccggtacaatgaactgtgtgcagcaggcgtggacgaagactatggaaaagaaaaacatcgtctgactccggtagacaccgcaccgttctatggaatccgtactggtgcatggcatctgacaactctgaacggatgccgcatcaacacagacatgcaggtacttgataccaatggagaaccaatcgaaggtctctatgcaaccggtgactgcaccggcggcatgtttgcaacaacctatccgaacctgttcaccggacttgcatgcggacgtaccatgacattcggacgtcatgcagcaaaacttgtggcagcaaaataaggacaggcaaaagcagtgcatactttacagccgtgaggcagcaatccgctgcacacgggctgtggagatagagaaggaggaaaagccatatgtataagaaaacatttcatggcggcgtgcatccgtatgacggaaaagaatttgcgcgtgatattccgtttcagacctggcttccaaaaggcgatctggtttttcacctgaatcagcatattggaaagccggcaaagccactggttcagaaaggggacagtgtgctggcgggacagatcatcgcagaggcggatggctttgtatcagctaacattatcagctcggtttccggaaccgtaaaggcgatcgagaaacgggagaatgtgcttggtacgacagatctttccattgtagttaccaatgacggacagtatacgctgaccgaaggtgtgggtgcagaagtggatccgaccacactgactacacaggagattctggcaaaagtcaaagcagcaggcatcgtaggacttggcggagcaggatttccaactcatgtaaagctggcaccaaaggatccgacggcgatcaaatatgtgattgccaacggtgctgagtgcgagccttatatcacctgtgatgatcagttgatgagaaactatgctgacgagatcgttgggggtctgaagatcatgcttcagctctttccgaatgcagaaggtgtggtgttgatcgaagagaacaaaccggaagcaatcgcagcagttcagaaagtatgctccaatgaaaacaatatccatgttcacccggtacatgtaaagtatccgcaaggtggtgagcgcgccattatggatgtagttgcaggcaagcatattaagttaggaatgctcccggcagatgttggatgcgtggtagataacgtggcaactgttcgcgccatctatcgtgcagttgcgaaaacagagccgttaatggaaagaggattcacagtatccggtgatggtgtcaacaagccatgtaacctgatcgtaaagatcggtaccagctttgaagaaatgctggaagcagcaggcggattcaaggacggcgaggagccggagaagatcctgtgcggcggtccgatgatgggatttgcaatgccgtggctgtctgcagcagtgaataagaacaacaacgctctgactgttctgaaaaaggatccggtggctgaggcagagaagcagcagaccgcatgtttgcgctgtggacgatgtggtcaggtctgtccgatcggtctggtgccgcagatgatggcggcagctgctgagaaaaaagattatgcacgttatgagaagaaactgtatggcctggagtgtattgcctgcggttcctgtacattcacctgtccggcaaaacgtccgctgatgcagctgttcaagcagacgaaagccgagatcatggcggctaagagaagataagggggaggaaaaagatgagtaaattatacaatgtttcttccagcccgcatgtaagaagcaagctgacgaccggaattgttatgtatgacgtgatcctgtgtcttctgcctgcaaccgtcatgggtatctggcatttcaaactgcaggcactgctggtgatcgcagcttcgatcgtatcagccatgctggcagaatttgtgtttgattacatagcacacagaaaaaatacactgacagatggaagtgctattgtgacaggacttctcctggcgctgtgtcttccggcaagcgttccgctttatattccgtgtctgggtgctgtgtttgcaattattgttgcaaagaacctgttcggaggtctgggacataacttcatgaacccggcactggccggacgttgtttcctgttgatctccttcagcggcatcgttgcaaactatgcggttgatggatacagttctgcaactcctctggcacagatggcatctggtcaggcagtgaatgtaacccagatgctgattggaaataccagtggtgttattggaaactcagcaattgctctgtttatcggtggtatggtcctgtgggcaatgggcggaatcacctttgagatcccggcagcgattattgtaagtttcaccgcattcgttgctttgtttggcggacagggattcaatcctactttcctgctggcacatctggcaggcggcggcgtgatcatggcagcatttttcatggcaaccgatccggtgaccagcccggtaacatccaccggacagctgctttacggtatcctgattggtatcttaagcggtgtgttccgtatcttcggaagctccgcagactctgtcagctatgcagttgtcattggaaatatggtaactccgctgatcgatgagatctccgtaccggttccgtatggctgcagaaaacagaaggaagagggcgagaagggattcccaatcccgaaggcagccgtgatcctctgtgtgatcactctgatcgcaggtgtctgcttaagtggtgttcatgagatgactgcggatatcattgcagagcagcagctggcagcaagcgcagcttcttatcaggaagtatgcccggaggctgagacctttgagcatgatgatactttaagtgcggcagtagatgcacttggtggagaagtatatggtacttcctatgggaatgtgtatattaatgatgttgtcgtaggaaaagatgcatccggcaataccgcaggttatgtattcagcgtgaccagcagtgacggatatgcaggaaatatcacgatttctgttggaatctctgcagatggtacagtgaatggcatctccttcactgaactgaacgagactgcaggtatgggtatgctctgtgcagagccggagttcaaggatcagttcaacggcgtacagaccgatcagttcacactgaataagtcaggagattctacatcagacacagatatcaactctgtatccggtgcatccacctcttcaggagctattgtcaacgcagtcaatgctgcactggatttctatgcagcaaatgtgaagtaggaggtctggaatatgaaaccgtgggtagaacgtatctataatggtgtgataaaagaaaatccgtccttcgtactgatgcttggtatgtgtccgacactggcagttaccacgtcggcttccaatggtatcggtatgggactttccacgatggcggtactgatcgtatccaacctgatcatttcactggttcgtaagatcgttccggatgatgtacgtcttccggcatacattgtaatcgtggcttcactggtaacagtggtagagcttctgatggaagcctacaccccgtccatctacagcgcactgggaatctatatcccgttgattgttgtaaactgtattatccttggacgtgcagaggcatatgcatccaagaatccgccgttcctgtctgtgatggatggtgtcggaatgggtctgggatttaccattgccctgcttctgatcggtatggtcagagaacttgtgggagcaggaactctgttcggcatgcaggtgatgccggaagcttatagtccgatcggtatttttgtaaaagctccgggtgcattcctggtactggcatttctggttgcaatcatgaatgcagtaggcatgaagacccgcgccaataaagtggtggaaggctgtgacggctgctgtgctgcctgctctcagtcctgcacggataagaaggaggaaaaagcatgacatccttgattatgatcgtggtgagcagtgcgctggtcagcaacgtagtgctcagccagttccttggaatctgctcattcttaggtgtatcccggcagattaagacatcagccagccttggaggcgcagtaatcttcgttattaccattgcatctgcagtggcaagccttttatatgactatgtactggttccgctgaaccttgattacctgaaaactatcgtgttcattctggttatcgcagcactggtacagttagtagaaatgttcctgaaaaagacctcccgtgccatctatgaggcactgggaatctatcttccgctgatcactaccaactgtgcagttctcggtgtggcactgaccaatgtacagaatggctacaatctgcttgaaagtgttctgtgtggatttggtacggcacttggttataccatcgccatcgtacttctggcaggtatcagaggcagactggatgaggaagccatcccggcaccgttccgcggagctccgatcgtgcttctgtgtgcggcactgatgtcgatcgcattcatgggattttctggtctgtaacagggggataagaatatgcaggaaattatcattacaaccgtagttatcggtgtgatcggactgattatcggtatcgcactggtagctgccggaaagaaattttatgtggcagtggatgagaaagccattgcagtcagagagtgtctcccgggaaataactgcggtgcctgcggttatgcaggctgcgacgcagtggcagcagctatcgcagcaggggaagcaccggtcaatgcctgtccggtctgctctgcagatgcagtagccaagatcggtggcgtgatgggcgtggaagcagaagcagcccagagaaagaccgcacaggtcaaatgttccggagattgtgaccatacctctgcaaaatgtaattatgtgggaatcgaggactgtcgtgcagcagcactggcaggtctgaatacaggctcctgtacttttggatgtctgggatttggttcctgtgtgaaagcctgtacctatgatgccattcatgtggtaaacggcgtggcaaaagtagatacatccaaatgtgtaggctgcggtatgtgtgcaaaagcctgcccgaagggcctgatcgaggtcgttcgtgcagacagagcatttgtagttcagtgttctaataaggacagaggtcctgcagtgaagaaagtatgttcagcaggatgcttaggatgcggcgcctgtgtaaaacagtgcgagcacgatgcaattcatgtggaaggaaatctggcatatatcgattatgataaatgcgtgggctgcggtaaatgcgcagagaaatgcccggcaaaaaatattgtcagacagtaattatggatcgaagaccgatattattcggactgggaattgtgacagccggcatcattgccggctgtttccttcagtaccggaatgaaacaacaaataaagaatgtaccaggcagctatttgccatggatacggtcatgtctttcactgcttatggaaagaacagtgagcaggctgtggatgcagccatgaaggaagtccagagactggatgatctgttgtccactggcaatccagacagcgaagtgtctgagatcaataccagaggaagcggaacgctgtcaaaagacacggaggcaatcctgacagaagctatggagatctacaaggagacggacggactctttgatgtgaccatctatccgctgatgcagctgtggggatttcctacacaggaatatcatgtgcctgcggagtcagaacttcaggaagcactggagaaagtagacgcatctcaggttgtgatagatggagatcaggtgactcttggaaccaatcaggagatggatctgggcggaattgccaagggatatacgtctgcacgggtcatggagatcttccaggaatatggtattacatcaggaatggtgtctttaggtggaaatgtgcagacattgaacacacggcctgatggaaaaccatggcagatcggaatccagaatcccaatgggcagcagggctctctcctggcagtcctgtctgtggaaaataaagcagtcatcacgtccggtggttacgagcgatattttgaagaagatggaaatacgtacatccatattctgaatccgaagaccggttatccggcggacagtggacttgtgtccgtgtcagtcatatcagaaaatggcatgcttgcagatgcactgtccacatctctctatctgatgggagaagagcaggcagcgggatactggcgaactcatgcagatgagtttgacatgatactggagactgaagacggaacactgtatgttacagaaggaatcagtcaggaaattcagacagacaacaccacgattgtgttgaatacaaaagaataaaagttttggaatacaaaatagccacgactgtcgaataaaagctctggaatacgaaatagccacggctgcagctattttgaagctaatgaagcgtttgtttcgacagccgcagctattttgaagctaatgaattttttaattgactaactggattccagtgatatcaggttcgatcatcatagagtaattggtataatataccacgaatcccggcttggaaccattgggtttcttcacctgttttttctccacgtaatcgatctccactttctcactgtcccggagactggagtaataggcggccagtctggcagcttcttcaaacgtacggtccggaagttcgacaccgtcagcctttacgatcacatgggagccgggagctccttttgcatggaaccaccagtcatttcctttggcaaactggaaggtcagctcatcattttgaagattattttttcccacatacatatggaaaccatccgaagaaatatagtggaacggtttggaagtgatctttgggcgtttgctgccggaaggacgtttgcggatataaccggattccatcagttcttcgcggatctgggtcagatcctcctcctgaagcgcaatatcaagagctgtctggatggagcgcagatgctggatctcttcatcggtttctttcaaaagagcagtaaccgcttcaaaggttctctttaattttccatatttatcaaaatattttgtggcattttcctgcaccgggatctgtggatccagagggatcgtgatctcctcgccggtgtagtagttcagtgcctgaaaactcttacttccctgaggtacatcatatccataggtgttgatcagttccccatagatccggtatttttcacgtttttccgtatccttcagctgcttggcctgcagatcgtatttcttgatatttcgttccagagctgtctgcacgatccggcgaagatctgtggatttctggcggatacgggtgaccgtattccgttcggcataatactgctccagcatggaggaaactgttggaaaatgctcacatctgcagttgtcatagatacttaaaggcagacaggaaaattccacaggaacctttccttcataataaatggaaggttcatagcctccttcgcggacaggatccagatatcttccaaatgtacgatacagatgaatcagttcttctggctcgtaggaagtggctggccggtcagaatccagagatgccagatgacagatctcctcggatgcgatggggcttaaaccggtgatcgacgtgtaaagtgccttggataatttgcaggatttttccgccactcgtctgacaaaatcttcttctgtcaaagtgaacggatctgctttgtcctgagtatcaggaataaaatacggacggcccggaagaacttcccggaccgagcttacctgggcggaaatatgcttgatactgtcgatgatctgatcctgctcattgcagaaaataatattgctgtattttcccatgagctcgacgatcagaaatttacggcactgatcacccatttcatccagatgctcaatctcaaaacggagaatacgctccatggaaggctgagtcactgcaatgatacggccgccgctgatgtgcttacggagaagcatacagaaattcggggcagtcagaggactcggcttattggtctgggtcagatagaccagtggaagactggcactggcagataaaagcagccggaaatttccttcctgagattttattgtcaataaaagttcatctgtctccggctgtgcaatcttggaaatacggccgccggacagatttttatgaagttcatgcgccatacaggcaacagttataccatcaaaagccataaaattgttctcctttatcgccatctattatacttgacgcaaattgtgaaatcaactataataaattagactatggcgaggagtcttcttcgcattttgtatggggacgataagatgataaaaagtatgaccgggtttggtcggtgtgaagtgtcggaggacagtaaaaagatcacagtggagatgaagtctgtcaatcatcgctatctggatcttggcattaagatgcctaaaaagctgaatgccttcgaggcagatattcgtgcacttctgaaagagtatattcagagaggcaaagtggatgtttacatcacttatgaagatttaagcggcaacgatgagacgctttgttatcatgaggatgtggcagctcagtatgtggaatatttccagaagatggctgagaagttcaatctgagaaatgatctgtccgcgtctgttttggcgcgttgtccggaggtgctggtgatggaagaccagcaggaagatgaggatgagatctggcatctggtggaaaaggcagtccgcggagcaagtgagcagtttgtggcagcacggatccgtgaaggtgagagcctgaagacagatcttcttgcaaagcttgatgagatgagctcactggtggattttgtggagcagcgttctccgcagatcgttgcagaatatcgtgccaagctggagacccgtgtcaaagaacttctggcagaagcagcatttgatgaaagccggatcgtggcagaagtgtccatgtttgcagataagatctgtgtggatgaagagctggttcgtctgcgcagtcatattgatgcaactaaggcagcacttaaggcaggtggtaatgtaggcagaaaactggacttcatcgcgcaggagatgaacagggaagccaatactacattatcaaagtccaatgatattcagatctctgactgtgccattgagatcaagacaggtattgagaaaatcagagaacagattcagaacttagaatagaataagaaagggagctgtttttatgaacagacagggaatactgatcgttgtatccggtttctccggtgcaggcaagggtacgatcatgaaggcacttaccgaacgttatgagggatatgcgttatcggtttcagcgacgacccgttcaccaagacctggagaggaagatggaaaagcatattttttcaagagcgtggaagaatttgagcagatgatcgctgatggtgcgctgatcgaatatgcacgttatgtttctaattattatggaacaccgagaagctatgtggaagagcagctggcagcaggtcatgatgtgattctggaaattgagatccagggagcaagaaagatcaaagagcagtatccggatgcggtgcttttgtttgtgacgaccaatgatgcacagaccttgaaagatcgactgactggaagaggaacggaatcagaggaagttatccgcaacagattgttaagagctgcacaggaggcagaaggcatcgaagagtatgactatctggtagtaaatgatgatctggatacttgtgttaatgaggtgcatggaattattacgagcgaacatctgaagatgagacgccgtctggaatttgttactaatatcagagaagaccttcagggtctgatgaaaggagaataattatgttacatccgtcttatacagacttaatggaaactatcaacagcgagaccgagggcgataccccggtagttaacagccgttattctatcgtgcttgcaactgcaaagagggcaagacagctgatcgcaggtgaggaagcttatgtaaatgcaaaaggcaaaaaaccgttgtctattgctgttgaagagatcagcaaaggatttgttacaatcgaaccggaaacaacagatgaaaacgcggggcagacggagtagacggttcatgtaaataaatatttctggaggaacgacatgatcgtaagagaaggaaaaagcgtatttaaaggcgttgccattggcaagatctttgtttacaaaaaagctgacaacgcagtaaaaaaggagacagttgcagataccgcagctgagatggctcgttttgaagcagcaaaggagaaagctttaggacagcttaaaggactttatgagaaagccctgaaggatgtaggagaagaagaggctatgatctttgatgttcatcagatgcttcttgatgatccggattataatgattccatcaaagatatcatagaaaatgagaaaatgaatgcagagtacgctgtattcatgacttctgagcagtttgctgccatgttcctgagcatggatgatgattatatgagaggacgtgctgcagatatcaaagatatctctgagcgtgtgatctctatcctgaacggaagccaggtaagcccggaggctatgccggagccggtgatcattgtggcagaggatcttgctccaagcgagactgttcagtttgaaaaagataagctccttgcgctggttacccagaaaggatcttccaactctcatactgcaattctggcaagaaccatgaatattccgtccctggtaacaacaaatatcgagatcgataccgcttatgatggacgtacagcaatcgtggatggctttacaggtctgatctatattgatccggacgaagagaccatggagaagatgaatgagaaaaaagcacgtgcagatgagcagcgcgcacttcttcaggaaatgaaaggaaaagagacagttaccttaagtggaaaacatattcatctgtattccaatatcggtggaatccaggatgtggatgctgttcttgagaacgatgcagaaggtatcggcctgttcagaagtgagttcctgtatcttggatgtgatgattatccaagtgaggaagtacagtttgaggcatataagacagttctttcccgtatgaacggtaagaaagttatcatccgtaccatggatatcggtgcagataaacagattgattacttcaatcttccgaaagaggacaacccggcacttggatatcgtgcgatccgtatctgtctgaccagagaggacatcttccgtacacagcttcgtgcactgtatcgtgcatctgcttacggaaccctgtccatcatgttcccgatgatcatctctgtcaaagagattaccagaatcaaagagatcgtggaagaagttaaactggagctggccagagaagagcagccgatgggcgaggttgagcttggtattatgatcgagactcctgcagcagcagtgatcagtgatctgcttgctccgcatgtagatttcttcagtatcggaaccaatgacttaagccagtacacattggcaattgaccgtcagaatcagtctctggattccttctttgatccgcatcatgaggcaatccttcgtctgatccagctgaccattgagaatgcacacaaatacggtgcatggtgtggtatctgtggagagcttggcgcagatatggagttgactgcaaaattcattcagatgggaatcgatgagttgtctgtttccccgggatatacactggagcttcgcaaacgcattcgcgagtgctaatagataataagataaaaggagattagaattatgaaatcatttacttacactgtacaggatgaacttggacttcacgcaagaccggcaggacttcttgcaaaactggcagcaggctgcacaagcaccatcactattgataacggaaccaaaaaagcagacgctaaaagactgatggcaatcatgagcatgggcgttaaaaaaggtcatactgttaccgttactgttgagggtgacaacgaagaagctgatttcgagactgttgagaaattcttcaaagaaaatctgtaattcttcagaaccatgcacatgcccgtaaatatggaactcatgcttgcatgaaggcacatatttcggagcatgtatatgacgagaagccatacatgagcaaaatataagcctcgtcagaggctgttttgtgatgtggttctgaagttaaacaaacagcgcagggcgccgacatggagaggtctctcctgcggcgcccttattttacgtgagcaacgagccaaagtctgtgcttgcacagaatcttggcgactgccgcgagaacttgaaaaactcgcagagagagtttcttaaagatatacagactacctgaggtgggaggataatatgcagcttttgagacataatgctgagataatcgtaaaggaattgaacacgatcatcaatgacaaaattaatatgatgaatgaaaaaggggttattatcgccagtactgatcaggagcgtatcggtcaggagcatgaaggagcaaagcggatcattaacgaccggctggaggaattggtcatccattctcatgatagatatgagggaagtcttgaaggggtgaactatcccattatcatatccaatgagattattggtgtggtaggtatcacaggcccatataataaagtggcaaaatatggacagatcacgaaaaaaatgacggagatcctgatccaggagatttccatcaaagaacagaagagtatggatgaaaatcttagaagccgttttgtgggagaatggcttcagaatgaaaatgtcattatcaatacaaattttgtggaacgtggtcgaaggatgggactggagattacgaatccacggcgtgttatcattatttctgtttttgacaatggtacaggttctgattcgctggatgaaatgcgaaaagtggaacgtgtggaagagagggtcaaaaatgtgattcgaagactggatccagatagcatttatatgaaatcttcgtctaatctggtatttgcgatcaccaatcggaaggattcggagattggtaaaatcggtgaaatgctgcgcagtacagtggaagaacagccggatatgaaggtggttattggaatagatgataaatgtcgtccatataccatgatgcacatttcctattccaaagcttataaagcattgcagtcttgcctgcggaccaagggagagggaatccgtttttatagtgatattaatatggaaatctttacggatgagatctcggatatgtccaagaaagaatatgttcagaaactattttctggatatgaaagggaagaactggcggaaacagtcggattgctggagacattatatgatctggaagggtcgatcacggccgctgcagaaaaacttcatatgcataagaacacccttcaatataaattacgaagaatctacgaaagaacaggctatgatcctcgctctattcgttggtcttcattattctatattgccattgatttttatcgagaaatcagaaacctgatcggagaagaatagaaatgtatctggaaattgactatgaggaacggaatgcgggaattcggatctggagatgccgcggatatggagaagttctgaaagtgccggagatgctcgaaggaaaaatggtgacagaattggcaccttatgcgttatcctcttccagaccagctgaggagccagatccgtctgtcataaagcatgtagtgctggaaccggaagagaagggttttggggagccttctgagttgtgtggaaagcagctgacagaagtataccttccatcaggccttcgtctgatcggggattatgcattttatttttgcaggaatctgaaagtcattcattttcatggaaatatagaagaggtgggtggcggagccttcatgtggtgtcgggcagtggaacagatcaccttccatgaggtcacacctgcggagaatggtgtgtcaaaggtgctgggagagctgacccaggagctggagacagagatattttatacagatggcatgcaggtgcggctgacatttcctgaatactatgaggaagcagtggagaatacaccagccaggatcattgacacgcactggcatggctctggttacaaatatcgccagtgttttccagagacgaaattaaatctgaggttatacgatgaattatttccgtatgcagttgccaatgaatttggtgatacctgtatgaatctggcattgaaccgtctgcggacaccggtacagctgtcagaaaaggcgagagaacagtatctggattaccttggaggacagatgcagtacctgcttgaaaggacgatcaaggatcaggatctggaaacactggaacttctgtgtgagcaggagttgctcagtgaagagaatatgagccaggcagcaaagcttgccgccgggcagggggctgcggaactgggcagttatctgctggaagaaaagcggaagagattccgacaggtgaagaagacattcgacttgtagaatcgacaaaaaggaacaaataatatggtgtatgagattgaacaacggtttgaacatattggaacagaaatcctggaagcttccagaaatgcgctctatatcaatatgcggtatctggatgtggcgctttcaggtcttgcatgggagatgactacagatatttcgagaatcggaactgacgggctgagacttttgtatgagcctcattatctggcagatctgtatcgaaagcatccgatgctggtcaaccgggtgtatcttcatattatttttcattgtgtgttccggcatattctgcgcccttgtccaaaggatcagaaacgatggcatctggcctgtgatgtggcagtagaatcgttgattgatggcatgcatcaccgaagcattcgaatgagtgtatcacctcttcgcagatccctttatcaggaactgcgaaaggaactgaaggtgttgacagcagagggtatttaccggatccttggaaaaatggatttaaatgaggttcgtctgcagcggcttgcagaagaattttctttggatgaccatacgtactggccggctccgcctgagcggaatgacaaacagcccatcccacccaatgccatgatgaggactattcagaagaagtgggatgacgtcagttcccgaatgcagacagagctgaccatgggtcgggagagcggtcaggaagacggtgatctggtggacgagttggcagtggaaaaccgggaacgatatgactacaaagagtttctgcggaaatttgcagtacttaaggaagagacagagatcgatccggattcttttgattatgtattttacagctacggactaagagtttatggaaatatgccgttgatcgaaccgcaggaatggagagaagtcaagaagatcgaggaatttgtgatcgtgatcgatacatctatgtcctgcagcggtgaactggtgaggaagtttctggaggagaccagacaggtcctgagtgattctggcagttattttaagaaagtacatattcggatccttcagtgcgatgatcaggtgcgttcggatcagctgatcacctcagcggaagaactgaaagcctatatggaacatctgaagctgtacggcaatggtggaacagatttccgtccggcatttacctatgtgaatcagcttctggccgctggtgaatttcagaatttgaaaggacttttgtattttacagatggaaaaggaacatttccgggaaaacgtccgccctatgaaacggcatttattctgttccgggaggactataaggaagtgacagttccggcatgggcgatccggctggttctggacgaggaggacttatgaatatcaaacgtgcaaaacaggagatcaaaaatacgatccgggcctatcagttgaagaatgcagatggtacttatcggattccatcgatccggcagcgtccggtgctgctcatgggaccgcctggtgtgggtaagactcagatcatggaacagattgcggaagaatgcgatctgccattagtgtcgtatacgattacccatcatacgagacagagtgccattggtcttccatttatccagcaaaaagaatatggtgggaagacctattctgtaacggaatataccatgagcgagattattgcatctgtctatgaccggatggaagagacgggcaagcaggaaggtattctgtttattgatgagatcaactgtgtgtcagagacactggcaccgaccatgctgcagtttctgcaatgtaagacctttggaaatcagaaggttccagcaggctgggtcattgtggctgcaggcaatccaccggagtacaataagtcggtccgtgagtttgatattgtgaccttggaccgtgtgaagaagattagtgtagaagcagattttccagtgtggaaagaatttgcttatgagcagaagatccacggagccatcatttcttatctggagatccgccaggagaatttctgcaggattgagactaccgtagatggaaaacggtttgtgacaccaagaggctggcaggatctgtcggaaatgctctatgtttacgaagagctggggattaccatagatcaggaagtggtgggacagtatctgcagaacgccagagttgccaaggactttgcggcatatctggatctgtatgcgaaatacaggacagattatcaggtggatggcatcctgaagggaatctggaagccatcagcgattgaaaaattacgatatgcacagtttgatgagcgtctcagtgtgatcggacttctgatcagccgtctgggtgagatattctcggaggtacagacactggatgagcaagtgactgcacgctacgaggagctgaagcggaaaaaagcagaagaaggagagctggatgagcagatccgagcagcctttcagacttccgtggaagaacgggaacagcggatcagcgaggctgccgagaatctggagtgtgcgtttgatttctgcgagactgcatttggggaaggtcaggaactggtcgtatttgttacggagctgacggttaatcgttacagtgcatggtttatcggtgaaaatggctgtgaccgttattataaatacaacaaaggacttctgttccgggaacgtcagaaaggcattctggaagagatggatgaagtacgtgatctgatggagggaagaaaggagtaggtgcatggaactgatagatattttggaagtattcagggatcatctggtagaattttccgttctgatttttgaatttatcggtgtaggaattatcattgtttccggtattcatggattttatctgtatctgaaaaaatcaccggatacaaagctggcactggctaaaggacttgccatgggcctggaatttaagctgggaagcgagatcctgcgtacagtgatcctgcgaagctggcaagagatcggaattgttgcaggaatcattgtacttcgagctgcacttacttttttgatccattgggagatccgtcaggaaatgaaagaaaagaggggacaggaatgattcaggatattgcaccaaagaaatatgacaatcactatgaagagcagaatcctgctgatgaggattggatgctggtctacaaagacgggcagattctatgtcggtttgatcaggagaagatttattttccaaaggtaaaggaaacgggctggaaaggcaaggatgtaacctatctgtttaccattagtggagagcggttctttttattaaaggaaggactggaagaagtgttacccgggtatcagtgggaaaaaccagtgatcttccgaaatgcaagacctcagtatcgtgggtttgccggaatcaccggtcagcagctggatagctggtatcgatccaaccggttctgcggccaatgtggaaaacttatggtaccagatcacaaagaacgtatggttcattgtgaacattgtggaaatactgtgtatccgaagatctgtccgggcgttattgtggcagtgacagatggtgacagactgctgctcacaaaatatgctaaccgcccaggctccgtcaactatgcactggtggccggatttacggagattggtgagacgctggaagaaaccgtacagagagaagtcatggaagaagttggcctgaaagtgaaaaatatccgctactataagagccagccatggtccttcagctccactttactttgtggattcttctgcgatgtggatggagatacatcgattacactggataccaatgaactggcactggcagagtggtttgcgagggagaatattccagttgaagatgatggaatcagccttacaagggaaatgatccgtgtgttcaaacatggagaataaacttacgacagcccaggctgacagaataaaagcttttattttgtcagtctgggctgttatatttacttcgcctgcagttctttgagaagctgcgaaatggttttattgagcactggatggcgatagtaaggcgccagctcagtcagtggaatcaatacaaaatcccggttttccatatcgatatgaggaacatgaagcaccggtgtatcaatgatcatctggtcgtataacagaatatcaagatccagcgtacgcggtccccagtgtacgatccgttctctgtgagcagcctgctccagttcatgcaggcgatccagcagttcctccggggtcagaagtgtgcggagttttaatgcaccgttcaagaatacgtcctgttctacaccgccataaggctcggttaccagataatcggatacctgttctacaatacaatcctctgtatcagcaagtccttgcactgcatcatccagatatttctgtttgtctcctaagttggaaccaagagcaatataagccgtatgccattcacgggtaatctctacggagacagttttcaagggaagacctacaggagcccaaggcttttcaatcttcagtgttactttctgaagggaaggaagagtcagcagaagcatccgcgccagattttccacaacggtctctaacagcttgtaagtgtgttcctgtacgaatctggtgatcatctggctgacttctccataatggatggaagcggtcaggtcatcagtcagacccgccgtacgggtgctggtgtacagagtcgcagagatgacaaatttctgtcctaatacattttcttctggaaatacgccatggttggcgaagatctccagctctttgatctcaattttatccataaattactccatatggcgtccaaggatggcttcggtcatctggacagcgcgtttattttctttgacatcgtgaacgcggacgaaagcacagcctttcataacaccgataacggaagtggcgatcgttccctccacacgctggtcaaccggcagatccagcgccagtccgatcatagatttacgggaagttccaagaagcactggaaatcccagatgctggaacagctccagatgattcatggcctccaggttcatttcataggtttttccaaatccgattcccggatcaaggatgatcttttcgtctgaaataccggcgcgtcttgcaatattgacacattcctgggtctcggccagcatatctaccaggaaattattgtactctgctttttctttgttgtgcatcaggcagcaggctgcgttgtattttgcaatgacagatgccatctgcggatcatatttcagtccccagacatcgttgaccagatcagcaccagcctgaagagaaacttccgcaacggatgctttgaaggtgtctacggaaatcggaacatcaaagtggctgttgagtgcttcaataacaggaagtacacgggcagcttcttcttctgcactgactggtgtgtggcctggtctggtggactcgccgcctacatccaggatgtcagcaccttccgcaatcatggcctcagcatgtcgcagagcattgtccatactgttccattttccaccgtcagagaaagaatcaggagtgacattgaggattcccataatataagttctattggcaacgtcaaattcgcggtttcttattttcatggctgtaacagcctcctttttaatatgtaatggttaaatttttcttttcagcagaccagtaacattctttttctgccggacaggaaaaacagttccgggatgccttgtccgcatcgtagatcagggaacttaacgtatcggaacgagcggcattgcgatgttcccgaatggcagaagtgatctcctgaatctctgatggatcaaaggacagctctcgtaaaatctgttctgcaatctgtgcacctgcctcatcatgtgggataccagaccggtattgctctgcgcgtccgatatcatggagcagggcggtgcagtagatcagttccttgctggcagatgcatgggattccaaagcatggatgtaagcaagccgggctacatccagaaaatgctccggtgtatggcggcagaacttacgatctgcttccagcatctggagtgcctgcaactgttcctgatagatcgggtgcttccagatctgattgacccggatcatggtatccatcagtcttttaccatggagaggaacatcttctgaagttcacggtcttccttgaactgtcctctggtaatagtagtgatggttttgctgcccggttttttgatgccgcgcatggtcatacaggtatgttcggcctccagcattaccatgacgccctttggagataacgcacgttccagtgcatcggcaatctgaacggtcagacgttcctgaatctgaggacgtcgtgcgtagacatcaacggtacgtgccagtttgctgaggcctgtgaccttgccgtctggaatataagcaatatgggcttttccataaaacggcatcagatgatgctcacacatggaatagaaagtgatgtccttctccagcaccatttcattattttctacttcaaactgttttaacagatgctcatcggcctcctgatcgagaccgccataaatctcttcgcacatccgtgcaattcgattcggtgtttctttcaacccttcgcgctctacatcttctccgattccttccagaagaagacggatcgcctgttcaacttttgctttatctaccataaaagcaacctccactgtaaaaattctgcggagatcttcctttttcctgaggtaaggttttaccggaataaaaaaaggatatctccaattgtgatagaacgtatgtcgctaattcccttcacaatatgagatatcttcttatattgctgcaacgggtgcggatcctataccgtaagacgagcttttcgtttcggcgacaactccccattcgccgaacacttgacgcataaaatcctattttgcatatcattcatttcatagcccagtatagcacagtttgtggaaacaggaaagaagattttaggaaaattccttgacgggaaaaattatctatgataatctgaattttacagattacggaccgaaagggataacgactgtgcatgaaagtgtgcgcattcgttatccctttttttgtagagagaggggaaatttatgtatttaatgattgataattacgattcgtttgtgtataacctgaaagcttattttgaagagttggggcgtgaaattctggtgaagcgttcagatgagatcacgctggacgagattgaggatctgaagccagagggaatcattctgtcgcccggcccaaagcggcccagggatgccgcactctgtgtagagacggtgcgcagatttcagaagcggattcctattctgggagtatgtcttggacatcaggtacttggatattgttccggcgctactgtggagaaaggggaacggcctatgcatggaaaggtgacggaggtgcatcacaaaggtacggggctgtttgccggtcttccggagagatttcgtgtgacccggtatcattctctgatcgtgaggcaggatacgcttccagaagattatgaggtggactgcatctccgaggatggcgcagtcatgagcatttctcagaaggagcatatgctgtatgggatacaatttcatccggaagcggtattgacggagtatggacacgaattgttggaaaatttctgtaaaattgcagaggggagagaagaaaataaatatgtatcataatagacggatcaccaaaaaactggagcagtatattccagcagcaaagatttttgaaaaattttcgcaggaagcagggattgcatttctggattcatccctgatcaatgagctggggcagtattctatcatcggcagaaaaccttacgagatattgaagaaagaacaaggacagttttttcagaatggatcactgcgtacagatacgacatttgaagcatatctgaaacggtatcttcaggatcatgtggatgaaaatgaactggatatcccaatggtgtccggggctatcggatatctttcctatgaatacggacgggaactgatgggtatagattccatggaaaaagatccttgtccgatcccggaggcgttatttacattttatgatctgctgattgtggaagactgtaagaagaaagaaatctatctaagtgcctgcggcatgacagaggatgcacaggagttgctggatagaaccaggcaggagattctgaggctgcaggtaaaggaacagacagaattacagggagaggaagataccgcatggaaggcggtacagatgccgtacaagatcaaggtgactccgaattttgaaaaggaagagtataagcaggcggtggaccagatgatccaatacatccgggagggagatatttacattgcaaatatgacgcagcggctggaagtggagagcgaaaaggcaccgcttgatgtatttgttgctcttcggaaaaataatccgtctccttttggcggctatctggattgtggaacgtatcagatcatcagtgcatcaccagaacgttttttacagatgcgggataaaaaggtacagaccagacctattaaaggaaccagaaaacgtggagcgacaccggaagaagatcagatgcttcggaaggaactggagcagtccgggaaggacaaaagtgagcttctgatgatcgtggatctggagcgaaatgatctgaaccgggtatgcaggccaggcagcgtgaaagtgacggagctatttaccgtggaggcatatgctaccgtatttcatctggtttccaatgttgaaggagaacttacagaagacagagatgtgatggatctgatggaagctgcattcccgggaggatctatcaccggagcaccaaaatatcgcgccatggagattattgatgagcttgagcatggaaaacggggactctatacgggttctatcggatatctgacattggatggagcctgtgacttcaatattgtaatccggacagcggtccataaaaatggacgctattatctgggagtgggcggtggcatcaccgcagaatctgatctggaatttgagtatgaggagacactgcagaaagcgaaagcagttctggaggcactgaaataaaaggagaacatgatggagattacactggatgaaggttacagttttggtttgggggcatttgagaccattgcagtgaaagatggaaagctgatctttcttgaccgacaccttcggcgacttgatcgggcactgcattttctgaagatcggagcactggatgagcgtggaatcacagaaaaacaggtgatagattatgtgaaacagcaaaaacttacagatggcgcatgtaagttgacagtttctaaagaaaatgtagtatttcaacaaagacagaatccatatactgatgacattcgtagaacaggatttgtgatggatttcagctcggttcgaagaaatgagacctcaccgttgacagcttataagacgctgaattatggggactgcattctggaaaacagacaggctcatggattgggaatgaatgagaggatctttctgaatacgaaagggcagatcagcgagggaaccgtcagcaatatattctttgtgagaagcgggaagctgtatacaccggatctgtcctgcggattgcttcctggaattctgcgggagtatctgtgcgagacggagaatgtggaggaggcagtcatttacccggcagagttagggcagtatgaggaatgttttgtaacgaattctctgatggggatcatgccggttaatcagttaggagagtggaagtctgaaagccgggaggtcacaaatcagctgttgaagaagtatgaaagtatatgacaattgttctgagttgcgtttgtgttgagaaaaatatgaatatcagttgatgattcttccgaggatatcagttacaatggaataagataatcttgacttacggaggatgacggaatgatttataacacgtatgaactgatatggctgtttctgatctattcgtttctgggctggatgctggagacaatactggctgcgacagaacaaagacgctttgtaaacagaggattgatcaatggtccattatgtacgatctatggtgttccaatcgtaatactgaccatattcggacaggaattgccgctgttctggctgttcctgggagccatgatcgtggcgacagtcacggaatggatcagtggacatatgatcgaacggttttaccatgagagatggtgggactattccaacgtaaaatggaatctggacggttatatctgtcttccggcatccttagtctggggtgttctggggacgatcagcatgcgctggggaaatggtctgttgatccggctctatggattcctgcctgatggaatcggacatctgctggtgtggatactggcaggaatgctggtgctggatgtgacagctaccatatttgctttgtcgggtattggccgaagcacgcagaagtgggaggcagtagattcatggtttaccagcattagtctgcggattggtcagtggttgtacggacatgtggatcgaagaattcacagagcatatccaaagactgtgagggttgagaagccgcagcgggataagaccgtatttgcagcaggctgctgcatgcagaagctggtgtggctgttctttatcgggtgtctgcttggcgatatcacagagacgatcttctgcaggatcactgcgggcgtgtggatgagccggagcagtctggtgtggggacccttcagcattgtgtggggatttgctattgcagcggtgacggatcttctttataaatacaaagaccggtctgaccgtttcctgtttttaatggggacagcgctgggtggcgcttatgaatatctgtgcagcgtgttgtcagagatggtatttggaaccgttttctgggattacagtgagatcccgttcaatctgggcggaagaatcaatcttctgtactgttttttctggggatttgcagcagtggcctggttcaagattttctatccagtgatctctggatggatcgaaaaattacccatctgtgcaggacggatcctgacatgggtgatcgtggtctttatgtgctgtaatatggctgtatcgaccatggctctgatccgcagcaatgagcggagccagggaattccagccacacagagctggcagcagaccatggatgaacggtttcctgatgaaagaatggagaagatctatcccaatgccatcaaggtggagtgagatagcataaaagctcatatgaacttataacagctcagagcgacaacataaaagctcgtatgaatctataacagccctgaacgatagaataaacgctcgtatgacgtgtatcggacaaagtaagtttcgtgcatcgtctgaatacgtacacttacagtgtacgcaccagccgacacacgaaagctcactttgttcgctccaagtcatagcagcgcagtttatttctatcgttcggggctgttgcaggtttcaaaagcttttatgttgtttttctgaactgtcgtagattcttaaaacttttatactatcttcacgagtgttgttggtttcttagatttcgagttgacattatggcgtagtgttaggtttctgattttctgtaatcgcctggatttcatcggcggttttatctgtgatggctgcgatttggtcgatggacagattgttttttaacatttttaaaatgagaaattccttttccagagatcgtccttcagaaagaccacgttcatgtccttgttttcttccttcttctagcatttgatcaacggcaacacacatattcacctctcctttcgcattttgtgctttatctttgaattttaacatccgtttatcaagaaaattccatgcagtatcaaaagtctcctgttccacggtatcaagctccgggatagattgcaggacagattgcaatgttttgaaatctttctgatacttgatcattaaaaacatactggcaagatcttttggaaattccagcaggcgttcgtcagcggtatggcagacgtcaagtacatggatcggatagtctggtacataatctctgagttcatgtggaatctcagaaaaatcgagcaggtcatgcagacgtttggcagcattccaggggtcttcgcccatatacaagactaatgtaataacaggaaccagtcgatcttctttttttcagaggagataagtcaacacctggagctctgccagaagcaatagcttcgttctttcgaatagtatgaattgcctgtatttggtctttatattaggtcagtttacaaggaactacacgcagaccacgaaacgggggctgctgac

SEQ ID NO: 1432 - DNA, 32759 bp, Unknown
  16S sequences of unknown bacteria
gaaggccgccgtagtaatccagcggtccgaaacgaatgtccatccgaccgattacatcatcataaatcagtacaccttgttttttcatccttatcctcctcgtgaaatgggaaaagccgaatgagtttcagtgctcactcggcttttctgtgtgacaggttattaaatatgttttgctcggctgcctataaattggctcctcctttcgggcatattaaagtcgaattatgcccgggcctcgaatctaattcttggacaaaatcagcaaaaccccagtgtttatgcggcataatcctctttgtgttattataccgcaaacatctatacgtctgactattcccgttgctttcatttttgatatatctcccttgattatttccggatttttgcctgctgtgcctttatattatctgcgggatatgggatattattcatttttcggcgatttatcggattttttattcgaaaaagagcagaggctgtaaaaaactgtgttctttacagcctctgcccgtccgcggacaaaaaacaatattttttacgtctgcggatctcgagaaagatatgcccaaaaaagggtttacttcatgccgttctcgtaactctcaatcattttcttaaccatttggccgcctacggaacctgcctgtttagcggtaaggtcaccgttgtagccctgtttaagatttactcccacttcggaagccgcttccattttgaatttgttgagcgcttcttttgctgcgggaacaagactcttattagccattttgttaatctcctttgtgcgtaaagcactttatctgtgattactcgttttcatcacgcgatctttcggtcgcaatagtattatgaaacattcgtgccgccgtatttatgaatatttttccattttcatatttcttgctgaaaattttttcctgtacggaatagtcaaaaagggaaactgtggtatcgaaaaatagacaaaaaagcaaattttttcgatttaaaagacctcataacattttttttcaaaatcatttcacactattgactttttaacatttttatgatattatatccttatgtaattatatgttggcatacgggcggttttaacggccgtttatatcgaggttggtatgtattctcacttttttaaacgcttcttggacattgtcctgtctcttttcgctatattgattctgttgttgccttttttgattatatgtcttttgatagttatagatgatcccggacccgtgtttttcaggcaaaagcgcgtaggtcggaaaaagaacggtaaaattacatatttcagcctttgcaaattcagaaccatgaaagtctcggcaccgcatgatgtgcctacgcatcttctgcaaaatcctgacgagtatatcacccgtgtcggaaaatttttgagaaaaacgagtcttgatgaacttccacagatatatcagatatttacgggaaaaatgagcattataggacctcgtcccgcattatggaatcagcaagatcttgttgatgaacgtgaaaaatacggagcaaacgatgtgcgtcccgggcttacggggtgggcacagataaacgggcgcgacgaacttgaaattcccgaaaaggcgaaatttgacggagaatatatagataatttgagttttgtatttgactgtaaatgctttttcggaacaatcttatccgtttttcgccatgagggtgtcgttgagggcggaacgggggagatcgcacgcgaacgtgcggaacaacaaaataataaagaagaaaaaactttccgataattccgaatactaccgatagacctgaatcggaacggatttcacgcggacggcattatacttcggtgggggcaatttttttatggaacttaaacctttcgagagaaaattatatctttcgtctccgacaatgcacggcgatgaattaagatatatgacggaagcgttcgaaacgaactggatgtctactctcggtgaaaacctgaatgttttggaaaaaacgatctccgagatgctcggatgtaaagatgtcgttgcgctttcctgcggaacggctgccatacatctttgtttgaaacttgcgggacttaaacccggagaaaaagttttttgttcggatatgacgttctcagcgactgtgaatcctgtcgtttatgagggcggggttcccatatttatagacagtgaaagaacgacttggaatatggatcctaaagctcttgaaagagcctttgatctttatcccgatgtcaggttggttattgttgccaatctttacggtacgcctgcaaaattgacggaaatcgcagcggtctgcaaaaagcacaatgccattctgattgaggacgccgcagaatctttcggcgcaacatatgacgggaaaatggcagggacattcggggagtataatgcaatcagctttaacggcaacaagataataacaggttcttcgggcggtatgcttctgaccgatgatgatgcggcagcggcaaaggctcgtaaatggtctacgcaaagtcgtgaacccgcaccgtggtatcaacataatgaaataggttacaattaccgtatgagcaatgtcatagccggcgtcgttcgcggtcagttaccgtatttgcaagaacatataaatcagaaaaaagcgatatacgaaagatataaaaaagcattttcggatcttcccgtcacaatgaatccgtatgacgagaaaagaagttctccgaacttttggttgtcctgcattttgatagacaaagacgccatgtgcgaacagacacgtaccgcaaccaccgcttcatatgttccctccaagggaaaattttgtccgacagaaattcttgaaacgattgcgtcgtacaacgcagagggacgtcccatttggaaacccatgcatgctcaacctctttataaagacaatctgtttatttctgccgcagagggttcggatgtcggtcttgatgtctttgagcgcggtctttgcctgccgagcgataataagatgactccggaacagcaagatgtcataatagagattgtcagacgctgtttcgactgactcgaaagaacggagttgtttatgtacgcaaactttttcaagcgcgtgcttgatgcagtcctgtcttttctcgcgttaacggtattatttccgtttttactgattttttccgttataggcgcttttgccatgcaaggaaaccctttttttacgcaactgcgtccggggaaaaagcggaaagacggaaacgagaagattttcagacttatcaagttccgcacgatgaacaataaaaaagatgcggacggaaatctgcttcccgacgaacagcggttgaacggctacggaagatggcttcgctccacttccattgacgagttgccggaattgataaacattcttgtcggagacctttcaatcgtcggtccgcgccctcaacttgttcgcgatatggtgttcatgtctgcggaacaacgccggcgccatgatgtgcgtcccggacttaccggtcttgcgcaggtcagcggcagaaacaatatcacatgggaacagaagtttgaatacgacctcctttacatagataacgggataacttttttcggagatctgaagataatcctgatgaccgtgggcagagttttgaaacgaagcgatacggtccgtgacggaacttcttccgatatggattttggcgattggcttgtctttgaggggagagtcggcgaaaccgaatataaagaaaaacaagaggaagcaaaaaatcttttgggcgtttgattttattctgctttgaattatacactttataatccccgcctcggttgtgactgaggcgggggatttgttgtaatcgaaaacagacagccgcttgtgagaggttgcttgagacagtaatacgctgccaaacttcgataccgcttttggtgtatgcccgtaataaccttttataggggctgtgcaaaccaccgttttatcggtggtatgattttgcagttttgtattatgcgttatgtaatgtttttttgtgagttttttaagagtttttacttgcttgatactcttttttgctttgcggtcctttcgttttttttgtcgtttattaccaaaaaaactcttgacaccaatctacccctgtgatatactgtatctgtaacattatctatataggtagaaacgatgtttatgtatccgatacggatataaaacatatatgttgcagttaatatattaaggttagtgttgatttacgaggagaaaaatgatatgcccaacagtctttttacgaataaaactttgcttataacaggcggaacggggtcgttcgggaacgccgttctcaacagatttttgaagacggatatcggagagattcgtattttttcgagagacgagaaaaagcaggatgatatgcgccatgaatttcaggcgaagatgcccgaagttgcggacaagataaaattctatataggcgatgtccgagatcttgaatcgtgtcgcggtgcgatgcacggcgttgattatatcttccatgccgcagctttgaagcaggttccgtcatgcgaatttttcccgatggaagcggttcgaacgaacgttatcggcacggataatgtgcttacggcggcgatagaagcgggggttgaagcggtcatctgtctttcgacggacaaggctgcttacccgataaatgcaatgggaataacaaaagcgatagaggaaaaggtcgctgttgcaaaatccagaaattcgggaaaaacaaagatctgctgcactcgctacggaaacgttatgtgctcacgcggttctgttatcccgctctggatagaacagataaaagcgggaaatccgataacggttacagagccttccatgacgcgtttcatcatgtctcttgacgaggccgtcaatcttgttttgttcgcgtttgaacacggtgaaaacggcgatttgcttattcagaaagcccccgcttgtacgataggaacacaggcggaagccgtatgcgaattattcggcggcaaaaaagaggatatcaaggttatcggtatacgtcacggcgaaaagatgtatgaaacattgttgacgaacgaagagtgcgcaaaggctgtggatatgggcaacttttaccgcgttcccgccgacaatcgcggactcaattacgacaaatatttcaaagacggtgatgagaaccgcaatactttgaccgagttcaactccaataatacggaaatattggacgtcgagcagacaaaggcaaaaatcgtcgcacttgaatacatacaagacgaacttgcaagacgggagaaataacggaatgaaacagttgtctttggttattgttttgctcctttcggcaatattgatgttcggctgcgcgtcctccgataaaacgccgacgacagaatctacggaggcgccgacaacgacggtgcaaacgaccgctgcggaaccctcgtcccctgtttttgatatagaaacgcgggtttgcgttatgaaatatccgttgaaatggaaagaccttgttaccgttgaagtcgcggacgattctgtttgtttttcatacggggacataaagctttttgatctgctttttgattccgacgaggggtatctgctcggaacatacgacggaactcagataaaaattatttcatacgactttgataaagacagtctttcggaagacgagtattttaactgttgcgcaatgcaggaagacgtgaacgtcattcttcaatattggttgagtgataaaaattttgttatagcgcgctgacggagagaaaaaaatgaatattcttgttacaggtgcggcggggtttgtcgggaaaaatctgtgtgaagcgctgaaagcggttcgcgacggaaaagacaggacaagaccggaactgaaaatagacgaaatctttgaatatgatattgcaagtgcccccgcgtcgcttgacgggttctgcgaaaaagcggattttgttttcaatcttgcgggggtgaaccgaccgaaagatcagagcgaatttatggcgggcaatttcggctttgcctcagcgctcttggcttcgctcgaaaaagcaaaaaatgcctgtcccgttatgctttcgtcgtccgtgcaggcgacgcttatcggcagatacggacagtctgattacggcaagtccaaactcgcgggcgaagaactgttttttgactatgcaaaaaaaacgggtgcaaaagtgcttgtttatcgctttccgaatctcttcggaaaatggtgcaggccgaattacaattccgccgttgcgacgttctgcaacaatattgcaaacgatttgcccataacggtcaatgaccgaacgacggaacttgaactgctttacatagatgaccttgttgccgagatgctcgacgcgcttgaaaacaaagaacatcgctgtgagtttgacggtttgaaaaccgttttgtccgaaaacggaaaatactgcgcggcgcccgtgacgcatcacgttacgctcggagaaatcgtcgatctgcttgcggaatttcacgacgaacccgctacgcatgttatgcccgagataccgaacgggagttttgcaaaaaaactgtattcgacatatctttcgtatcttccgaaagaaaaagtctgcgtgccgctgaaaatgaacattgatgcccgcggaagttttacggagcttatgcggacggaaaagtgcggacagttctcggttaacatttcaaaacccggaatcaaaaaaggggagcattggcaccactcgaaatgggaatttttcatcgttgtttcggggcacggacttatacaggaacggaagataggttccgatgaggttctcaattttgaagtgtcgggggataagatcgaagccgttcacatacttcccggctatacgcacaacatcataaacctttcagaaaaggatgacttggtgaccgttatgtgggcaaacgaacagtttgaccccgcgcaccccgatacctattccgaaaacgtggaggaaaacaaatgaaactcgattattcggacgttgcatttcgctgcgacggaaaacttaaacttctcataatcgtcggcaccagacccgagataatccgtcttgctgccgttataaaaaagtgcagaaaatattttgactgcgttcttgcccatacgggacagaactacgattatacgcttaacggcgtgttctttgaggacttgcgtcttgacgctcccgaagtttatatggacgccgtgggcgacgacctcggcgcgaccgtcggaaacattatcaactgctcatataaacttatggctcagataaaacccgatgctcttcttattctcggagacaccaattcctgcctttctgcgattcccgcgaaaagactgcatattcccgttttccatatggaagccggcaaccgctgcaaggacgagtgtctgcccgaagagacgaacagaagaatcgttgatataatttccgacgtgaatatggcttattccgagcatgcgcgacgctatcttgcagaatgcggattgccgaaagagcgcacgttcgtgaccggctctcccatggcggaagtgctgcacgaaaaccttgacagtatcgaaaaaagcgatattctgaaaaggctcggactcgaacctaaaaaatatatgcttctttccgctcacagagaggaaaacatagacactgaaaagaactttctttctctgttcaacgcaataaataggttggctgaaaaatacgatatgccgatactttattcgtgccatccgagaagcaggaaaagacttgaagcgacgggttttgaacttgatccgcgcgttatccgtcatgaaccgctcggattccatgattacaacaatttgcagatgaacgccttcgccgtggtttcggacagcggaactcttcccgaggagagcagtttcttcacttccgtcggcaagccgtttcccgccgtttgcataagaacatcaacggaacgacccgaagcgcttgacaaagcgtgcttcattcttgccggaataggggagacgagccttttgcgcgcagtagagaccgcggttgacatgaacgagaacggcgatcttggaatacccgttccgtactacacggaagaaaatgtttcgacaaaggtcgtcaagataatcgaatcgtataccgatgtcgtgaacaaaatggtttggagaaagtcgtaaagggcgactttcgaccgctgtaaacaaatgttgacgccgaagacgggaaaaccgtttttcggcgtcgttttttgttattcctgcgcgaattttgaaataaggttaacatttttcattctttattatgcgcgggcttgcaatcgcttgacttttttggagaactatggtacaatcggaatcagataatatataaaaatctaatatatcagataggagatatttattatggctgaaaaaaccgacggcgcaatgaacggatccggcatcgttgatctcggattcccgatgtggcctcaattcaaccccaagactttcgatcaggttaccgagacccttaaaagcggtaaggtttcttactggaccggtaaaaagggtatggaatttgaagaaaagtgggcaaaatggtgcggagcggactatgcgatttcctgcactaacggaaccgctgctcttcacatcgcaatcgcggctctcaacatcggccccggcgatgaagttatcgttccctcttactctttcatcgcgtcttcgttctctatcgttcaggcgggcgctatccccgtattctgcgacgtaacggacgatcacacgatcgaccccgaccttatcgagggacttatcaccccgagaaccaagggtatcgttgttgttcacctttacggcgttatgtgcgatatgaagaagatcatggctatcgcaaagaaacataacctcaaagtcatcgaagactgcgcgcagtgcttcggcggcgtttacaccgacgaaaacggtgttgaacataaatccggtaccatcggcgatgtaggctgcttctctttctgccagtccaagcacttcacgaccggcggcgagggcggtatggtcgttaccaacgatgaagacaccgcttgggaagctcgttcgttccgtgaccacggttacaacgtaagacttcgtatgaacctgcttgcaatggaagaggctcttccgtacgttcataccagagtcggcttcaactatcgtatgaccgagatgcagagcgttatcggtatcaacgaacttgaaagatttgacgattggaaccttgcaagaagaaagaagtacgctaaaatgtacgacgaagcgtttgcaggcgtttccggcatcgcaaaacttcctgtcaacaccaaagaaagacagtgcgcttattggtggtatccgataaaccttgacctcgataaacttgacgttgacgcggcagaggtttgcaatctccttaaagaaaacaacattccctgctccggtattctttggcctgaagcatatcaggaagaagcatacaccgagcacgtcggcttcggtacggctaaattcccgttcgaatccaaagagtatacagacccgaaacaggttgactacaagaacgttctttgcccgaaagcaaagagccttcgtgccgttaccgtttccctgttcctgcacccgacatgggagcccgagcacattcagagatgcatcgacgtcttcaagaagattcttgccgagcatcagaaataatccgaccgcataggaaaatatatagagggataggcttttgccgtccctctatacggatttttcgtcgggaagcgcaaaacggtttttgaacctttttcagcgtctttccgaagtatacgggacaggtttgacggcggttttttcgtctttcctgccgaaaggagaaacattttatggacagaaaaatcaaatggggcgttatcggcgccggcggtatagccgacagaagaacgatgcccggtatgatgcttgccaagaacgccgaactcatcgcggttatggacgttaacgaaaacatcatcgagggactcaaagaaaaatatcacgccaaatacgcctacacaaacgcagatgacctcatcgcaaatcccgaggttgaagcggtatatatagcaactcccgttgttttccacgccgaacaggctgtcaaagccgctcgcgcgggcaaacacgttcttatggaaaaacccatcgcaatgaccgttgcgcagggcagacaggttatcgcagacgttgacgcttgcggcgttaaatccgcttgcggcttcatgatgcgtttcggcgctctgaatcagcagatcaaaaagttcatcgccgacggcaacatcggtcaggtcgtttccgcaaaagcgcagttcacctgctggtatcccgatatgccgaactgctggcgtcagcagaaaaagaacggcggcggcggagcgttcgtggatatgggtgttcactgcatcgaccttattcagaacatactcggcacgacctgcgacaaggtttcagcgcttatcgacacaaaaacattcaagtatgaagttgacgactccgcatccgtgcttatgcacctgaaaaacggctgcaacgcatatgttgaggcaaacttcaacattcccgacgctgcggcgaagtggagacttgaattttacggaacaaagggctgtatcaccgcgaatgacaccattcatcagcttgatacgggttccgttgaagttacgttggaagacggctctcaccccgacatcacggcggactttacaaacctttacacaaaagagattgaatcgttctccgattccatcatcaacgacacacctgttcttgttccgctgtccgacggcgttcaggttcaggaaatagttgaagcggcttactatgcggctgaaaacgaaaaggtcgtaaacatcgacaagtttttcggcagagcgtaaaccgaaataacggcaatttcagaccgctgcggcgggacactccgccgcagcggtcaaaaaaagaggaagatattatgtttaagtgtgcgttttttgaaagtgacatcaccccgcctttgtataactgtatgcccggatatttcaacgagcgacttgccacggatataaaggataagatttatgccaaagcgatagtcgtcgagggcggcaacggcgaaaaggtcgcaatgatagcagtcgaagcgaatttcataaccgaacagattgcgaacgacgcaaaagaaagaatcgcggctcattccgatataaaacccgaaaacgttacgatgtccgcaacgcacattcacaacggcggtcccaccgtggattggggcaaacttgtaaaacacagcccttggtatgttaaatttgtctcagaaaaggcggctgacgcggttatcgtcgcaaaccaacatctgcgtcccgcaaaagtaagttatgccaacggcaaggtggacgatatttcattccaccgcatatatctgatgaaaaacggaacatatcagaccaatcccggcgttcgcaaccccgatgttgtccgccccgcaggtccgatagaccccgatgttacggtgctttttgtagaagacgccgaaaccgacaagccaatgggcgcgattgtcaattttgcgtgccatcaggactgcgttgacgccatggcttacagcggcgatttttccagcgcaatgtcggataacttaaaagagcgtttcggcttccgctttgtctcggtctttttcccgggaacgtgtggcaatatcaatcactttgatgtgttcggcggcaagcacgcgcaaaaagattattatcgccttatgggtaaaaaactttcggatgagatactccgcgttcttcccgaacgtgaatattgctccgacgatacggtatctgcatataagagagtttgcaccgttaaaaagagaatggttcccgaaagcgaaattcccgaacttgaaaatataacaaaaacagttgttttgcgtgaagacgaagaaataggctcgcaatccgaccccgaccaactgcgtgcggtgttcgcttacgatctgcttaattacgtcaaggacaagaatgatacaaaagacgttccggttcagttcgtccgtatcggcgacaatgctttttacgaacttcccggcgaggtttttgttgagttcggtcaaaagataaaggccgaatcgcctttcggacataatttcatattcacaaactcaaacggtcttttcggttatattccgctccgcgacaggttcgctccaaccgtttacgaatcaaaactcggctgcacgagttatcttgaacccgaagcgggctatatcttcacggataccgcgctcgaacttgcaaacaaggcgaaaaacagtttttaagcccaaccttgacaaaaaagaggtttttatgaaaatcaaaagagttttggcagttactctctgcgtcgccgcagttttgagtttggcttcatgctcagttgtgcgttacggtaacgcgcccgaggtctacggctttgcgtattcgaccgaatttttcggaaaagaagagactttgccggaaaaatacaaaaacgccgctgcaaccgtaacaatgtgcaaaaacgagcgtgagatcgcctatgtcgcgatttccgatgcaaaaaaagagttgacgggcgtcaaattctctttcggagagttttccgacggcgaacacgttttccccgcagacaagatcgagggttacaaaatgagctacgccgaaaaattcagcaatgaaaaacaggcgtattataccgaacctttcggatatattcccctcaatgattttaccaacaattcaaaggtcgcatccgccgagaatcaggcgtacgcgcttcgtttcgagacttccgcggacactcccgcgggaatttaccgcggaacagctgccattgaatatgacggcggcaaaaaggatatcgaggtcgttgttaaggttatcgacataactcttcccgaaaagaagtcgtatgagaccaacttcggcagctggcttccgtcgagcaggtattattacgaagggtatatgaccgcggaagaaatggataaagtgttcctcgattttgccgaggaacagagaattcccgtcgcgggcggaatatgggacagaatttttaaatatcccaccgacggtcttaccggtatgaaagcgtgggcgcgtcaatgcaaatactatcttgaagatcacccgaacagcccacatcttcatgccatatgttggagctggtggatggatacgaccactcccacagaggagcttgatatacgtaaatatactcaaatgactgagttttatgaagcggtcgttgccgagggtatagcggatcactttgtatattatcctttggacgagcccgaaaagaacgagtgggttcgaaacagaaccaaggaggttcttcgtcagttcaaggagtattatccggagataagggttattctgacggcctctcctgttgaagagttttatgccgacgaggcttctcttttcgttccgtttttctattccgaacttgcggaagactatgcggatttcggcgagggcaagccgttttgggtatacttcctggcggaaagagccgcgtcgggctggtattcggcgatgataggcgcaagcggctatctccagtgggagtacggtctgttttgcgcatacaatgaagaggaaaacgcgtataacaaagaattgacgacggaagagatatggaacggactcggcggaaagtttgttcttcccggtcgtattgacgacggcatagtcaacgaaaaccgcggcgttaccacgacctgcgcggaaggtataagagacgctgctgaagaatatgaaaaacttcttattttcaaagaaaaagcaaaggcgttctatgacgggctcggcataaccgagtatacttttgaagactctataagaagcatatacgcaaatgttatagacacgcatacctataacagcgatgaaattccggccgatattttcgatttaatgcagaaagagatatactccgatattttgagcggaacgaactctttcacggttatttcggaaaaccgcaccgaggcgaacccgaacggcgttaccgtggaagtgttcacccgtaaaggcgcgacggttgcgcttgacggcaggggcgccgacgaaacccttgatttcggctcgtatgaaaagcacgttttcaacgacagcgcaacggaaaaaggtgaacgtcacacggttaccgttgacggacgctcttttgtcaagacataccgaatgacgatatatgaaaaacttgttactcttctcgatatcgaaaacaactttgacgcaataaaaacagccatgcttgcaaacggcagaacgacaatttcagccgataaaatagaaaaggttgaaatcaacggcaaaaccgcaatgaaaataaccttttcttccgacgccgaccaaatcgcgttgaaaggctctgatttttcgaccgcatcgtggaaagattattcatcgcttgttttagaccttgaaaaaggtgacggaaacgttcgctcaaagcttacagcgaacatcgccgccggtcttgcaaatgtaaacactcaaacaggcgtaaaagtttattggcaaaaaaacgcgacctctgcctttgatttgacacagggtgatgtggctgccgcaaagaaaaatacgataaaacgggttattttcggcgttaccgagccgacaactgtttacataactgatatttctctcggaaaataacgggagacaaaataaacggagttgagaaaaatgctgcaaatggaaagaaaggcgagcgacaacaagtacctgcacaaggactttcacgttacgctcgacctcggaatcacctatatcggggaacatttcggcggagacgatgccgtcaaagaatatctgacgacgttcgcaaaagcctattacccgaaaatgacgcttcccgagcttgaagattatttcaagaaaatatacgaagcggaggaagaacccgaggcgctttcgacagaactttcggacggatgtcttaaagttaaagtcgagtattgccccgcaataaagtacatgacctcgattggtcacgaccattcgccttggtactatatgaccacgaccgtcgtatacgacgagtgggctaagacctgcggctttgagttcgtcatgggggattacgacagaaaaacgggaaagacctcgtttgaattcagggaggtgtcgaaatgatttcttgtaccgaattcatctattcttacagcgaacttttcaagttcatcgagaaaaaaggcggcaaagaagcgataagaacgtattgggaacatatctcggacaattacgtcaaagaaaggcttggcgcttgcgttgaaaaggacggcattaagggctgttacaattattgggcaaagtctttgagtgaagaggccgcggatttccgcatgacgcttgacggcgacactttcacaatagaaatgttccattgcccctcgaaaggcagattgcttgattgcaaacgcattacgccttatcccgattattgcaaacattgcgatttgctttaccgccgtgttgtcgaacctctcggacttgattacgattacgatatgtccgaagtcgatcatgcgcgctgtaaactgaccattacgaaaagaaaataaggaaaaaatcccttaaataagctattaaaatttatttatataaaaagaaggacttttattatgagcaaaaaggctgacattctggtacctctgtttaccacattcaacaaagacggcagtatcgactacgatacattcgcaaaaatcgaaagatacgttcttgacaagggcgctgacggcgtttatgtcggcggttcttccgcagaatgcttctctctgacacaggaagaaagaaaaaaggttctcgagcttgctgttaaagttgcggacggcaaacaggttgtcgctcacgtcggagcaataggcacgggcatcgcctgcgaccttgcggctcacgccaaaaaagcgggcgctgacgccatcgcttccgttcctccgttctatcacggtttccagccgggtgagatcaagggctactacaccgcaattgcggacgcttccgatcttcccgttatcatctacaatgttcccggaactaccggcgtagggctttctcttgcgcagttcaaggacattctttccgatgaccgtgttgttgcggttaaatacaccgatgtcaattactacacgcttgacagaataaagaagcacacgggcgcattcatttactccggcgcagacgagtgctttgcttacgctcttatggcgggagcagacggcggtatcggaacctcgatgaactactgcaccgagaaattcatcgctatcaaagaagcgtttgacaagggcgacattgcaaccgcacagtccgaacagcgcaagataaacaactgcgttcaggctatcatcgagaccagaggtcttcccgcaatgaagtatatgacgaccgttgcgacaggcattgatgtaggctgctgccgcaaaccgttcagagaacttacgcaggacgaaaagaaacttcttgaaaagaccgcggaagaaaatttgtaagcaattaaataatcggggaagcggaacgcttccccaaacaagaaaattatattttgaggtattatataatatgaaagtagcagtagtcggtctcggctcgatgggccagagaagaacccgtcttataaagcagtacgacagttcgatagaagttttcggcattgacacgatgcccgaaagatgcgcggaatgtcaggaaaaatacggaatgaagacgttcgcgtccattcccgaccttgttgcggcggaacccgaggtttcctgcatcttcatcagcacaggtcctctttcgcacaaccccatcatcaaagagtgcatcaaatacggtcttcacgtcttcacggagatcaacctcgttgccgacggttatgaggaaaatattgcagccgcaagagaaaagggcgtcaaactcttcctttcttcgacgttcctttacagagatgaagtcgcttacataaagaaagcctgcgacgcggcaaaacagggcaaactcaactatatttaccatatcggtcagtatcttccgaactggcacccgtgggaagattacagaaaagttttctatgcgaatccgagaacgaacggctgccgtgagatcatggcaatagatatgccgtggattcttgacatcttcggacccgttaaaaagttctccgcgatgaaatcgaagaacaccgaccttgatatcgcgttcaacgacaacgtttacatcatgatggaacacgaaaacggcaacaagggcgtttttgtttgcgatgttgtaactccgaagaccgaaagagactttgaagtatacggcgaaaacttcttcctttcctgggacggaagcgcaacaggtatccgcgaatggcacgcggacccgacggctgaaaacccgaacaaggtcgaacttgcaagcgttgacatttacggcaacaacgccgagaacagaagcgaatacgcttcgttcgtcgttgaaaatgcgtatctgaacgagataaaagcattcttcgcgtatgtaaaagagggcaaagagcctgtctacacatttgagaaagacaagattcttctcgacatgataagcgaagtggaaaaataagaataattgaggggaaaagtctttacaataagacttttccctctcgaaaaatttgtaaggttggttttatatgaaatacgagactttgaaaggccttgaaatttccgcgctttcgctcggtaccgttcagctcggtatggactacggtataaacaatgcgggcggcaaaccgacggaagaaaaggcttttgaacttcttcaaaccgctgttgacggcggaatttccgttatcgacacctcgtccgactacggaacgagcgaagaagttgtaggaaaattcttcaagcagtataagggcaaaaaacccacgatagttacaaaattcaagattgagaacgaccatacgaaagttgctcccatatccgatgtcagaaaaaatctgcgcacgcaggtcgagacatctctcgaaagactcggctatgattcgcttcccattctcatgcttcaccgcgaaagcgaactgtttgattacggcgacgtgcttccccgtgaacttgaagcgttgaaagcggaaaaaatggttgaccgtgtgggcgtttctcttaacggctgcacttatgtaaaggacgttcttgcaaacgatctctacgaagcggttcagatacctcttaacatgatggacacacaaaacgtgcttcacggcggtatagacaaactgaaagaaaaaggcgttatcgtctttatcagaagcgtatttttgcagggacttttcttccgtgatcccgaaacacttcccaaaacgggactgctttcgcaggcaaaagagccgctcagaagacttcatgctcttgcaaaagaagagggactttccgtggcgcaggtcgcaataacgtttatgcgggaccttgccggcgtaaactctcttgttctcggcgcggaaaaccccgatcaggtcagacagaaccttgaacttgccaacgctcccgcactttccgcttcggcaagagaaaaaatcctcgatatgttcggcgatatcaatcccgacattctgaaaccgtggctttggaataagtaattatgaatttcaaaaggatattgttgcttacgctgtgtcttgcaacgtttgtgccgataaccggttgcggcgttgtccgcaaagatgttcccgaaaaatccgtttacaagggctcgtttctgccgaacggaatttcggaggacattttcgaaaaagtcaacgcttcaaacaagaaaaacgcagggacgtattccgcaggcaggatatatttcaatgccgcgaacagatacggatttccctcgtcggtgtttgaccttggctgtgtcggttcggattttacgcacatcgcatttgagatcacaaacgaaaacgattataccctgaaagacattacggtcagtatgtccgtaagtcttacaaacgtgacaacgaagtgttacacggaacttgaaccgggacagagcggcgttttcttctttcccgtttcaaaactcggcaataactctgtcggaaaacttcgccgtataacgctgtcgcagcaggataacggagacgaatgttttgtttcgttgaaagatatttatcctgttgttataaacccgtttttgcagaagaccgtctgcgagatacgcgacccgttcattctttcggagaacggcgtatattatatgtacggaacgggctggcagtattacaaaaatacatcgggcgacataaacggggaatggacgggaccttattccatggtggattggaaccgtatcagcgagattcttcccgattacgaacagcaatgctgggctcccgaggtctacaaatacggcgacgcgtattatgcgataaccacatacaattcttcggaaagaggcggctcggacggcacgcacaagtacgacggcagaggaacggtaattcttcgcgccgaaactccggaaggtccgtttacgcgttggtccgacggtctgataacccctgatacttgggattgtatagacggaacgctgtatgtagatgacgaaggacagccgtggcttttctttgttcacgaatggacttcgaccgacggcgagggcggcaaatttgcctgcgcaaaactttcttcggatctgaaaactcttgtttccgagccgaaagatgttttcagcacgggcggtgttaccgacggctgctttatctataccgcggcaaacggagacctgctttcgctctggtctacatatgatgacgattacggctactgcgtcaatgttattcgcagcaagaacggcatagacggcgactggctgtttgacagtattctttattcttcctgttacggtgcggaaagcggcggtcacggtatgctgttcacggactctgacggtcgaatgaaaatgagttttcatatcgacagcgataaaaactatgcggcttttataaacgtaaaagaagaaaataataaacttgttttgtccgacttgaccgtttcggacatacggtaaacccgttaaagcgggaatgaaaggcgaaagtatgaatattcttgcaataggctgtcacccggacgacgtggagataaactgcgtcggaacgcttatcagatgcgttcagagaggcgacaatgtaaccgtttgccatttctgcaacggtaatatgggacatgaagtcatcatgcccgacgaactcagacttatccgtgcggcggaagccgaaaaggcggggtcgcttgccggaatcaaagttatcaacggcgacatcggcgacctgcttgcaaacggctatgatatggagcagagaaacaaggcgataaagataatccgcgacgccgatcccgaccttatcataactcacgcaccgaccgactatatgtgcgaccacgtcgcggtatcaaaacttgtgtttgacgcttgttttgccgcgtcctgcccgcattatatgcccgaactcggaaaagcttccaaagtcaccccgctttattatatggataatctcggcggtcacggctttgttccgaccgaatatgtggacgtcaccgacgttatggaattgaaaatggaaatgctcgaatgccacgagagccagctcaaatggatgagagagcatgacaacatagactttgcggattttgttcgcacgatagccaaatacagaggcttccagtgcggcgtcgcttatgccgaagcgttcacgcaggcgtttgtttatcccaaagttcagccgaggaggttattgccgtgaaatatgacgttgcttgtataggcattcttgttgccgacgttatcgcaaaacccgttgacaaaattcccgcacccggtcttcttgaaagaataaacgggatagaaacgtttaccggcggctgcgcgatgagcgcgggcatagatatggcaaaaataggcataaagactgcggttctcggaaaaataggaaacgacagtttcggaagttttctgaaaaacgcgcttgtggaatacggcgtcggcgttgacggtatagccgttgacgaaaacgtgcagacttccgcttccatagttctttccgcttcttcgggcgagagaacgtttctgcattgcgtcggagcaaacggaactttcggacttgacgacgtgaattgggacgttatagccgattcgagaatagtttttgtcgcaggcaccatgcttatggattcctttgacggcaagccgtgtgcggaagttctcaaaaagtgcaaagaaatgggtaagatgaccgtgcttgacaccgcatgggattcgcagggcagatggatgaaagttctcgaaccctgtatgccgtatatcgacgtgttcctgccctccattgacgaggcggcggaacttgcgggcacaagagaccttgacgcaatagccgatttcttcttctcaaaaggtgtaaaacaggttgccgtcaaaaacggaaaacacggttgctatctgcgtgaaagcaaagatgcggcacccgttttgcttccgacttatacaggcgcaccggtcgttgataccacgggtgcgggcgacagtttttgcgcaggctttataacaggtcttgcaaagggaatgacattctccgaatgcggtgcgttcgcaaacgctgtcggcactttctgcgtcagcgcaaaaggcgcaacgacgggcataaaggattttgacacgataaaagcctttatgaaagataacgttcccggctgacggacaaatctgattaaaaaaggacagtaatttatatatgaaagcagtagtatacggcggcggaaatatcggcagaggctttctcggccagcttctttacaacagcggcttcgagaccgtttttgtcgatgtcaaccgtgaactgattgataaactgaacgaaactcattcctatcccataaagatagtttcgaatgagaaacaggaagaagtcgagataaagaacgtgcgtgcggtaacgcccgacgatgccgttgacgaaattgcaacggctgacattatcttcacttccgcgggtgtcagaatacttccctatgttgcgcccgttctgcgtgcgggtatcgaaaaacgctccaagggcgttgacatcgttatctgcgaaaatctgatggatgcggacaagtatctgaaaaaactcgttgatctggacatagacgatgttggttacgtcgaggcttccgtcggcagaatggttcccgttatgaccgacgaaatgcgtgagggtaatatctgcaaagtttgggtagagccattctgcacacttcccgtcgataaggcggcgttcagaaatccgattcccgatataaaaggcatggttccgtccgaaccgttccaatattatattcaatccaaactgttcctgcacaatatgggacacgccattgccgcatatctcggtatgaacaagggctacacctatatttgggaagcgatggaagatcccgaaatagcgtccacggttcgcgacgcaatgacctcttctgcgaaagcgcttgcggcggaacacggcaaagacgaaaaagaagttcttgcgtatgcggaagatcttatgttccgtttcaagaacagatacctcggcgatacgaccgagcgcgtaggcagagaccccgaacgcaaacttgaaccgaatgacagacttctcggcgcaatcaagctttgccacaaacatggtcagcccgttgacgcgatcaaaaagggtgtaatggctgcccttgacagactttaatgcaggtctgcgcatcacctgtttgtaccaaagcggatttttcgcataggttcaaaaaatgaaaataacgaatggaggaataccattatgaattttatgtccacggttaaaggttccgcccttgaaggattctatccgcagggctgggatatgaaaaaaatcgacgagtgctgcgaaaaaggcaccaaaaaagaggctttctggaacaagaagttcaagcccgttgcctgcgacaccgttgcagacctcgacacctacatgggtcacgagatcgctcttcaaatcaaaaaggcaagagacagaggcgagaaacttgccatgatccttcccgtaggtcccatgggaatgtataagtgggcggtttacttccttaaagaatggaacgtctgctgtgaccatgtcaccacgttcaacatggacgagtgggctgacggcgagggcaacactcttgaatcgaccgaccacgcatcgtttgagtattcgatgaaagaagcgttcttcaacaaactcggaaaacttaccgttcccgaatcgcagagaaattttgcaacgaagaccaatcttccgacttaccccgaaaaacttgcgaagttgaaggcagagggcgcaaagctcgttcttatttacggtatcggcagaatgtgccacatcgcgttctgggaaccgacgataggcgcagagtttgacagcgatgaagaatgggcaaaacagccgtacagaatcggtgttaaacttcacccgctcacgatagagcagaatgccataacttcgttcaaatccagaactactcttgttccgtgcagagcgaacacaataggtcccggcttgttcctgcaagcggattacgccatcggcggtgctgacggcgctctcagcagaggcatgggctggcagggaatgtctttcctgacaacgcttcactacggtccggacagacatatcacctctacctacattccgactcttcccggcaaacttttctatttgaaagaacttgcgggtccgttggttgcggagtgcaactgatctgtcggatcgaaaaacgccgctctattgttccgacgggcgaaagcccgtcggacttattgaaaatttcggttctttcaaaagcgcagaaggtttttgcctttttgaaaggctcgaataagaaaaatatttaatcggatatatgatatgaacggaattgcgttgataaaaaaagaaaagggcagaagtgtgtatgccgcatacacgctctgcttttttgccttttccgctattattatcgcaatttacgcggcggcgggcaagagttttgtgtggtgggacgacggtatgtatcagcacgtcaactctcttgcgtattacggaaaatatctgcgcgaggtcttttcgggttttctgcacggtgattttgaagttccgatgttcagcttgtcgataggctacggcgccgatattgccgcaacgctgaactattatgttttcggcgacccgttttcgttttttgcggtgtttgtccccgagcggtttacggaaattctttacaatgttctgatatttgttcgtctgtatctttgcgggcttgttttttgcgtatttttgcgccacagaggcagaaaaagcgttcccgctgttttgagcggcagcattatttacgctttttgcggatatatgctttttgcgggcgtaagacacccgtatttccttgatccctgtatctttttccctgttttgcttatcggcatagaccgcattttcgaaaagaaaaaaccgcttttgttcatcgttatgaccgcagtttgcgctgtctttaacatttactttttctatatgatctgcataggtatgtttatctatgccgttgcggtctatttctcgtttttcgaaaagcgtaattttgtcgatttgctgaaatggctcggtcggttcgttctgtattttgccgtcggtgttttgcttgcgggggtcgttttcgtcccctcggcttatgcgctgatgtccgcttcgagaaccacgtccgatgtattcgttccgcttttgtattcaagcgattattataataagtttttgtcctcgtttatcggtcccgtcaatgcgggcagctggacgcgcctttctcttaccggagtttccgtcgttgccgtcgcacttatgttcctgcgcagaaaaaaaacggcacataagatagttttcggcgtgctgacgctctttttgcttgttccgtatttcgggcatatattgaacggtttttcatatgtttcaaaccgttgggaatggatgtactgtctgctctgcgcatatatagtttccaccgttctcgaaaatacggaggagttttccgacaatcaccgtttgtatgcgggacttttcggactgcttgtttccgttgctctcgcatttaccgtttctgcgtcggataaaaatgcgcttattcttgcggcggttctttgccttacatcgctgacacttcttgcgttcagaaataatgcaaaagctgcacgcaccgcactttgcgtctgcacagttctcggcgtcggcgtcaatgtgtttttgatgtattacggctcatcttcgaacaaaaatgcaaccgtgggttatgactatgcgggttcgtttcacgataaaggagctgtttttgaaacgctcttttcggaaaatacgcccgagaccgttatttcctctctgcccgatgcggaaaaaacacgttacgatattttcggcaacggcagatataatgtcgcaatgcagcgcggcgtcaattcgactgaattttattacagcgtttcaaatccctatgtttcgggatattttgacgctttgcatctgaatgttccgatggagcagaagtattcggactccgacggacgcttggctcttgatatgcttgcgggctgccgatattttgtctccgttgacgggacaagacagccgttcggatattcgacccgtgtcgcttcgaccgtttcgggcggcagaacatacgatatttacgaaaatcccgattctcccgggcttgtatatgcttttgacaaagagttttcgtcaagccggttcaactcgctgacccctgcacaaaaacaacagataatgctttcgtttgcggttacggacgcttccgaaaacacgcaaccccccgcattcgatgaggttgaaaagaaatttgatgtcgtttgcggcgacggagcggaatatgacggcaaatcttttcgcgtcacaaagaaaaatgccgaagttacgcttactttcaacggcgacgcgctgtcggaaacgtatctggactttgaacaaataggtttttctcctttcgagcggtcagacctcgttgacgattcgacatgggctgaaatgaccgataagcagaaagaaaaggcaaacaggaaatataatatcggaaccacaaaaaacaaactttacatcaaggtctcggcggaggacgtcacaaaagagttgacctgcttcaatccgacatattcgtattataagggcgacgatgattttacggtcaacctcggaacatttgataagggcttgacgaaaatcacgttgacgtttgagacctgcggcaattatcattttgagaatatgcgcgtatcgtgcctttcctccgaaaaagttctttccgccgcgaaagcgttgaaaaataccgtctccgatatagaagtcttcaaaaacggcatttcctgcaagaccgatttcgataaggaaaaaacggttgttttcgccgttccgttttcttcgggctgggcggcatacatagacggcgaagaagcggaagttttcaatgcgaacgtgatgtattcgggcgttcgtgtaagcgcgggcgcgcatacagtgacgcttcgatataaaacaccgttcctgactctcggcgcagtctgcaccgttctcggtcttgtttcgtgtgcggcgtgtgtcattcttcctcgggtacttgccaaacgcagacgcgcagcgtctttttaatatgaaaaccataatgattaaatatcgataaatacctataaaaattcaccgaaatacgcaattttggagtggtttgtattgacaaaggtgaataagtatgttattatatattaaatttattcattttataaaagagtgaacggaagtggtaaaatggcgataaaaattattcttattgccgcatttttcgtcgtgatgctcggcgtcggagtatattgccgaaaaaaagcgacggatgtcaacggattcgttctcggagggcgaagcgtcggaccttggctgacggcattcgcgttcggaacgtcatatttttcagcggttatattcgtaggatatgccggtcagttcggatggaatttcggactttcatcaacatggatagggctcggcaatgcctttatcgggtcattgcttgcctgggtggtgctcggcagacgtacccgcgttatgacgcacgcgctcgactccaaaaccatgcccgactttttcgggctgcgctttaattctcccgctttgaaaattgttgcgtccgttatcgtgtttgttttccttattccgtatacggcgtcccttttcaacggactttcccgtcttttcacaatggcgttccctgcggtcgattatgcgtggtgcgttgtcgttatggctgttcttacgggcatctacgtcattatcggcggatatatggctacggctgtcaacgattttatacaggggctgataatgctcggcggtatagttgccgttatagttctcgttctcggcaaaagcggtgggtttacggaaagtatcaccgcgcttgcaaatgtttcttcctcggaaacggcgaattttcccggtgcgttcgcttcgtttttcggtccgcagccgctttcgctgctgttcgttgttcttctgacgtctctcggcacttggggacttccgcaaatggtcgggaagttctacgcgataaagagtgaatcgtcgataacgaaaggcactataatttccacgttttttgctatcgtcgtcgcgggcggctgctactttctcggcggtttcggcagactgttcacaactcccgaagcggtcaaagcgaacggatacgacagcataatcccgtcaatgctttcttctcttgacagcgacctgatgataggcattgttctcgtgcttgtactttccgcgtcgatgtccacgctttcgagccttgttctgacgtcttcgtcaacgataacgcttgaccttatcgcacccgcggtcaaaaaattcgatgagaagaaaaaagttgtatgtatgcgcgtatttgtcgcgtttttcatcgtcgtttcggcttttatagcaataattcaggcaaatcccgaatttaaaatatcattcatcgctcagttgatgggcgtttcgtggggtgcgcttgcgggcgcgttccttgccccgtttctttattcgctttattggaaaaagaccacaaaagcaagcgtttgggtctcctttgtgctcggcgtgggaataatgacggcaaatcttgtctgcacatttacgggaacaacgtttatttctccgtttttctcgtcttctataaatgcgggtgtgcttgcgatgctggtcggacttattgttgttccgcttgtcagtcttgtgaccccgaaaccgaaaaaagaggatatggaaagaatcttttcgtgctattcggcggaagtcgtcgttcacgcaaaaagttctcttaaagaaaaagaatgatctgccgaggagaaaaaggatatgttttttcaaaaagatattgagacaatgccgcgccgtgagttggaagaactgcaactcgcaaagttgaagcatttggtcgattactgcaaaaataacgttccgttttatgcaaagcgccttgaagcggcgggcataagcggggacaagataaaaacgctcagcgatattcaatacataccgtataccgaaaaaagcgacatcagggacaattacccttacggacttttcgcgcagccgatgaaaaagattgtccgcattcacgcctcttcgggcacgaccggcaatcccacggtcgtcggttatacccgcaacgacctcgatatgtggtcggactgcgttgcgcgtctttgcgctgcggtcggcgtgaccgatgacgacgtggctcaaatctcgttcggttacggacttttcacgggtgcgctcgggcttcactacggacttgaaaaactcggagcggcggttattcccgtttcgagcggcaacaccgaaaaacaggtgaaactgcttcacgatttcggcacgaccgttttgataagcactccgtcttatgccatgtacatgagcgaagtcgcgcacgatatgggaatatcgaacgaccaactcaaactgcgcatcggacttttcggctcggagggctgcacaaacgaactccgtgacaagatagaaaaaggcttcgggcttttctccacggacaactacggaatgagcgaactctgcggtcccggtgtgtcgggtgaatgttatctgcgcgagggacttcattttgcggaagaccacttcctgcccgaaataataaactcgaaaacgggtgaagttctcgaacgcggagagacgggcgaactcgtcgtaacaacgctttcgaaagagggtatacctatgctccgttacagaacaaaggatataacgcgcctgaattatgaaccgtgcgcctgcggcagaacgcattgccgcatggataaagtaaaaggacgttccgacgatatgctcaaaattcgcggcgtcaacgtattcccgtcgcagattgagagcgttatggcgaatatcgacggtatttcgccgcattacgaacttgttttgacaagaaagaattacacggattaccttgaagtgagaattgaaattaacgacgcgggtctgcttgacaacttcggaaaactggagaccctgcgtcagaccgcggtcgcaaaacttcaaacggttctcggcatcaaagcaaaagtgacgcttgtcgcgccgaagtctttgaaacgctatgagggcaagtcgaagcgtatagtcgatcttcgcggcaaggaggaataaaagagtgaaaaaactgatgataggcaacgaagcggttgccagaggtctttatgagggcggcttgaaagtcgtttcctcttatccgggaactccgagtacggaaatcacggaatttctttcaaaatacgatgatatttacagcgaatgggctccgaacgaaaaggttgcggcggaagtctgtttcggtgcgtcggtcggcggtgtccgctgtgcctgcgcaatgaaacacgtcggtctcaacgttgcggcagaccctctgttcacgctttcttatacgggcgtgcgcggcggtatggtcatatgcgtggcggacgaccccggaatgcactcttcgcagaatgagcaggattcccgtcattatgcgataggcgcaaaggtgcccatgcttgaacccgcggattcttccgaatgtcttgaatttgcaaaaaaagcatttgagctcagcgaagagttcgacacccccgttctgcttcgcgtctgcacccgtatcgctcacggacagtccgttgtcgagacaggggaacgcgtaaacattgcggataaaccgtatgaaaaagaacccgcaaaatacataatgatgcctggcaacgcgataaagcgtcacccgtttgtcgaacagcgcaccgaaaagattcgcgaattttccgaaaaatgcgaatttaaccgagttgaatacggctcgtccgatctcggaataatcacttcgggcgcgtgctatcaatatgtcaaagaagttttcggaaacgatgtttccgttctcaaactcggacttgtcaatccgctgcccgttgacacgataaaggattttgcttcaaaagttaaacgccttgtcgttatcgaggaacttgaccccgttatagaaaatcattgtcttgcgctcggactcaaagctgagggcaaatcgcttttcggttatctcggcgaactttcgcagagaaaaatagcggaagcgttcggcattgaagacaaaccgttctccgcgcttgaaaaccccgttcccgttcgccctccgatgatgtgcgcgggctgcccgcacagaggaatgtattacgtccttgcaaaaaacaaggtcacggttttcggcgacatcggctgttatacgctcggcgctcagccgccgctcaactcgcttgacacgaccctttgcatgggcgcgtccgtttcgggcattcacggctttaacaaatcgggcggagcggaaagagagaagaaaaccgttgccgttatcggagactccacgtttatgcattccggtatgacgggacttgtgaacatcgcttacaatgcaaccaattcgaccgttatcattcttgacaactccataaccggcatgacgggacatcagcagaatccgacgaccggttacaatataaaaggcgatcccgccgcaaaagttgaccttgaagcgctttgccgcgcactcggcataaaccgtgtcaaagttgttgacccgtatgaccttgcggaatgcgacaaagttcttaaagaggaacttgccgcagaagaaccgtctgtcatcatcagtcgcagaccctgtgttctgctcaaaagcgtcaaggcaaaatctcccgttcacgtcgaccatgaaaaatgtatcggctgcaaggcttgcatgaaattcggctgtcccgcgataagcgtcaaagaaaagaaagccgttgttgacgcgacactttgcgtcggctgtgacgtgtgcaaacaactctgcaaattcggtgcatttgaaagcgaggcgagagcgtgatgaaaacaaccagtttaatgattgtcggcgtcggcggacagggcacgcttcttgcgtccaaactgctcggcagactgcttgtgtccgagggctacgatgtaaaggtttccgaggttcacggcatgagccaacgcggaggcagcgttgtgacgtatgtgcgtttcggtgaaaaagtttattcgcccatagtcgaaagaggcgaagctgattatataatctctttcgaaaaggcggaggctgcacgttggcttccgttcctgaaaaaaggcgggaaaatgatagtcaacacccagcagatagaccccatgcccgttattatcggcgcggctgaatatcccgaaaacgtgatagaagagatgatagcgctcggcgttgatatagacgcgatagatgcgttgacgcccgctcttgaagcaggctccgcaaaagcggtcaacatcgttcttatgggcagacttgcccgtcatttcgatattccgagagaaaaatggactgcggcgatagaacagtccgttgctccgaagttcgttgaaatgaacgaaaaggcgttcgcactcggctacgacgcggaaaattgaggtgcgctatgaagtattggcaggaagaaatcgagacaatgcctcatgaaaaaatagaggaattgcaaaccgaaagacttataaaacaggtcggcagagtttatgacaacgttgaactttaccgcaaccgcatggacgcggcgggggtaaagccatccgacataaagtctcttgacgatataacaaaattgccgtttacctgcaaacaggacttgcgagacacttatccttacggaatgtttgccgtatctcttgacgaggtcgtcagactgcacgcatcttcgggtacgacgggtaaacagatagtcgttggctacacaagaaacgaccttgatatgtgggatgatatatgtgcgcgccaacttgttgcggcgggtgctgacaaaacaagcaaagtccacgtttcctacggctacggactttttacgggcggcatgggctttcacggcggcgcgaccaaactcggcgcaacagtaattcccgtatcaagcggaaataccgcaagacagataaccattatcaaggattttgagtccgatgttatatgctgcaccccgtcttatgctttgtatattgcggagacaatggaaaaagagggcgtggatgtttcccaactcaaactcaaagcgggtattttcggagccgaaccgtggacggaggaaatgcgtgcggagatagaaagacgtctcggcataaaagcatacgacgtatacggtcttaccgagatctgcggccccggcgt

SEQ ID NO: 1433 - DNA, 9563 bp, Unknown
  16S sequences of unknown bacteria
ttgaccttaaacagccagcttacgcccattgaaagcagcacagtatccccgcgcccgactccatgcgcgtccgccgccccggacgttctccaagcattcccgggacttctgccgtcagcctggtcatctccgtcgggcgagacataatataccgttccggatgggttgaccccgtcggcggacagtatttctttttcaaggcggatcctctcggactttatgtcgtcgagcagtacagaagttgcgcacatcagcatatcaatttcctccccacgcgttgttatatataatataacatacaaaaagacaaaatgcaagcctttttttgaaaaaaacaaaaaattcacggaggtataaatgaaagatcagccgctctacaaagcgctgtcggatgaaatccgctccgccatcctcgacggccgcctctcccccggcgacaaactcccctcaaaacgcgccatggcagctgaaaaaaagctctcaatcatcacagtcgcaggcgcctacgacctcctcgtcgacgaaggcttcatagaaagcaccgaacgccgcggttacttcgtctcaaaatccgccgtctcccgcccgaccgcgccgcctcccgccccaaagaaacaggcaaaacccgaaccccgcccgaaattcgacttccgctccgcctcagccgccgccgaaggcttccccttctacacctgggcaaagctcgtccgcgaaaccatctccgaaaaggacacaagactcctctccgccatcgatcccaaaggcgtccccgaactccgcgaagaaatctcccgccgtctctccctctcccgcggcatcatctgttcgccggaacagatcataatcggcgccggctccgaataccttatcggtctcgtctaccagctcctcggcaaaggcaaatgcgccgtagaagatcccggcttcaccaaagccgccaaaatctacgcctgtctcggcgctgcccccaccttcatccccaccgactccgaaggcatccgcgtcgacctcataaccgccgcccccgacataaacatcgtccatgtcaccccgtccaacagcttccacctcggcaccgtcatgtcaatgtcccgccgctccgagctgatatcatggagacgcgccttccccggacgatatatagtcgaggacgacttcgacagcgagttccggtatgagggcaggtgcccgtcgagcctcttcgcgctcgactcggacggcgtcatatacatgaacaccttcacccgcaccctcgccccgtcgatgcgtatcggctacatagtcctccccccgtcgctcgccgagcgctacgagaagcacttctcgttctactcctcgaccgttcccgcgatcgagcagtacgtcctcgcgagattcatgaaagacggctcgctcgaacgccacatcaaccgcatgcgccgcatctaccgccgtcgccgcgacgccctcatcgagtcaatctcaaagctcggcggcgacgtggaaatcctcggcaaggaagcgggcgtccacctcctcgtccgtctccctgagcgccttcccgagacagaagtgctgaaaaaagccgcgtctctcggcgtctcgctcgccggagtgagcgaataccgccgcgaaggaagcccgtccgacccgctctacacgaacgccctcgtcatgaacttcgccgggataggtgaggacgacatcagaaaggcggtatcccttctcgcggaagcattgtaatacaaaagcgcccctgccaaaagacaggagcgctgaattttataatgtggcacattacctatggatacactgaataattcgtgttttcgcagaaaaaaggcttggatttatgggattttttctgcgaaaacaaccttaaatcagtgtttccatataacgcggcacggcaattatgacatggtacaatattaacaatatacacggcacttgcaggggcgaccattggtcgcccgctcacaggtcgacaataatcttaaacgttaaacctgaacagaactatatccccgtccttgatcacgtaatccttaccctcgctacggataagtcccttctccttcgcggcgttcatgctgccgcaggcgatgagctcgtcgaagccgatgacctcggcgcggatgaatccacgctcgaaatcggaatgtatttttccggcggcctgcggagccttcgtacccttgacgatggtccacgcgcggacctccttcggtccggcggtcaggtagctgatgagtccgaggagcgcgtagcttgccttgatgaggcggtcaagaccgctttcctttattccgaggtccttcaggaattcggtcttttcctcgccgtcgagctgagcgatctccgcctctattccggcgcagatcggcattatctgggacttttcctcagccgcgtaagccgcgagcttctggtatccggcgttgtccgacatatcgcttccgatctcgtcctccgagatgttcgccgcgtagatgaccggcttcatcgagaggagctggcagtcctgcatgatcgcgagctcgtcctcggtgtagtcgagcgagcgggcgttctttccgtccgaaagagccgcgtagactctctcgagcagttcgagctcaccaccgagcgtcttgtcgcccttcatggactttttgacgcggtcgatgcgtctctcgagcatttccatgtccgagaagatgagctccatgttgatcgtctcgaggtcgcgcatcggatcgatcgagccgtcgacgtggatgatgttcgggtcctcgaagcagcgcacgacgtggattatggcgtcgcactcgcggatgtgcgagagaaacttgttgccgagaccctcgcccttggacgcgcccttgacgagtccggcgatgtcgacgaactcaacgacggcgggagtgtacttctccgggtgatacatttcagcgaggacgtcgaggcggctgtccggaacggcgacgacgccgacgttcgggtctatcgtgcagaacggatagttcgcggactccgctcccgcgtttgttattgcgttgaaaagggtgctcttgccgacgttcggcagaccaacgataccgagtttcatgttgttctcctgtagctaaaatatttataatataatattatagtacatttcccgcggataatcaagccctaaaacgaaaattatgccgcgaaagtcgagtttttttactttttcccggctttcggacgttgtcggcgcaaagttaaataaatatcgtcaaaaaattcaaaatgagttaaccactttttgtcgcggatgtaatataatgaatatggtcaattttataacgaatttcataaattggaccatctgacaaattattaacataattttggtcaattcgcttacgtgcaaaaataaacagagcgccgggttccgtccgcggagacctgcgccaaaagaaaggaacggtagaaatatggctactaaaattcttgtcgtcgacgacgacctcaacatctgcgacctccttcgtctttatttcgagaacgagggctatgaggtcaagaccgcgaacgatggcgcggagggcgtgaccttcttcaagatgtacgagccggatctcgtgctcctcgatatcatgctcccgaaaaaggacggctggcaggtctgccgtgagatccgcgaggtctcctcgaagccgataatcatgctcaccgctaagggcgaggtcttcgacaaggtgctgggactcgagctcggcgctgacgacttcatggtaaagccgtttgagacgaaggagctttccgccagagtcaaggctgtcctccgccgttactcgtcgcacgacaaccagaacgacgacgagacgatcaagttcgacaacatagagatcagccgccagaagtacgagctgaagctcaagggcaagtcggtcgacattcccccgaaggagctggagcttctttacttcctcgcgtcgaactacaaccgcgtcttcacccgcgatcagctgctcgacaaggtatggggcttcgattacctcggcgactcgagaactgtcgacgttcatgtcaagagacttcgcgagaagctcgagggcgtgtccgacaagtggatactgaagaccgtctggggcgtcggatataagttcgagctgttacagtaaggttccgcggtcatccggatcgcgtcacgggagactgccgccggcgcggcggtctccttttcgttgcgggtattctgtctgccgccgacctcttgtccgccgctgacgttctgcctgccgcgtgcaggaaccggcgaggggttccgttcagagccggaagatttcgattccgcaccgctcggcgtagcggagcgttttttcggcgccgccggtgctgctttcccggacataacagatcatcatgtccgagtggtcgaccatccaacggttgcgctcggtgattaggctcatcttcgcgtacccgtcgctcttcgtgccgagacgcgcggtgctcggaagctccgggattatcacgtcgtcgtagagctccgcgagcctttcgcgctcgtccgggtcgttcatcgactttttcatgtacggcaggaccgtgcagagcttcaggtcgaacccgtcgctcttggctctcctgaccgccttctcgccctgcatatcgaattcgcccattgagccgctgtagaatatcgtacatccctcgaggatagccgcggtcaccgccgcctcgagagcgaagaagtcgttcgtgccggttctgtgtccgcagaacatacagattttatctttcatgatcatgcctccatagatgttcgtttttctgacctttttccggtcagatatattatagcatatttttccgcgaaatacaacgaattggaatatattttattcgcttttgttttagaataaaacaggggtgaataaaatgatccgacttcgcgaactgcgtgaggcgcggcatatgagtcaggtgcgtctcgcgatggagctcaacgtgacacaggctgtcataagcaagtacgagctcgggaagtccgacccggatatacgaatgctgtgctcgatcgccgacctgttcggcgtttcggtggattttctgatcggcaggagcgagaacagcgaataccgtctgagggcggatgaggagaaattcctgaacacttaccgcagtctcgacacgcgccgccgcgagatgctcgcgagctacgccgagggtctgcgcgacctgaacggataaacagacaatcatcaaatttttttgaaacgaaggaaaagcctatgttcaaaagcgtctttaccaaatatgtgaccgccttcatgatcatgataggcatcagcttcagccttctcgcgataattctgtcgcagatggtctcgggctacgcgcaggactcgaagtcgcgggtgattgagcgcacctcagagaccctgactgatttcatcacgtcccagtaccgcgaggcgggcggcgacttcaaccagttcatctatttcgaccgcgattcggtcgagccgttcatatccgcgctcgcgaatttcaatgaggatatatccgtgatactcaccgacgctaacggcgcggtgctcctgacggcggattccggcgcgtccgggttcgtcggctcgaacgtctccgcggacgtcatgtccgaggtgtcgttcggcggcgagacgaccttttccggcgatctcggcggtgttttctcatcaaagcagatgatacacgtatcgccgattacagacggcgacgggaccttcacgggcgcggtgttcgtctgtactccgtcgaaggctaccgatcagctgatagtctcgatgataaagacgatcatcatggcgagcctgtgggtcatgctcgcggcgctgatctcggtgtacatgatctccgacaagataatcactccccttaaagagatgtcacgcgcggcgaagagcttcgcttccggcaagttcgacgtccgcgtaccggtcaggggtcgggacgaggtagcggagctcgcgaccggattcaacagcatggcggcgtcgctggcgaacctcgaggatatgcgccgcaccttcctcgccaacgtgtcgcacgacctgagaacgcctatgacgacgatatccggcttcatagacggcatcatcgacggcgcgatacctccggagaagcacgagtactacctcgggataatccgcaccgagataaggcgtctgtcgcgccttgtcataagcctgctcgacataacgagaatacaggcgggcgagcgcaagttcaacaagaccgcgttcgacatctgcgagatggcgagactcatcctcatctcgttcgagcagaagctcgaggagaagaagctcgacgtcgagtttgagtgcgcgaaagacaagatgatagtctacgccgaccgcgacgcgatttatcagatactctacaacatctgcgacaacgccttgaagttctcccgcgagggcggaaagtacaagataagcatcctcgcgaaggagcgcaaggtctacgtctctgtcttcaacgagggaatcggcataccggagaacgagctcccgttcgtcttcgagcgcttctacaagagcgacaagagccgcgggctcgacaagaccggcgtcggtctcggtctctacatcgcgaagacgataatcgacgcgcacgacgaggagatctgggtcaagagcgtctacggtcagaactgtgagttcgtcttcacgcttccctacacttcggaagctgaaatcacggtcaaggaataaagtatagtcatatattgtctgcgttttcgggcggcatttccggaaaaacggctctgccgcccgctttttgagggtatgatttttctttacacgcgcgagatataaaatttattccggattaatcattatgcaagaaatcccctatctttattaatatttatctggtataatcttatatacgatctcacgtaacggatcgtgcgtgtttttcctggcagaaataattctcagtgcggaaaaacgtttccatttgtcacccgcggggcggatttttgctgaatgttcccgggtgatgttctgattctttcacggaggagttatgctctcattttttactgtcgacaaggaaaagaagtcggctaaggaaaattatgacgacagccacacgttcggcgggttcagcagccgctggaactatgaggattgccgtcgcaggctctccggagttcacccggcggcgatcgtgctgatctctatggtctgcgtgttcacaggtctgtctggcgtgctcggcgggatactgctgttcgatttcctgaaggcgaaccccggtctgtatttcccggaggggacggttttctccgcctccgagccgaccgagctgcgcgtcccggcagctccagacgataacggcgattctgacgagctttacaccggaatgtcgctcgacacggtgactccggatctcgcgtcgaggttcatgataccggtcggcgtgatggtgcgttcggcggacccgaccagaaacgcggcgctgagggatctcatagcgggcgatataatcgtcacgataaacgacaacgagatacgcgacatagagtcactgagagaggtctacgacccgatcccggacggcgatgacgttcatatccgcgtcttccggcgcaataagtacaccgatgtgtatatagtgaagggtgtgcactgaaaaacaaaagagttcccggcgccgtcgctcagcggcagcccgggagcttttttatatcgaccatattagcgtatcagcgcgttataatttttgcggcgttttttgtacaatgcgccaaagtttgatcacttttttgaaacatcttgacaaaaggaagaaagtgtgctactatttaatgtataatgggttggtttttgccgacccctaataactatggaggatgtttcaatgtttttatcacagaaaactgcgaaaacaaggcggacaggcataatcctgctcgtcgttctcgcagtagtcatgacggcgatgtttacggtcggcgtcttcgctgagggcgggccggaggacgcgcccgggaccggagaggctgtcattgaggaagttatcgtcgaagaggaagaggagcccgccggtatgttctacgcgacgttctgggcgctcgtgccgcctgtcatcgcgatcgggctcgcgctgataaccaaggaggtttactcttccctgttcatcggaattgttgtcggcggacttctggcgtcgtcgttcagcccgcttgacaccatcgactcgataatcaacaacggtctcatcgaggcggtctccggaagcgcgggaatcttcatatttctcgtgattctcggagtgctcgtcgcgctgatcaacaagacgggagcgaccgaggcgttcggaagatgggcgaaggtgcacataaaaacccgcaccggcgcgatgctcgcgaccttcgcgctcggcgtgctgatattcatcgacgactacttcaactgcctgactgtcggaagcgttatgcttcccgtgaccgactcgcataaggtctcccgcgcgaagctcgcatatctcatcgacgcaacggcggcgcctatctgcatgatagcgccgatctcctcgtgggcggcggctgtctcgaagtacgccgatggcacaggaatgaacggcatagagctcttcatccgcgcgattccgtacaactattattcgctgatgaccctgctcttcatcctgctgaccgtgttcatgaagatcgattacggtcctatggcgatccatgagcgtaacgccatcgagaagggcgacctcttcacgaccggcgagagcaccaatcacggcgaggacatcgagcacaacgacaagggcagaatgatcgacctgatacttccggtaatcgttctggtcatcgtctgcgtgttcggactcgtgtatgtcggcggaatcctttccggcgtcagcttcattgacgctttcgcggacaccgacgcgacggtcggtctgccgtggggcggcgtcataacgcttgtcatcacggtagcttaccttgtcgcgagacgcgtcataaccttcaaggacgctatggcgtgcatcccgaagggcttcaacgcgatggttccggcgatcctgattctcaccttcgcgacggcgctcaagaacatgacgaaccttctcggcgcgagcgtgttcatcggcgggctgatggagcacgcggctgcggggctctcgctgttccttccggcggtcattttcgtcgtggcgtgcctgctcgcgttcgcgaccggaacgtcgtggggtactttcggaatactcatcccgattgtcgtcagcatcttcccgatgtcgagcgaccttctgtacatcggaatgtccgcctgcctcgcgggcgctgtctgcggcgaccactgctcgccgatatcggatacgaccataatgtcgtccgccggagcgcgctgtgatcatataaatcacgtctcgacgcagcttccgtatgccgtgacggtggcggtctgctcattcgtcggatatcttgtcggcggactcacgtcgaacggatggataggacttgcggtctcgatcgtctgcacggtcggagtggtcctgctcgcgaagttcagaaagacaaataaagcgtaaatcataacaatccg

SEQ ID NO: 1434 - DNA, 4648 bp, Unknown
  16S sequences of unknown bacteria
cgatctgtcagtgggagctttcaactcccactgacataagcatccccccctcacccgccgcttagtactccgcgcacttgaaacgggggaatgcttatctgcgttcaaaaacaggcaccgcccggcgcttagataagagctgccaagtgcagccagaaagtacagcagaatccacatgggctgcggcacacaggttccgaaaggtaaatatccaccggtcaccccggcacacagatacaatacgactgctgcatgtgaaaaagcgtagagcgtgcccagcaccggaaacagacaggcaaatatctccctcaaaagatttccggtaccggtaatacgcgcccggatctgctcattgtgctgctccatgttctgcccctccttattgttctgcgctttgctatccggacgttctgctttgccgaactgccgatgcaaaaagggatattccttcttcggaatatcccttagtatgtacagccattcactatcctattctttttttgtcagaagatttaaaatatgatccctttgccgctcgatatgcgtgatcgtcacatccagagccttttctgcgtcccgcgcgcaaagcgcattcagaatctcctcatgctcacgtacgagtacgctatgtgactgccgatcctttaaatactccatcctataccggtacatctgttcccgcagattattcagaatctgtacgagacggctgttgccggtcgccgcatagatcgcatcgtggaactccatatctgcctgtgcgcaagccgccacatcatctccataaagtgacttgcgaaatatctcctccctctgccgcattgcgttgagctgctcctctgtgattttcctgcacgcaagcttcactgccagctcctcaagtgccatccgtacctccagtacgtcctccagatccgtcaccgtaatctccgcgacaactgctccttttctcggaatcatcagcacaagtccttccagctccagcttccggatcgcctcacgcaccggtgtccggctgacaccaagcttctgggccagatgaatctccatcagccgttcgcccggcttgagctctccccttaaaatagcctgccgcaatgtctgaaacacaacatcccgcaacggcagatactcattcatctgcagttcaaattgctccatatatatgatacctccacttttgtatctcatgatgttgggggcaaaaggtattttgacccctatgacacacggattgctttgcatctcatcaaagaagagctatacctccgcgcggttatggaaaaaacgggtcaaaaatacttcttttgcaatgctgccgccacgcagacggctataggctgccttcgccttcgtccggtcatcaaacagtccgaacacagtcggtccgctgccgctcatcattgcattcaccgcaccataatgcagcatcgtatctttgatttcccgaataaccggaaaggccggaactgtcacggtctccagtacatttcccatcaattctgccattttgtaaaagtcaccgtcacggatcgcttgaatctgcccgtcaatatccggatgatacgacagctcaccggctctcaaattaccataaacaaatttcgtcgacacatgaacctttggctttgccagcaatacaaagcagttcggagcctttggcaggaccgtcagctgctcaccgatcccctctgccagcgccgttccacgctgcagacaatatggaatatccgcccccagctttacgccgcgctgctgcagttcctccagggaaagccccagacgaaacaaccgattcatgccgaccagcactgccgccgcatccgagctgccaccggccaaccctgctgccacgggaatgtgcttctgcagatccatcgaaacaccaccttcgattccaaactcatcgatcagaagctgtgccgcacggcagaccagattatctgcaccggtcggcaaataccgcaggttcgtcctcagcactatccccggctccgctttgactgtcatccggattttatcatacagatacacactctgcatcaccatacgcagatcgtgatatccgtcctcgcgctttctcagtacatccagcccgagatttacctttgccatcgcctttaacgtcagttctttcatattcacattgcactcctatgcactttgtatacaatttatctgtattttaacaagccgtctgccatctgtcaatcaccgcagaacaactattttatttttatgaaaaatgcgtaacttctcattctggcttctgtcagtttatcacaacctttttcatcaaaatgatccggtctccttttttcacctcttcccgtggcagattgttcatctccatgatctgctgtggcgtgagaaaatagtttttcgcgatgtcccacagactgtcattttcctgtacaatatacccggtaattccgggaaccgctgcaagcatctccggcggatattcctgttcctctaccccgagaatacacatttgctccatcgggcgcacaacgaagatatccagccccgccgtcagccggatttcgatctcctcgctatccgccatcgtcgccgagagttgctccatggaaggcagtaccgtaaaacggcatttttcatccaggcccggcacctctgcaaaatgaccaaacggaactgtcccgtcaattaccgcaaacggcgttgaatcatccgatgaaatatacaataccgataccggtacggctccctcgatccggattccgccctcctctgcctttacctgatcgatcttaatgcttcccgtcacatgcgccacctgcaacacctgcggcttcgcgccctgcacctggattttcccggatgccttgcatcgggatgcatttttcatcacgaactgttcgcagagccgcctctctgtcccaagcaaaagattcctggcaggtgaatacaaatcctccagaatttccgtctcctcattttcataaagccgaatctgaagctccagcattccttccatatagaaaatacggagctctccgtctgtatcttctttcacctgcaatttttcctgtgccagcatgacctcgatatccggaatcatctcttccgtacagtcgccgcacgccacatcaccttcaaatggaattacctgttccagccactgtgtcgacgctccttcatcctctgcccgatacaagacaaagaaaaacaattttccctgcactgcaagctttccctcctgcagctggattcgcgtactgcgcagttgcacattttcccataaaagctccctgatattcggtttattagacggaagcgggatctcctccttcagacgaaggatatcctttttctgaacggctaaggttatcagctccagcttcttctttttctgacataccggaagctctgtctgcactcctgccgctgcacggatatcatatatctcatccaccgacgcatcatatctcacaattgcccggatcgcaagctttctggaattgatcagagagacgttcagatcctccgtctcatagtgcaggcgcacatcctccccggattcgaggtcctccatcacaatcgtctcctcaaatggcagccgtgtttccagacggtgcagacggtgctccgccgtatcatcctgataaaggatccctacctccatatacccgtccgcatacagttttccggtctccgccctagtatgttctatcacgacatgttcccgattctgaataatcatctccacatcaggctttgcgtccggcacattcaggtcctcctcaagcacgacctgcttctctacctgctttgctcttctgcacatatgaatatttttcatcaacagctccatagtctgccctccctgctttgcactgctcactgaatttccactgctttcccggtcgccgccacccgcaccacgatatacgggtacgatgcatccttcggctgcttttcggcatcttctggtccgatcagtcttgtcgtcagatacagcttctcctcatcctccgtacaggcatccaccgctatactgtagcccccggttttctgttctccatagccgcgaatcaaatacaggtcattcccgtcttcaaacgtcatccggatttctctcgcctcattttcctttattgcctgccgcagggcagccggaattgtgcgctcttcttctactgaaaaagctaccggcacctgctctcccgctgtggaacccccctgacagcctgccagtaaaaacaccagcacacccgacagccaccacctcaggcgtggatagtttccggttcgttctgtctttgtccccataatttccttccagatttccgctttctattataggtatgggaatcagctgtgaaatatgtctgatttttaccagatatttcattttgttgttgtgttctttttacaaattgtttataatggtatctgtgctgaaaaaaagaaatatgaaggagacttacaattatgaatacaaagcttgctcagaccgaaccggagcttgtaaaaaaagaagctccggttcgtctctccggaatcctgctgcatccgacatccttcccatccccgtatggaatcggcgatctcggacctggtgcttatgatttcattgactttctcgcggcctcggccagcatctctggcaggtactcccgct

SEQ ID NO: 1435 - DNA, 6267 bp, Unknown
  16S sequences of unknown bacteria
ctgccgaaaaattctataaacagtccgccgaaagcgcttgaattccacgaatccgtatgtatgcatgcgggatgcacttcaagcactgcgtctatatcgtcgaatgctcctgcagcaaccatcggcagctttccgccgacattttcctctgccggagtgccgtatatataaacctcgccgccgtattcatcggcaaattctttaagacctattcccgctcccacgcctatcatacagataagattgtgtccgcaggcatgaccaatttccggaagcgcgtcgtattcggatataagagcgattttgggacccgtctttttacctttgtacacagctctgtacgccgtaggcataccgcagcaattttcctctacatcaaacccgtgttttttaataagctccgtctgccacattaaggctttaaattcctccaggccgacctcgggattatcgtgaattttgcgcgataattcctttaattctggcgttagtgttttaaccgttttatcaattctgtctttatccttcatgactgcctccttccttaaattttaatatcagctttcggctttctaattttcgtccttataaacggaaacagccgcttccggacatactgtcgcgcaaattccgcacgcgacgcatttttcggcgtttttgaattccgccgtgtaatacccgtgcgaattcagtttttctcccagctccattacctttgccggacaaaagttgatacagtacagacattccttgcatttgtcggtatcaatttttacaaggttcatatcctgtctcctttcttataaaagttttttgattttttcatcatcgtagcctaaaatgtttttaaaaatttcttgattatgctctccgaggcgcggcgccgcaaagcggatagtgtcgggaacgccctctacctttataggtgatcccggcattgtaaaatcggtgccgagccccgggtcataaactgtccaaagcatgtttctctcttttatctgcggatttttcatgcactccgaaacacttcttattcttccgaacggcaccggatttacgagaaactgctcctcgagataatcgagtgtaaaatatttgcttttttcttcgattttgtccttaaggtcgccgatataatttttttctctcgcatcaaatgtcgcgtacctcgggtcgtctataagcgcctcgagtccaagcacattgcagaaattcacccactgtctgtgagtgccgactccgattacaaagcttccatccttcgcgtgatacaaatcccaggggagtgaactccagtgaatgtttcccgcacgcgtcgaatctatattttggagagtcttataaataacgccctcttcgagtgtggagaacattgtatcgagcatcgctacgtctacatgatagccttcgcctgtaatagtccttctgaaaagcgccatcattattgcgagcgcaagatatgttcctgtaaacgtatcagcaacagaaggccctatttttacagggtcgccatccggatatccacacatatccatcatgccgctttccgcctgcgccacaatgtcatagcacggcttttctgacatcggtcctgaaagtccgaagcccgtgagctgagcgtaaatgattttcgggtttatttcttttatcgactcgtatgtaaatccgagcttcgcaaatgttcctgccttaaagttttctactattacatcggactttcttataaggtctcgcagtgcctccttgccctcttccgattttaaatcgagcgtaattccttttttgtttctgttaaaatacgcgtaataaccgctgtaatcgttcactaccggtgcccatatacgcgtcatgtcaccgccgggcggttcgatttttattacatctgcgccctgatcggcgagatgcatacagcagtaaggcccgctgagcgcctgcgtcaaatcgagaatgcgcacaccttcaagcaatctttccatagtttcctccgttatttacagtaattgtgagttacttctccgaagcgtttgcagccttcctctatattttcagcgctttcaaacgagaagcagattctgaatgacttgcccggtatgcttctgtcggacgaaaatacatatgaaggaacaacgcctattttattttcaatgagtgagtcaaacatatccttttcgtttacatagtcaggcactgttacccaacagaacattccgccgctcggaacttcaaccgtacatgccggatgaacatacttgtctagagcttttttcattacctgtctcttattgtcgtagatttttctggtatcgacaatgtgctgctcaaaatcgtatctttccatatatttgagaacgacgagctgagccgccatattcgttcccgagtcgattgctgatttgcatgcgtaaattctgtcgataacttcgggagctgcggtgcagaagcctacgcgcattcccgccgctattgtcttggagaatgtactcgtatatacaactcttccatccgtatcaaagctctttatgcacggaaggaattctccttcgtatcttaaatcgccgtaagcgtcgtcttcaagaatcaaaacatcgtatttgcatgcaagctcgtaaaccttctttctcttttcgaatgaaagcgttctgcccgtagggttgctgaaattcggctgtatgtaaatatattttacgcgttctgtgtttttaagcgcttcttcgagagcttctgtgtctattccgtcaggctcactctttacgcccacaggctcgccgccgaaaagccttacggcagtaagcgcattggagtacgagaattcttcaaaaataactctgtctccctgatttacgaataccataggcataataaagagtacgccttgagcgccgcccgttacgagcaccttgtttccgtcagccttgatattctttactctttcgagtctttcggcaattttactgcagagagcttcgctgccgcccgttgagccgtaaaggaaaatttccttctggtcgttggcatatgtgtcgtctgaaagcttacgaagctcatcaagcggaaacgactcgtatgctggatttccgtcagcaagcgaaataaagcccggaattatctctgcaaatttgtctatttccctcatgagattaggttctgcaattttcgctctgtctgataatgcataattcattttataacctcctaataaaaaatcagaacattcagatataacggcttcttatgtatttaatcgtatattaagtgtatttgtaagtcaaacttgataattttaataacatttaaagaaatgctttaaatttgccgtattcaggtgtacaataagacatataacagttttacaggaggaaacgatataagtatgggcgatttaaataagtatgagatttttttgaaagcggcggagattggaagttttaagaaaaccgccgatgagctcaactatacgcaggcgggtatcgcatatgtgattacttctcttgagaaggaatttggaatttcactgtttataagaaattacggtgaggttacactttcatctgaaggcaaaatgctgcttccgtatatacaaaacatatgcacacatgagaaaaaactcagaaatataatagatgaaataaaacatttagacgcaggttatgttacggtcggtgtttttacgagtttttatgtaacctgtttcgcaagacttgtaagactgttcggagaaaaacatccgcatatcaaaattattccgtactataccgacgaacaagacaagctgacggaaaaagcagtttcgggtgagattgaccttgcttttgggattgctcccgtgccggagatacttaaatccgtaaagcttttggaggatccaattgtcgccattttgcctcagggtcatccacttacggaaaaagagcatctttctgtttccgaccttcaaaacacaccttatgtgcagaatgaaaacggcacgtattcagaggttgataacatttttaacagatacgacataaagcctcatgtcgctgcaacaactcaaaatgatttcgttacggtagcaatggttgaggaaggcttcggttatgctcttgttcccgctatattctgcaatgccgtcaacaactcagtggtaataaaaccacttgaaatagacgcgaaacgtgagattgacgtgttttacaatcaagcgcttccactatcaaatgccgcacgggaatttcttgaagttaccgaagaattcttttccgattcagaaaattactttttcaagctttttaaaaaaaatgttttcaaacctcgtttatgaacaaaaacaggtgattttcatcatcgtatttaacatttttaaactgcatgataatgtgctcacctaaatcgtgatacattaaaatcaacttctaatatgaattctttgctgtcaccctttagccgcacaattgccaaaagaaaacaggcggggctaatctttactttcaatcgcttgttccatcctatccagaatatatcgtgaaaatttgctgtctggaatactatctgaaaaacttgcttctaaatcgttttgtacatcatcaaaagcctgtcgtacttctgcctgctcttcgggagtcatagcattccaacttttattgtctgcataaaaacatccgctcatcataattgcaattatgatgagcactaaattaacagaaaacaatttcttgattctcttcattatgcccatattcttctccttttagaatccaaaccttgccaaaagttcaagcgcagtaataaatagtactgtaatgattgccgttgctgctactacgaagattataccgagtgcttttttgtattcgtggctcaattctttcttttctggagccggaacaattatttgcttttcagtgcctaacagaatataatccgcacttacatgatagagttctgtcaatttcactacattatcaatttctggtttcccctgtccactttcccactttgagatagcttgtcttgaaagtcctagcatatcggcaacctgctcttgtgaataacctgcttttttacgcaattcttgaagtctttctgctatgtccatattcatcacctccgataaaagaataccatgattcactggttgcatacaatcaacaactatttaattgatgtcaactttccgttgcggtcaagagaattttagttgcttaatggtttatggggttaatatcatcaattttagaaagctatttccggcagttttggtattgcaatcttctttgccgttttcgcgactgcaaagccgcataatacaaagtttgcccgtctatttgtccatgctggctggcgttttccacatccttttgccggatgaggagggacactctttgaaaacgcaaactttatattttcattgtgggcggtagaaacagcaagtgccgcagccagcccctttccagcgtcagccggaagcaaaggtataacatactagactttcctacggaaaatcgtgtgccaacagggatgctgctcgcccctattggaaattcagagctaaaggattgcatcctctggacacccctgttttcgtcacttgtgtatatacaaacttgtgaccgcttgtatatttcacagcttccgaaaacacaaaaatcccacagacttcatcctatgatggggataaaatctgcgggattttcttttcatccacattccgctggaatgtggatcaggacgtttctgagaggataatctcaaatcttcacaacataaggttcatcttcaataatgctctgatcgtgagtaacaatgataaccgttttgccttcttcattgagttcgtgcaacaacttcataacaatatctctgtttttcttgtcaagtgagccggtaggttcatctgccaatacaacagaacacattttcatcataagacgagctagtgcaactctctgttgttctccgccagaaagttgataaacctttttgttcacttctttcgatagtcctacacgggcaagagcttctttcagtgatacggcggtgcggcttgacttttttatcaattccaaattttcttttactgttttgttttcaagcagggcaaagttctgaaaaagaaaacctaccgtatctgcaaaaaagctattcttatttttaagtccggtaatatctaagccatcaacaacaatgctgccgctgtccggcttttcgataccaccaatcatattgagcagggtactttttccgctgccgctatcgccactgattacaaaaaaacttccatccggtatt

SEQ ID NO: 1436 - DNA, 32759 bp, Unknown
  16S sequences of unknown bacteria
ccgggtgcgcgtgggccgcgccggccttggccgcggcgaccgccgccgcgtcgtagggcgcggcctcgcgctcttcaaaggagatggcgccggccgggcacgcgggcagacagtcgcccaggccgtcgcagtagtcctcccgcagcaggcgggccttgccgttcaccatgccgatggcgccctcgtggcaggccgcggcgcagagcccgcagccgttgcacttctcctcgtcgatgacaatgatcttccgaatcacgcgtttcatcctttctccttgcgtttctgggacaagcatactatactgaaggcgaaaagtctgttggatttccaacgaagggggtgaaaaaatggactgtgcgctctttgccggcatcggccaggcggagcgggaggagatgctgcgctgcctggacgcgcgccgggcgaagatggtccgcggccaggcgctgctcgaggcgggcgggccggtgcgggaaatcggcgtggtcctccggggcgcggtgcaggtgcgcagcacggacttcttcggcaaccagacgatcctggcgcagctggggcccggcgacctctttggcgaggccttcgtctgcgcggggctttcccgctcgcccgtggaggtggtctgccagcaggacggggaggtcctcctgctggactacggcaggatcctcggcgcctgcccgcgcgcctgcgccggccacaggcgccttgtggagaacatggtcgcggtccttgcgcagaagaacctgaccctcatgcgcaagacgcgcatcctctcccggcgcacgacgcgggaaaagctcctggcctacctctccgagtgcgcgcgggaggccggcggcggacagttcgacatcccctttacgcggcaggagcttgcggactacctgtgcgtggaccgcagcgcgatgacggtggcgctcatggccctcaagcgcgagggcctggtcgagctggacggccgcaccgcgcgcttactcgcaaaaaacagcgaaaggcgtgatcttcatggcatatgacgcatacctctacggcatgatcctgcgcaccaacagcttcctgctcaagggagactatcccaaggccgatacctatggggaaatcctggaaaagtattccctgccgggcggggaaaccggcacctgcgccacggtcctgctctccctggggcgctcggtcaagatggacggcacctacatgggccgcacgaccatgcccttcatccaggacttctacaaggacaaggcctgcgacctgacgagcctgcacctggacgagagcttcgacggcctggaggacaacgtcctcgtcgcgggcaacacgcgcacgcccctggggcagtttcaggccttttacgccgaccccaaccaccgctggaacccgcccagggaggaggacatccgccaggcgcaggtcgcggcgatcgatccctacttcttcgaggattccatccatgcggcggagatctgccgggacctgaagaagccctacgtcaccatcgactgcgcgtacgacagcgtgctgcaccgctattcggcggtcaacgtcgtcagcgacgagttctaccgcgaccactacccgcaggaggcgcgcgacgacgtgctgcgcaagtacatggaggcctccgacgggttgaccatcttcaccctcggcgcgcgggagatccgctttggccgaaagggcgggcagatccagtcctttgcgccctacaaggtggacgtggtctcgaccctgggcgcgggggatacgttcaaggccgggtgcgtctacgcgctctgggcgggcatggacgacatctccaccgtgcgctttgccgcggccagcgccgcgattgcctgcacgcgcttcccgctgccgctgaacccgccgcagctggccgaagtgctgctgctcatgtccacgagataaagaaaggggagacaaacccatgcaggaaacgattcgcaagttcaaggaaatccttgcaaagctgaacgcctatcagcacgccctgggcgtgctgcagtacgactcggagacggcgatgccgcgcgcgggcgcggcgggctatgccgcggccatgggcgcgctctccgaggaggtctacaagctccagacctcggacgcgttcaagggcgcggtccgcgagctgctcagccgcaaggcggagctggacgagatcaccgggcgcgaggccgaggtcctgggcgaggagatggcgcgcatggactgcgtgcccgtgcaggagttcgttgagtaccagacggagctgggcctggcctccagcgcctggcgggaggccaagcagaggagcgactacgccctctttgcgccgcacctgcaaaagctcctggacagcacgcgccgctttgcgcgctactacgcgccggaccgcgatccgtacgacgtcctgttggacgagtatgagaagggcatgacccaggcggagctggaccgcttcttcggaaccctgcgcgagaatctgatgcccctggtgcagcgcgtcgccgagcgcgcggacgcggtggacgaccgcttcctcttcggccatttcccggtggcgcagcagcgccggctcgccgaggccgtcatggaggtcatgggcctggaccgcagccgctgcgccctgggcgaggtcgagcaccccttcaccacgaacttctccaagaacgacgtgcgcatcaccacccattaccacgaggagagcctggccagctcgctctactccgtcatccacgagggcggccatgcgctctacgagctgaacacggacgatgcgctcatcggctcgcccctggccggcggcgcgagcatgggcatgcacgagtcgcagtcccgcctctatgagaacctgatcggccgcagcgcgggctttgcgcgcttcctgttcccgaaggtgcaggcgctcttcccggcgcagctcgccggggtgacggcgcaggacttctaccgcgcggtcaaccgcagcgcgccctccctgatccgcatcgacgcggacgagctgacctatcccttccacatcctgatccgctacgagctggaaaagcgcctcatcgcgggcgacctgccgctccaggacctgccggcggagtggaaccgcctctacaaggaggtcctgggcgtcgcggtcccggacgatgcgcacggcgtcctgcaggacagccactggtccggcgggagctttggctacttcccgagctacgccatcggcagcgcctacggcgcgcagatcctcgaatccatgaagaaggacctggacgtggacgccctgaccgaggcagggaaccttgcgcccatcacggcctggcttgcggagcggatctaccgctttggcaaggtcaagaccccgggcgagctcctgcgcaacgcctgcggcgcggactttgacccgcagttctacgtcgactacctgacgcggaaatacaccgccctctacaacctgtaaagggcgccggaaaggggaaagacggatgcaatacgtttccatcgcagactatggagccaaagcgggcgcgctctgcacagaggccatccagcgcgccctggacgcggcgagcgcggccggcggcgtcgcggtgatcccgcggggcacctaccgcaccggcacgctgaacctgcgcggcgcctccctgtgcatggaaaagggcgcggtgctcaagggctcggcggactttgcggactacccggagattgggtacgaccacaacgagatggggcaggtccgctcgctgctgtacgtcatggacgagcaggacgtgcacatctacggcgaagggaccatcgacctgagcgccgaggccttctacgacatggacaagcgcacggtccccgagagcgaggtcgagctcacgcccgcgcaggtcgcggaatgcaccgccacgtacgtgaaccggcccaaccagcccatcttcttcctgcgctgccggcacgtgcgcgtcgagggcgtgcgcatcacgggcgcgccctgctggacgatgtcctttgtcgagtgcgaggacgtgcgcgtgcaggacctgaccatcgacaacgaccgccgcatccccaacaacgacggcatgcacttctgctcctgcaagggcgtcatcgtgcgcggctgcaacatctccgccggggacgactgcatcgccctttccggcatcacgaactgggacaagccctgcgaggacgtggtcatcgccgactgcatcctgtgttcgagctccaaggcgatcgtcgtggggtacatgcactccatcgtgcgcaacgtcaacatctccaactgcgtgatcctggacagcaaccgcagcctgtgcatcatgtccagcacggacggcatcgtggaaaacgtcaccgcctccaacctccggctggacacccgctgccgcgcgggcaactggtggggcaacggcgaggccgtgtgcatcatgggcacctaccaccacctggccaactaccgcgaccccgtgccgcagcgcgaggcccacgcctgcatccgcaacgtgctcctgcagaacctgaactgcaccacggagaacgccctggccgtcgtgggcgaaaacggcagcgtggagaacgtgcacatggaccacctgaccgtgcagctcaaggacagcgagaacctctgcgtcaagggccgggtcatcgacatcagccccgcgcccaacaccgcgcgcctgcccgaggagccgacctggctctacctgcgcggcgtgcgcaacgtcacggtcaccaacgcctttgtcgcgcccttccacggcaagacgcccatcgcctacgccgaggacgccgagggcgcgcgcttctgacgagaagaggagggaaaaccacccatggacctggagattcgcgcccttgcgccggagctcgccccggactacttcgacttcttcgagaaccgcgcctttacggacggctcgccctaccgctgctactgccagatgttccaggcgagcaaggccgaggccgaggcggcctattcgggcctcgcgcccgaggagctgggccgggccgcccgccgggaggccgagcgccagatccgggaggggcggctgcgcggctacctcgcctacgccgggggacaggccatcggctggtgcaacgcctgcgaccgcgccaacctgcccgaggacccctgcgtcggcccctgccgccacgcgccggcggaggcgcggatcaaggccgtgctctgcttcgagatcgcgccggaatggcgcggccggggcgtggccacggcgctgctcgcccgcgcaatcgcggacgccgcagccgagggctatgccgcgatcgaggcctatccccagatgcgcgaggcgcgctacgagtgggactacgccggcccggtgcgcctgtacgagaaggccggcttccagcaggtcgcgcaggggccggagggagagctggtgctgcgcaaagcgctgtgaggaaaaaaacgggaaccgctggcgccttggggggcctggccaagccccttcccgagattcggcgcgttgtgcgcgccgcttgcctggttttgaagcgcgccgactttgccggtacgcgaaacaggagccgcttccctctgcagggagcggttcccgtccaagcggtagaaccaggagcctaagccctttttccgaactccgcagcgcggcatgtacatcgcggggaagcgggccaaaggcccgcttccccgcgattcggcgcgttgtgcgcgccgcttgcctggttttgaagcgcgccgactttgccgatacgcgaaacaggagccgcttccccctgcggggaagcggctcctgtccaaacggtagaaccagaggcccaagccctcctccgaaccccgcagcggcggcgtgcacgccgcgagaaagcgggccgaaggcccgctttctgacattcggcgcgttgtgcgtgctgcttgcctggttttgaagcgcgccgactttgccggcgcacaaaacgggagccgcttccccctctgcgggggagcggctcccgtcgtctcattcgtccagaaagtccaggcggccggcgtaccagccgcagacgccgtccttcttcacgcggcggcccagggagcagggctcgcggtcgagcacggagacgacgtccccggggcgcaggggcaggcggtagtccgtgacgtccaggcagcggatgtccggttcgcgggaaaagagcaggccgcgcggaacgtccatctcgtagccggtgcgcttgtggcggatgcgcgcgacgtcgccggtctccgagaggatgtccacagcgttgtcaatccagcgcaggtggaaggagcaggcgcttgccgcctgcgcgtcccggacgcgcgcccggggcaggccgtcataggcggcaaaggcgaagtcctcgcggtttaggtccggcaggagcagcgcgttgagctggccgtcctcgcgcagcacgttgccgccgtcgatgctgaggacgcgcgcctcccggctgacaaggggcgcgttgcaggggaagtcctcccggtagagggcgacgggccagtggccgaccaccacccacttggggaaggcgagcccctggtccaggaaggcgtcccgcttgacgcaggaccggacggggcacgcgggcagggcggcctcgtccgccgtgggcaggcccgcatgcacgaagaggtgatgcggcgcggagagcaccgtgggcaggccgcgcaggaaggccagctcctcgcggtagcgctcgttgagcaggcggatgcacgagcggacgtcctctgcctcgccgggcgcaaggccctgctcctccagcatctcctgcaggaggcagggagattggtgcttctgccgcagggcgaggagggagcggaaggcgtcctcctcctccagcgcctgcagcacccccaggtcgcagttgccgatcaccccggccacgggcacgcggcggcgcaggtccagcaggtagcgcagcgtcgcgaggctctgcggccccttttccacgatgtcgcccacgagcagcaggaggtcctccccgcagagggagacggtttccagcagccccttgagcaggggcaggttgccgtgcacgtcggagacggcgacgacgcgccggcccggcacggcctccaggcgctgaacggcggcattcacgggctcattcctcctccggcaggttcggatggtagagcttgcggccctccagcgcgcgcacgcggtcggagaacgcgcccttgggcgtgatgagcagggcctcgtgcatggcgaacatgcgcgcatccatcatgtccagcaggtggagcatctgcgcctccgggaagaggggcggcttgggcgagccatactccgggatctcgtggtgggagaggatcatgtgctccacgagcaggagcacctcctgggagaggccgagctgcgcgccgacctcgcgcacgtgcgccacgccctgcacgatgtgccccaggaggttgccctccttggtgtactcggaggcgatgcccagctccccggcgctcagctcgtcgatcttgcacaggtcgtgcgcgatgaccccgcagagcagcaggctgcggttgaggtaggggtagatgggcagcagcgcctgggccgcgcgcagcatggtggtcgtgtggtgcagcaggccggaccgctcggcgtggtggaagctcaccgcggccggccagtagaggagctgctccttcttttccacgagcagggccacggccaagcgggaaagctccggatttcccagggagcgggcgcaggcgaccaattcgtcgtacatctcctgcggggcgcgcggcgcggtgggcaccaggtcgctccactcgatctcctcctcgcgcgcggcgcggatgcggtccacgcgcatctgcagctttccgttgaactccgtgatgagcgccttgacgcgcacgggcgcgttcaccgccgggaccgcggcgttctcctgccagttccagcacttggcgttcatctcgcccgtggcgtccatgaccgtcatgtccaggtacagcccgccgttggaggacttgcgcacgtccacggtcttgaccaggagcacgccgtcgatcgcatcgtccttgcggcgatacgccaggttgattttctgcatggttttttgtcctttcctatttctcaaccggacgggaatcgcccgggtcgtttttcagcgcctccacgagcgcttccagcgccttccatcccgcgtcgtccatccgcaacagcgcggcaaaaaagcgctttttgaagtcggaaggttctgcaagaaggatcttctccagcgcttcggagagctcttcgtccggcgagcacggaacgaacatctcgccctcgcccgtgcggagccagcgctcgttgacgcggaaccgatcgcaaatctgtttgatcgcagccccggacggcttgttgcgcccgctttcatacgtcgcgatcgagctgttctgcaagccgatcttttccccgaaagccttttgcgtcaaacccagggcaagccgcaattcccgcaagcgttcgtgcattccatccccctcctgagtggatttcattatagcaggtggactttggaaaatcaagaacaaccttcggtttctgtggagaaaccttggatcatccagatatggatttgcatagtcaagagaggctgcatgcaagccgcgtccacagggaagaatcggcggggaacttgcgcaatcgatccaggctgtgctatacttttttccatcgagagattttttagagggccgccggataggggcggccgaggatcgttcagtttcccacaagaatgtggcgaaggacaaagaggagcgcgagatttatgaagtacatactcgtcattggggacggcatggcggactttcccgtggaggcgttggggggccgcaccccgctggaggcggcgcagaagccgacgatcgacggcctggcgcgccgcgggatcgtctcggaggtcaagaccgtgcccgacggcgtgcccgccggcagcgacacggccattctctccatcttcggctacgacccgcgcaaggtctacacgggccgctcgcccctggaggcggcgggctccggcgtcaagatgcagccgggcaacgtctccttccgctgcaacctggccgcggtgagcgaaaagcccggcgcgtatgaggaacaggacatgctctcccacagcggcggcgccatcgacggccaggacgccatggccctcatgcacggcctgctcgcggacccgtcctttgccgcgctgctggaaaaatacggcatgaccttcaccgtcaacccttcctaccggcacatcgccgtgctgcgcagcggcagcgcgaacctttccaccacgccgccgcacgacatcctcggccgcgccatccgggagtatctgcccgtgggcgagggcgcggacatgctgcgggagatcatggccgcctcctatgcggtgctcaaggcgcacccgatcaacgcgcagcgccgcgccgagggaaagctgccggccaactccctgtggttctggggccagggcagcgcggtggagctgtcgccctttgcggaaaagtacgggcacacgggcgacgtcatcacggcggtgccgctggttgcgggcatcgcggagctggcggggctcaggcacacgccggtcgagggcgccacgggcgagatcgacaccaactacgccggcaaggtcgccgcggcgctgcgcgccctggagacggacgactttgccgccctgcacgtcgaggccccggacgagtgcggccacgcgggcgacgcgaaggagaaggtgcgcgccatcgagcttctggacagcgaggtcttcgtcccgctgtgcaagggccttgccgccctgggcgactaccgactgctcttcctctccgaccactacacgcccatttccacccgcacgcacgacggcacgcccgtgccctacctgctctacgacagccgcgtggacaccggaaacggccagccctacagcgaggcgggcgcggcggcctccggcgtgcgcatggaggagggaacggacctgatgcccctgctgttcgcgcgctgagcgcgcccgcgggaggagggagtgcaattggataccctgtacctgacggatctggacggcacgctgctgggcgcggacagccggctctcggaatggagcgcgcgcgccctgcgccggttctacgacgaggggatcgccgtgacggtggcgaccggccggtcctggacggcgctggacgtgctggcgggcgcgcccctgcgcgcgccgatggtgctgctgggcggcgcgcgcgtctttgacgcagcgcgcgggaccatcctgcgcgagcacgttttgccgcgcggctgcctctgcgcggcgctggagatcctgcgcggcgcggggctctgcccgctgctgtacacgcaggacgcgcgcgacgagcagcgcatctactacgagcgcggggcggacgcggcggtccacgcctacgtcgcgggcctgcgcgcccgcggggacgaccgcctgcgcgaggtcctgcgcctggaggagcggctggaggaaaaggccttctacctcaccgcgcgcggggagcgcgcagcgctggaacccctcctgccccggattcagggcctgggcgcgcacgcctacctcttctacggcgcgcgcacagaggactgctttgtggagatcacgcccgtgtccaagcgcgcgggcgtggaggagctgcgcgcgctcacgggcgcgcggcgcatcgtcgcctttggggacaacgggaacgacgaggggctctttgcgggcgcggacctgcgcgtcgccgtgcgcaacgccacgcccgggatcctcgccctggccgaccgcgtcatcggcgagaacacgcaggacgccgtggtgcgctgcatcgccgaaatggagggcctggacccggagcgcctttgaggccgggaccgtgccgggcgcgccgccggagaaatttttcttcggcggcgcgcccattttttgcgtaacctttgcccgccctgcgcgcgtccatataagcgagaccggtccgattttcagagaaagggggttcgcggcgagatggcggaaccgattctggacagggagcgcttcgtcgcccaggtgacggagctgcaggaaaccctctaccgcacggcgcgcagcatcctgcgcaatgagcaggatgcgcaggacgcggtgcaggaggccgtcacccaggccttcgcccgcctgcacacgctgcgggaccccgcaaagttcaagccttggctgctccgcatcctggtcaatacctgctacgacgcgtgcaggcggcgcaggagcacggtgtacctggaggccgtcgaggagacgctcgccgccccgcagagcgactgcgaggagcgcatgagcctgtggagcgcggtgatgcgcctgtccgaggagcaaaaggccgtggtcacgctgttctactacgaggacctgcccatccgcgccatcagcgaggtcctgggcgtcacgcagggaacggtcaagacgcggctctcccgggcccgggggcgcctgaggcagatgctcgaccaatagggaggagtagaagatggatcaatgggatcaggaactcagggagcgggcgcgcagcgagccgtttcccttgcccaaaggctatgcccagcggctgcgggccacgctggcgaacctgcccgaagggggagagcgccggcgcaggccccgcttccgggcggcggcccttgccgcggccgcggcgctggcggtcttcctcgtgctgcccaacgtctcgccgaccgtggcctacgccatggaggacgtgccggtcctgggcgcaatcgtccgggtcatcaccctgcgcaattacgaccaggaggacgaaacgcgcagcctgcacgtgcagatcccggagctgcagggcgccggggaagcgggcgaggcgatcaacgaggaggtcagcgcctacgtggacgcgctccttgcggcgttcgagacgagctgcgaggcgggcggcgtccgcgccctggacgtgcggtacgcggtggtcacggatgcgcaggattggttcaccctgcgcgtggacgcgacgcttgccgcgggcagcagcgaggaaatctcccgcttctaccacatcgacaagcggagcggcgcgcgcgtgcagctctccgacctgttcccggagggcgcggactacgtggccgccctctcggacgaggtgcgcagccagatgacggcgcgcgcggaggcgggcgaggacttcttccccgaggcgtttgacgcgatcgacgcgaaccagaacttctactggggggcggacggcgcgctggttctggtctttgacgagtacaccatcgcgtccggcttcatggggatgccggagttctccattcccgcctccatggtggaggccctgcaaaacggctgacgccgggcgggatgccgcggcgccggacggccgatttcctccggccgcccggcgccgtttttgcgcaggggcaggaaaatgcgcgcaaaagggagaatacaactttccagacaaaaaccgcggggaggaggaggcgcgcatgatcgtgctcctgaccggcgcgtcgcacaccggaaagaccaagctcgcccagcgcctgctcgagcgcaagggctggccctatctcagcctggaccacctgaagatgggcctgatccgcagcgggcagacgccgctgacgcccctgagcggggacgcggcgctcacggcgctcctgtggcccatcgcgcgggagatcgcgcgtacctgcgcggagaacgggcagaacctcgtcctggaggggtgctacatcccggcggactggcgggcggggctcgacgcggcagcctgcgcgcaggtgcgcgccgtgtgcctcgcgctgtcggagggattcctccgcgcgcagtttgcgcaggtctgcgcccacgccagcgacgtcgagcgccgggcgggcgaaaccctgacgctggactggctccttgcgcagaacgccgcctttgcgccctacgatgcggcgcacggctggacgcgcctttgcatcgaatcggactacgagcgggaaatgcaggctttttgggagggaagcgagtggaagacgacattttgatcctcggcggcggcgcggcgggcctcatggccgccatcgccgcaaagcgcgccgcgcccggggcgcgcgtgaccatcctggaggcgggggaccgcgtgggcaaaaagatcctgagcacgggcaacggccgctgcaacctgacgaacctgcgcgcccgcgccggggactacgcgcccgcgccggtgggggcggtgctcgggcagttcccgcccgcgcgcgtgctcgcggcgtttgcgcagatgggcctgtgcttccgcgaggaggaggacgggcgcgtctaccccgcctccgacgcggcctcctccgtgctcgacgctctgcggctcacctgcgcgcacctgggcgtgcgggagcgcacgggctttttggccgtgcgcgcgcgccgcggccgggagggcttcaccctggaggcggagggcggggcgcgcgcgcagggcgcgcgcctgctgctcgccacgggcggcaaggccggcagccgcgtctcgggctacgacgtcgccgggcagctcggccacagcgtcacgcgcctgctgccgggccttgcgccgctcaagacggacggcgcggggctcaaggggctcaacggcgtgcgctgccgctgcgccgcgtccctggtgcagggcggacgcacgctcctgcgcgaggagggcgaggtgctctttaaggactacgggctctcgggcatcgcggtctttcagctctcccgcgcgctcgcgcgggccgcgggcccctgcgaggcggcgctcgacctgctgccggacaagacgcccgcccaggccggggaatggctccgcgcccgggccaagctcctcgcctggcgggaggcggacgccttcctgctcggcatgatgcacaagaacctggccgccaacctcctgcgcgcctgcggcatcggcgcggtgcgcgtggaggccatcccgcaggacgcgctggaccgcctggcgcagcggatgaaggactggcgccaccgcgtgaccggcacgcagggcttcccaaatgcgcaggtcacggtgggcggcgtgccgcttgcggagacggaggccctcgcctccaggcgctgcccgggcctgtacctcgccggcgaggtgctggacgtggacggcccctgcggcggctacaatctgcagtgggcctgggcctccggcgcatgcgcgggcgaggcggcggcgcggtccctggccggaaagggggcgggcgcttgatccgaatccacaacctgaaactcggcctggacgaggggctggaggctctgcgcgcgcaggcggcgcgcgcgctgcgcgtggagcccggccgcatccgggagctgaaactcgtcaagaaatccgtggacgcgcgcgaaaagcagaacctacactacgtctgcgccgtgcaggtcgccgtggaggggaacgaggacgagatcctccgccgcgcaaagaaccgcaacgccgcccgcgccgaggcccaggcgcctctggccgtgccgcgcctggccccgcccgcgcggcggccggtcgtcgtgggcctggggccggcggggctgtttgcggcgctgtacctggcgcgggccgggctgcggcccatcgtgctggagcgcgggcaggacgtcgagcgccggcggcaggacgtggaccgcttctggaccggcggcgcgctcgccccggagagcaacgtgcagttcggcgagggcggggcgggcacgttctcggacggcaagctcaccaccggcatctccagcccgctctgcggccaggtcctggagatcatggccgcccacggcgcgccggaggagatcctctgggaggccaagccccacatcggcacggaccggctgacgggcatggtcaagtccctgcgggaggagatcgtggccctgggcgcggaggtgcgcttcggcgcgcggctggcggacctgcgcctggagggggaccgcatcgcggcggtcgagatcgaccagggcggggagcggagcgtcctgccctgcgaggcattgctgctggcctgcgggcacagcgcgcgggacaccttcgccatgctgcgggaccgcggcgcggacatggagcgcaagcccttctccatcggcgcgcgcatcgagcaccagcaggagcgcatctcccgcgcgcagtacggcccggcctggaggaagctcggcgcggcggactacaagctctcctgccacctgccgggcgggcgctcggtctacaccttctgcatgtgcccgggcgggcaggtggtcgccgcggcctcggaggcgggcggcgtggtcacaaacggcatgagcgcctttgcccgcgacggggagaacgccaacgccgcgctgctgtgcagcgtgacccccgaggactttggggcgggggacgtgctggccggcgtggagttccagcgcaggtacgagcgcctggcctttgcgctgggcggcgggcgctaccgcgccccggcgcagacggtgggggacttcctcgacgggcgcgcgtcgacctccctggggcgcgtcgcgccctcctaccggccgggggtcgagctcgcggacctggcggggtgcctgcccggctttgccgtggaggccatgcgggaggccctgcgcctcttcgaccgcaggctgcgcggctatgcggacgaggacgccgtgctcacgggcgtggagacgcgctcctcctccccggtgcgcgtcaagcgcggggaggacctgcagtccaacctgcgcggcctctatccctgcggcgagggcgcgggctatgccgggggcatcatgtccgccgcggtggacggcctgcgctgcgccatcgccctggccgcgcgctacggcggatagcgctaaagggggaaagcgcgaagcggctcgtgcgccgcttcgcgcttctttgtaggcgggccttgcgcaatgcggcgaaaaaggggtataatttccccaaggggatcgaggatgggggaaaggctgtgagaagatgctgattgactttcatgtgcacatgtttccggaggcgctggcaaaaaagaccctgcccaagctggcccatatctccgggcgcgacgggcaggacgcgccctacttcaccgacggcacgctccagggcacgctgcgcaggctggacgagtggggcgtggaccgcgccgtgacgctgcacatcgccacctccgtgcacgccatgcacaaggtcaacgacttcgccgccgccgtaaagagcgagcggctctacagctttggctccgtgcaccccgacgcgcccgacgcgctcgaggagctggaccgcatccaggccctgggcctggacggcatcaagttccaccccgactaccaggacttctttgtggacgacgagaagatggccccgatctatgagaagattcagtcgctcggcctgccggtgaccttccacgcggggtgggaccccctttcgcccgaggtcgtgcacgccgagccggagcgcctggcccgcgtgctggacgcctttccccgcatgacggtcatcggcgcgcacctgggcggcctctgccgctatgaccaggtggaaaagttcctgctcggccgcaagaacctctacctggataccgccatgaccgcgccctacctcgaggacgaggcgcagtacggccgcatcctgcgcggccacggcctggaccgcgtgctctttgccacggactgcccttggtccacgcccctgcgcgagctccccctgctggagcgcgcgggctttacccccgaggagcgcgagaggatcacctggaagaacgcgctggccctgctggagcggaagcgctaggccgcgccgcgttttttcgcggaaaatagagaaaacaatatggaactgcgtgttcgtccatcggccgcggggcggacgcgttccgcaccaccgggggagagagaacgtccccccacaaggaggcgaagcacatggcagagcacgacggccacagggaacggatgcgccagcgggtgcgggaaaccgatatgcgcggcttccagccgcacgaggtgctggagttcctcctgatgtacgccatcccgcggcgggacgtcaatcccctggcccacaagctgatcaagcatttcggctccctgtccggcgtgctggacgcgcggccggaggagctgatgcaggtgccgggcgtcggcgaaaacgcggcgacgctgctctcctcgctggtcagcgtcttttcggtctatcagcgcgaccgctggcggaaaaggccctgcctcttcagccggaaggaggcgggggagttctgcacggcgctcttttcgcggcagaaggtggagtccatcgtgatcgtctgcctggacgtgcacaaggcggtgctcgccagcgagatgctgacccagggcaccgtcagcgagacgccgctgtatccgcgcgaggtggtcgcctatgcgctgcggcatcaggcgcactcggtgatcctggcgcacaaccaccccagcggggatacccgcccctccatggatgacctccggatcacgctggagattcgggacgcgctgcgcacgatggacatcaccctggaggatcatttcatcatcgcgggaagccggttcaccagcctttggcagaccggcgcgctgtccgagtccgcggccgtgccgctcttggcgcaggaaaagcaggggcgcgccgccgcggacgacgacgcgcccgatgcgcaggaggggccgcgcgcctagggcaggtccccgcgcagccagcgcagcgcgcggtccgcgccctccgggccaaaggccgccagcagatccccgggcgcggccacggtgaagaggttttccgcatagtatttccgcagcgcgccgacaaaggcctcgttgcccaggcgcgcgcgcaggtcgtgcagcatggccgcgcccttgcggtagacgagcgcgtcgtagaccgcgccgctctcgaaccggtccagggactgggacacgcccacgccctgcagggccaggctctcggtcgccgggcggatgcgcgccgcgtacagggagtcaaaggactgcgcgccgtagagggattcgtagtacagcagcgtggagtattcggccagggcctcgtcctgccaggggtagaggacctggtcgctgcccacgcccgcgtaccaccactggtgcgcggcctcgtgggcgatggcgaactccagcatgccgttctccgtcccgtatagcccggcgttcaccagggcgagggcggggtactccatgccgccgggaaagaactccgcggcgcagaccgtgaagtccgggaagggatagccgccaaagaggccgccgaagacggagagcgcgcgcatcgcgcagtcgagcgcctgctgcgccccttcctggtcaaaggcgaaggagcggaccgtgacgccgtccacctcgccctgcgccacgcagaagtccgggctcagcaccagggcaaagtcccgcaggttctcgccggagaaggtccagctcccctcggatgcggagacgaggcccggccccgccgccacgagggaggttggcgcgcgcagatggacctcccagctcgcgcacgccgagacgaacgggtcgccgatggcgccataggcgtcgtggcggaacgactcgccgtcgtgcgcgcagagcgtggcaaacgcgttgcacagccgcacgtcccgcgcggagacgcccgtgcgcaggcggttgtccgacagcgtgaccgaataggagagctggacctccaccccgccctgcggccgcaggcggaagggcaggaacacgcgcagaaccgtgtccccctccccggagagctcccagggcgcgtcccggccgttgacctgcacggccgcaacctccgcgccgccgggggagaagccctccgggtaggcgtatttgcgctcctgcgggagcaccggcgcgctctcctcctgcgaaaaggcgttggcgtagaggtggaagtcgagggcggacagggcggcgccggtgcggttggtgagcagcaccgtctgctcgacgcgcagcgtgcgcgcctgcgcgtcccattccgcctgcacggcgtagcggtccgggcgctggccggcgcgcgtgagcaggacgcacagcagcgcaaacagcgcgcagctcagaagaaaggccttgtgccttttgcagaaggatcgaactttggcgggcattcgccatcccctccccccatggaatccgggcgcttgccgcccctggttcatgggtatgccgcggagggggacgccattcaggacgcacgaggagagaagtaacgcatggccatgtgttcgtttgccgagggattttccatgttcgacgtaacgcccctggagaacctgttcatcgaggagtatatgctgcgcgcgccgggggactttgtcaaggtctacatctatggcctgcgcctgtgctaccacccggtcgaggacgcgacggtgccggccatctcccgcgcgctgggcctggaggagaagaccgtgctggacgcctttgcctactgggagcgcgtgggcgtgctgcgccgcatcgcggacaacccgccggcctacagcttcttcaacctcaaggaggccatgctcaccggcaaggccgagggcgacatccccaaggcggatcgcgacttcaacatcgcgctgcaggacctgttcggcacgcggctgctgcaggcgcaggactatgagcgcgtctacaagatcatggaggagatggggtttgcgccggaggtcgtgctgatgctggtcaagcactgcatcgagcgcagcggcaagggcacggcggtgaccttcgcctccatcgagaaggaggccgcgcgctgggccaagaagggcgcaacgaccctgcgcacggccgaggactacctgcgcacgctctccgcctcctacgagggcgcgcagaaggtgctgcgccagctcggcctgcgccgcgccccgacggtcgccgaggaggcgctctacaccaagtggacgcgcgaatggggcttttccctggaggcgatcctctactcgtgcgaggagacgaccaagatctcccagccgaacttcgcctacctggacaaggtgctggaaaaccggcacaagaagcagctcaacaccagcgcggagatggccagcgcccagcaggcgcgcgtggacgtcatgcggcccgtgcgcgaggtgctcgacgccctgggcgtaaagggcgtctcccccacggaggacctggccatggtctacgccgcctggctgaagatgggcttctcccacgaggcggtcctgcgcgcggcgcgctatacgctgcgccagggcagcagccggtttgaggacgtcggcgtgcggctgcaggcctgggcgcgccaggcgctctacacgcccgaggccatcgacgcgttcctcgcccggcgcaggcaggacgcgcagacgctgcgcgcggtctttgaggccgcgggcatcgggcgccagcccgccgcggcggacttccgcctggcggagcagtggcggctcaagggctaccggacggacgtgctcctcgtcgccgcggagggcgcccgcaacgccggggaccccatgcgctatatcgaccacgtcgtgagcaactgggccgagcgcggcgtcgcgacgcccgaggccgcgcgggccgagcgcgagcggtgggccgagggccagcgccagcgcgctgccgagcccgccccggccgcgccgcggcccgatgcgcccgcccgcccctccaaggaggtgggcgcgcaccggttcacccagcgcgcctataccgacgaggagctggacgcgctgctgtacacggacctggacgacctgaagccgtaaggaggggaagggcatggacatcgtttcgcgcaaggcaatccttcgggacctgctggcggaatatcgcgcgcacaaggaggaggccgagcgggaggccgaccgcgtgcgcgcgcgcatcgccgaggaggtcccggtctatgcggacctgagcggcgcgatctccggcatcctgctggagacctcccgccgcgcgctggaggacccgccaaacgcgcagcagatcgcgcaggacgggcgccagcgcgtcctgcgtttgcaaaaggaggcggagggcgcgctggccgccgccggctattcgcccgaagcgctccgcccccgctaccactgccccatctgcaaggacaccggctttgtgggctcgcctgtgcacgaatactgcgcctgcatcaaggtcgcgctcatgcgccgactctacgacgcggccaacatcggggacgagacgtttgaaaacttcgacctgcgcatcttctccgacgtgccggaggagaagaccggcaagtcccagcggcagaccatggccgcctaccgcagctattgcgaggcgtatgccgacgcctttccggacgtgcggcgcagaaacctgctgctcaccgggccgacgggcctgggcaagacgtatctgctcaactgcatctcggcgcggctgctggaccgcggcaaggccgtgctgcggctgaccgcctaccggatgctcgacgccatgcgccgctaccaccgcggccaggacgacggcgggctggagctgatgaccacggccgaggtcctggtcatcgacgacctgggcaccgagcccatgctggaaaacatcaccatcgaatacctcttcacgctcctgaacgagcgccgggccaaccgcctgcccacgctggtggcgaccaacctcaccccgcgggagctgcaggcccgctatacggagcgcatcttctcgcgcctcatggaccgcagcgagacgcaggtgctgctcttctttggcgaggacgtgcgcctgcacgacgaaacgcgcggccggccggagcgcggcggctgaggcatgaatcggcgcgcttccccatatccatcttccggggaggaggattggatatggggctttcgatttcctgggaggtcgtgctgttctttgcgctgggcatggcgctgctctacggcgtgggctggctgctgctcgtgccgtttcagaaggggctgtacttcctcttcaattcgctcgtgggcggcctcttgctgtgggcggcgtcccttgtgggcgggaactttggcctggtcgcggtgatcaacccgttttctgccatcctgaccgggttcctgggcatccccggcgtcgcgctcacgctgctcatccagaatttgctgtgagcgcaaaacccggaaaggagattggacacatgcaggaggaaatccgtccgccgcggccggaggagcgtgcggccttcctcgccattgcggcggagtatttgccgggcattccccccgcgcgcgtcgcggacatgcccttgcagctgtgcctcgcgcgcggggaggcgctcatcggcgtggcgtatgccgagccgcgcgcgcgggacgagctctgcctgcagggcatcgccgtcgtccacccctacaacgcgcagggccggggcggtgcgctgctgcgcgccctggaaagggaggcgcggcggcgcgggtacgcggcggtctccgtgggctcggcggacggctacgtcgagcggttttaccggaaaaacggctatgtgccggtggagctgaagatcttcgcgtcctcgggcgtgacggtgctgcccgtcgtggactacgacgccatggacaagcgcagcctcaccgcagcgcacggcggcgggcacagcttctttgtgttccggaaggaattgtgacgaattttaacacgaagcagcgaagctactgtctttacacctgacgcgacatggtgtatactcctgccttaggaagaacaggcaggaggtttgcatcccatggcgaatgcgcagacggaacaacgggagaaaaagacggtttggcagtggttgtgctgggcgggggaccgctatttcatcaaggccatgtcctccatggcgctggggctcttcgcctcgctgatcatcgggctgatcctttcgcagctggcgcaggtgtcctttttggcctggctgcagccctatgcggacatggtggcctcgtcctcgccggtggtgggctcggccatcggcgtcgcggtggcctcggggctcaaggccaagcccctggtggtgttcacctcggcggtgacgggcgccatcggctacgacctgggcggcccggtgggcgcgttcctggcggcggtggtcggcgcggagctggggaacctggtggccgggcgcacgcccgtggacatcgtgctggtgccgatcgtgaccatcgtctgtggagggctgacgggcacgttcgtcgggccgccgatctccgcgctgatgacggggctgggcacgctcatcaacaacgccacgacgctcgcgcccgtgcccatgggcatcgcggtctccacgatcatgggcctgtgcctgacggcgccgatctccagcgcggccatcgccatctccctcgggctggaggggctggctgcgggcgcggcggcggtcggctgcgcggcgcagatggtcggctttgccgtggcctcctaccgggagaacaagatcggcggcctggtcgcgcagggcatcggcacctcgatgctgcagttcggcaacatctgccgccggccgcagatcctgatcgcgccgacgctcgccagcgcgatcctgggcccgatctccaccgcggtctttggcatggtcaacaacgccatgggcgcgggcatgggcaccagcggcctggtcggccagttcggggcctacagcgcgatgacggccgcgggcttttccccggcgtacacgctgttcctgatcctgctgatgcacgtcctgctcccggcggcgctctcgctcgggatcagcgagctgctgcgcaagatcggctgggtccgcttcggcgaccagaaattggaactctgaggaacttccggcgcgtgttttacatcttttggagccgcgggtgcaacaaaacccgcggctccttcgtcgcatacatagtgaaactgttagaaatggagtgggaaacatggccaagcgcggaagtggaaaaaatggcaagaagacggtatggaccgtgttggcggtcgtatcggttttgattttgatcgtctgcggcgtgagcatcgcccgccaggtcatccagattcagcagcagcgccagctggatggcgagatgtcccagatcgcccgcccctcgcaggacccgagcgcaacggctgcgcccacggcgacgcccgatccctcggctgcgcagggccccagcgcctcgcccacgacggcgcccgtcgcgcaggagatcgactttgacgccctgcacgagcagaacgacgagatcgtcgcctggatcacgctggacggcacggtcatcgactaccccatcctctgccggccggaggacgacgcctattaccacacccacaacgtcaagggccaggaggccgtcgccggcgcgatctacatccagggcagctacaacagcacggacttctccgacttccacaccgtgatctacggccacaacatgcgcgacggcagcatgtttgccgccctgcacaagtttgaggacgaggacttctttaacgagcacgacacggtcgtcatctacacgccgacccagcgcctcacctacacgatctttgccgcctatccccgcgacgacgcgcacctgatgcgcaagttcgactacagcagcgccgagggccgccaggccttcctggacgagatcgccacgcacacggacggacacttccgcgacgtggagctgacgacggacagcaacatcatcacgctgtcgacctgcatcggcagcgcggacgaccagcgctacatcgtgcaggcagtcctgaccgaggccgcgcccgtgcaagggtaagcgaaaaacccaaacagcaaaggcgccgccggaggaatctccctccggcggcgccttgtttggatcgggtcattgcaggcccatcgcgccgatcatcgtggtcatgatgaggatggaaagcaggatcgacgagctccccgtgaaggaggacagcgccgcgtcgcccccgagcttttccgtaaaggccggggacatggccgagcagggcgcaaacgccacgatcgccagcacctgccgcacctccagggagaagggcaggacgaagtagaacagcgcggaaaacgcggccgccatgacgtagcgcgagagcaggatcgtaaacgcctggcgcaggaaggccctgtccgggttgaattcgaacatcgtgcccaccatgagcatggccatgaacccgttcgcattgccgatggtcgtggtgatgggctgcaggaaggacgggatggagatgcccgcgatggcgaggatcagcatgagcatgtacgtgcaaaacggcgtggaaaacagcttcttcaggctgtcgcgcagcgtcggccgcgcgtctccgcccgcaaagcgcgaggtcagcgcgtagctgccgcccgtgcacatgatggcgttgcccgcgtcgaacaggcaggtcacgaccacgcccagcgcgcccaggaacccctggatgtagggcatggtgaaggagccgatgttgtaccccgggaagttgagcgggtagaggatccgctccccccgccctctgcgcagggcaaagagcgcgcccagcccccacatcaccaggttgcacagcagccccagcagcgtcacatacaggagcgaaatgtcaaagtcaaaggaggcgaagttcgtgatgacggccgcaggcgtcgtgatgttgagcacgatcttcatgatgagcttgtagtcgttcggcccgaagaagtgcagctttttcagcgcgtatcccagcgcgatgacgaagacgtaggccgaagccttgagcaatacctgtcccatgcgtgttcccccagcgttctctattttttgcaagtgacagtatagcacctttttgatggattgtacattgcgcgcggcgggtttttcctgtatactgggtgggaaccgctttacaaaaaaatggggggaacagcatggaaatttatcggggccttgcggccggacactgcggccacgaggagctcatcgattttctcaattacgtattcggcatgaacggcgcagacagcgggttctaccgcctgctgcccaagctctacaagcccgagaaccgtcccgaggactacaactacgtcgtcctggaggacgggaagctgcgcgccgccgtgggcgcctatcccatcgagctggaggtcgccgggcacgtcctgcgcggcgcgggcatcggcaacgtcgccgtccaccccttccaccgccgcaagggctacatgaaggacgccatggggcaggccatggaggccatcctgcagagcggtgcggactttgcggccctgggcggccagcgccagcgctactcctacttcggctttgagccggcgggcctttgcggcacgtttggcctgaacagcgcgaacctgcgccacgccctgcccggcgcgggcgagggctacgcggcgcggaagatcggcccggaggacgccgcggcgctggaggcgatccgcgcgatgaccgagcgccaggcgagccatcccctgcgcccgcaggagaagctctacgacgtactgaacacctgggagagccaggtctgcgtcgtggacgggccgcagggcggcatcgccggctacttcctcgccaaggatggcaacgatgtcccggagatcgactgcgctgcgcccgagcacgcggcgggcgtcctgtgcgcgtgctatgccttcctgcagcaggaaaggctctccttgcacgttcccttccacgcgcaggcgatgttcgacctgctcggggacgtggcggagcgcgcctccatcgagagcaccgagtgctacaacgtcctctgctacgagcgcgtgctgcgcgcctgcctggagctcaaggcgcagcgcgttcccctggccgacggcgcgatcacgtttgccatccagggctatgccgggccggagcgcctgcgcgtcgccgtgtccgggggaaagcccgaggtcgcgcccgcggcggagggcgaggcgctgcctctcacgcaccggcaggccatgaacctgttcttcgggccctggtcgccggagcgcctgcgcctgcccgccttcgccgccggctggttcccgctgtcgctgttcgtccccgaggtggacaacgattagacgtcaaattttgtccataaagattttacgcgcgcgcgtgcgacagcggcgcggcatctgcgctacaatggacccaagactccaagaaagagggatgcgcacatgcagtggctgcaaaaattcatgatggggcgctacggagcggaccagctcaacctcgcgctgatcgtcctggcgctggtgctttccatcgtcttttccattgtgccgttggggctgatcggcacgctgatcgcgatgatccccctggtgctggcggtggtgcgcatgctctcgcgcaaccgcacaaagcgcgcgcaggagaatctcgccttcctcaagctctggaacccggtgcgcaactggttccagtggctgtacctgagcatccgctattgcaagaagaaccgctacttcctctgcccgaactgcggacgcatcgcctgcgtgcccaagaagacgggccgcgtcaccatcacctgcaagggctgcaagacgcgctacgaccgcaaggcgtgacaaaacggcgcgcgggccaaggcatctgcctcggtccgcgcgcttttgtatgcttcaagtgtagtcctggtagttttgcagaaagacgacgatttcgacctgctgcgcgtccgggtcctcgcccatgctgctgagcgccaggcaggccgtctcattccagaggaaccagcgcgtgagcgactcgtcctcgacgagggggaggagctcgacgccatagtcgcgctccagcgcctcgcgcacggcccgcacctgcccggccgtgactgcgccgtcggaatggcaggcggcgagcagcagcacctcgtccgagcggacgccggcgtagagcggggagtagaggccgccggtgaagtccagcccggcgtactgcacgggcgcgccggcttcctccttccaggccgccgaaacctccgccatgggcatgcccacatggagcgaaggatcggcgaagagctcccccgcgtccaggtcgcaccgcggcgcggcgcaagccgtcaacagcggcagcagcaggagcagcgatagaagtttcttcatcctgttcacacccattcatagcccggcatctcgggcaggtagtggatccggaaggagagggagcgcccggcgagcaggttgacctgcacgctgtggcggttgcggcggaaggtataggtgagggaatcccccttgtcgtacgtcttgaccagctcgatgccgtagtccgcgttcagcgccgcaaggagcgcgtccacgtcctcgcgcgacgcttcgtcacaggaggcggaaaggctcgtcagttcgccgtccgcaaagttcgcctcggcggcaaagtccaggcccgcgtactcgatgtccgcaaggctggggtccgtgtccgtccacgggtcaggcaattccgcctgcggcatgtgcagcgtcagcccctccgccgcggcgatctcgcccgcggaaaggtcgaacctcggcgcggcagcggcgcagcccgtcagcgccagggagagaaagagcaggagacaaagcgtgcgcttcatatcgcgcatccccccttttgcagtcgtcggtccgaaagtgggttcactcgctggcgagcaggaagacgagatacgcgctctgggcgtccgggtcctcgcccatacggaagaggcggacgcagccgggatgcgccaggcggtaccagcgcgtgtcgccggggttgtcggccaggagctggagctccaggccgtagtcgcgctccagggcgcggcgcaagtcctccacctggcgggcggtgagcgcctcgtccgccgcgcagcagaggaaggtcagccgcgcatcctccgagcgcgtgccgtgtaagaggagcagcagtgtcggggcctccaagccgccggtgaagtcgatgcccgcgtaggtgcaggcggcagttccctgctgccaagcctgcggcacgtcctccatcggcatgccaagcacaaggtcctcggccacagcgatctcgcccgcggcaaggtcgaatttcggcgcggcggagcaggcggtcagcagcaggagcgcggcgcagagcagcgcccatttgcgcatcttcatggctgcacctcctccccggccatggcggcctgcgcttcctgcaggagcggaagcaggggcgtggccgcgtggaacgtcaggctgacggaaacgcccgcggtccaggtgacggtgatctcgttgcaattgcgctggaacgcgtagagagaaaccgtcccgttggcgacgacgggcacgagctcgatgccgtagtccacgttcagcgcctgcacgagcgcttccacatccgcctgcgcccagctgccgtcgtccccggcggagagcgtcacctgcttgagcgtcccttcttcgtccgcgcgggcgctggcgtcaaaggcgatgccggcgtaggtaagcgcggcctcccatttgccgggctcttcctccgcggtccagggcgcgggaaggtctgacgcgggcatgtggagcgtcagcccctccccagcggcgatctcgcccgcggaaaggtcgaattttggcgcggcagcggcgcagcccgtcaacgccaggagcaagagcagcagcgtcgtacatcgtatgcatgttttcatggggatcacatcctctccttcaggatagtggaaaaggcggggcggcgtcaagcaaaaacagcaaaaaagatgggcaaagcccatcttttttgctgttttttagccgggttactcggcctggatgcccttgttcttgagcagcacgtcgtgcgagccgccctcgacgatggaggtggaggacacgaccgtcagccgcgcgttcttctgcaggtccgggatgttgagcacgccgcagttgcacatcgtggagcggaccttgtacagggaggtggagacgttgtccttgagggagccggcgtagggcacgtaggagtccacgccctcctcgaaggagagcttggccgcgccgcccaggtcgtagcgctgccagttgcgcgcgcggttggagccctcgccccagtactccttcatgtagttgccgttgatgttgaccttgttggtgggggactcgtcaaagcgggcgaagtagcggcccagcatgaggaagtccgcgcccatggccagggccagcgtcatgtggtagtcgtggacgatgccgccgtccgagcagatgggcacgtagatgccggtctgctggtagtactcgtcgcgcgcggcggccacctcgatcagcgccgtggcctggccgcggccgatgcccttggtctcgcgcgtgatgcagatggagccgccgccgatgccgaccttgacaaagtccgcgcccgccttggccaggaacaggaacccgtcgcggtccacgacgttgcccgcgccgatcttgaccttgtcgccgtagcgctcgcgcacccaggcgagcgtgcgcttctgccactcggtaaagccctcggaggagtcgatgcacagcacgtccgcgcccgcctccaccagcgccggcacgcgctcggcgtagtcgcgcgtgttgatgcccgcgcccacgacgtagcgcttgcggctgtcgagcagctcgtccgggttctccttgtgctgggagtagtccttgcggaagaccatgtagaccaggtgctggttttcgtcgatcaggggcagggagttgagcttgtgctcccagatgatgtcgttggcgaccttgagggtcgtgtccgccggcgcggtgaccagcttgtcaaagggcgtcatgaactcggagaccttggtgtccaggctcatgcggctcacgcggtagtcgcggctggcgacgatgcccagcagctttccctcggccgtgccgtcctcggtcacggcgacggtggagtggccggtcttttccttgaggttgaggatgtcctcgagggtgttgtccggcttgatgttggagtcggacttgacaaagcccgccttatagctcttgacgcggccgaccatggccgcctcgtccgcgatggactgcgagccgtaaatgaaggaaacgccgccctccttggccagggcgatggccatgttgtcgtcggagaccgactgcatgatggccgagaccagcgggatgttcatggtcagcgggcactcttcttcgcccttgcggtacttcaccagcggcgtacgcaggctcacgttggacggaatgcactccgcagaggaatagccgggaaccagcaggtattccccaaaggtgcggctcggctcggaatagtaaaaggccatggcgcttctctccttcatcggtcagattttagattagtagcattatagcagaaactttggcaaatacaacgatttttctgaaaaaacccggaatttaacatcgtttttgccggcctttcccgcgatttgcaggagaaaatccgaacaaatgcaaaccccggcttttgcaatgttcgcaaaagccggggttcctcgcaaaaacggcgcgaaggtttttgcagattcagcgcactaaagcgcaggatttcctgcaatttcgtccagggcgagcttgtgcagacccaggacgacggaggcctcgggcttctccgccaggcgcacctgcggatggccccagggggtccaggcgtacttgtcgatgtgctcctgcaaagggcggcgcaggtcctcgcccatgcgcgagatgccgccggagagcacgatgacctccgggtcgtaggccacgatcaggttgcacaggttggcgctccagcagtccagggagcgctgcaggagcttcttggcgagcgcgtcgcccgcgtccgcgcaggccttgaggttcttgtagtcgatgggctcgacgcgcgagagcaggctctgcgggaacagcgggtcctttcgcgcgaagaggggcagcgcccaggagctggcgttggcctccatgcagccgatgttgccacagttgcagggcgtggcgtccgggccggcctcgatgaccatgtgcccgccgatgcaggccgcctggaagtgcttgccgcggatgagcctgccgtccatcatggcggcggcgcccacgcccgtgccgaagatcatcatcacgacgtcgcgcgtgtcctgcgcgcagccgtaggcggcctcgcccacgagcgcggcgtttgcgtcgttgtccaggatgaaggggcaggcgaacgtgcgcgccacccaggacttgaggtcgtagcccacggcgtcgacgaacttgccgttggccgagaccacgaccttgtcccgcgggttgaccaggccggggaaggcgatgcccagtccgtcgatgcgggcgatgcccaattccgccatcatggccttgccctcgcgctcggccgtgtccaggttcttttgatacttgtcgtcgcggtaggcttccaccatccgctccagcaggattttgccgtcctccagcagcgcgagcttcatgcgcgtgccgccgatgtccagggaaagcgtgatcatgttgaaccccctaaaagagagatatgtttgacgtgcgcgcaggccgcgcgccgcgatgccctcagatcagcatcaggctcttgagcgcaaagatccagacgaacatggtcaggaccgcgaacagggacccgaacaccacaaggcccccggccagctcgctgtcgccctccatctgctgggccatcgtgaaggaggagacggccggcggcgcggcgagcatcaccatcagcgcgatgagctcttccccgcggaagcccaggaggatcgcgatggtgaggaagatcaggggcatgacgatcaggcgcccggtcacgcccaggacgagctggcgcaggcaggacttgacctggcggaagctgaactccgcgcccaggatgaccagggccaagggcgtggccacgtccgcaaggtccgacaagggcttttcgatcacctccgggagctttacgcccagcgccaggagcacgatgcccagc

SEQ ID NO: 1437 - DNA, 4478 bp, Unknown
  16S sequences of unknown bacteria
gtagccctccgctccgcagacggtggcggcaacgttggaggtggcgggaacgccgccgtcccatgtcaccataccgcagtatttaagctgattggcaaaggtgtaatagaaggtgtccatgtcgcggacaacgatttttttggacttcatttgggtaaacattcccttcgaagtcatctgcttaagccagaaagaatcgtttccgtcgatggaatagttgataagaacggtgtgttcgtcgtccattccgtaggcacggtttataagcccctggagagaagcgatgagccgcatttcatgaacgtcgcccttaaaagcgatggtgtagaatgtgaggggctcgaggccggtctcgtcgataacaaaggaattgtctgccgactcgtcaagagtgtaggctccgttttccaccttggtctcgggaatttcaaggtgaaccgtctcatcggccttgcgggggaactcggtgatttttccaaccgaatactgcaaaatcatgagagcgtcggcaacggcgacctctccctcgcccttttcgtcggaaacgcgggcaagatccttctgcgcgtcggtgaagggaattttacccaccgaatactgaagcacgaggagagcgtcctcaaccgtgacggttccgcttccgttcacatcgccgaaaagcttttcgtcggcaagcccaaaaacggtcccgaaaaccgaaaccgccagagccgccgagagcagcgcggcaataatttttttcataaaaatcctcctttttctccttagaagaagatattgcgaggacattataacacatcgttttgaaaaaagatatagttttttcatatttaattaaaaattttgggcaaaaaatttaactttaagcacctgccgctttacattatataatagggctatttgaaaatataatacagcagaccgtaaatcaccccggcaaggcttccgaaggcgatgaccggcccggcaaccgaaaagagcttggctcccgttcccataacaaagccctcgcttttgaactccattgcgggagacaccaccgcgtttgcaaaaccggttatgggcacaagggttcccgcccccgcccgttttgcgatgtcgtcgaaaatcccgattgccgtgagaaccgccgcggcaaaaacaagggtgacggtggccatggttttggccgactgctcggcggcaccgagacttgcatataaatttcccaaaagctgcccgagggtgcatataagtcctcccgtcacaaaggcccaaaagcagtcggccgcggcgtttgacttaacgtcggtcttttcgacatattttttatattccgtttttcctattttcaaaaaaatcactccccttttggttttccctaaagaggagaatttatgtaaaaaaaccgcccgaaaagatcttttgagcggtttgtcaaattcatttgttactgtcttccgaaaaattcccgtctgaagccggcgtttgtcagcgtgatgatgagggtgccctttttgacgcttaccgacgcgggcgtgcccacaaattcgttgctgacgccgatgggcatatcgctttcgatggtgccgtcctccatggtgtagcgcagcccctttatatttaccccctcggcctttccgccgtaggcaaaaaccgaaatggtgccgcttcggccggttccgaaaaacatctgaccgttgtgtaccccggtgaccacgctgttttcgccgaaaacatacccggtgcagccgttgttgagaatatagcacagcgtctgcatggtggcgatggacatatccgtccgcccgcccatacatccgaaaatgcagaaaattttaaagccgtgctccatggcatatttgacggccagcataagatcggtgtcgtccttttcggtcgggtgggttatgacattggggtgattcggtattttgccgagggaatcgaaatcgcccataataaggtcgggcattatgtccattctttcgagatacctgtaccctccgtcggccgcaattatgaaatcggccgtccgaggagcgaaattccgcccgtcgaacacgcccgagccgacaatgtaacaaattttgtttgccataaagacacctccgaaaatcggccgccaaaaaacctttgcggcccgaggctcgttaatgatttttgcgtatttttacgcgcaaaaacaacatttcatcattctaaaacccttgctattctaccacatttcccgacgaaaagcaagaataattacaaaaagtttcattttaacgacgtttttttgataaaatgtgtcatcaaatgttaaggcggcgtaaaaattttcttttttcggcgggcggtttttgaaaaaacacttgacttttttctttgtctgctgtattatctttttacaacaaagcagaagagctttcgcccgtctcaccgtttcggcttaaaggcgccgaccggtcaataccgccgcttctcttgacaaaaggggagctttcgtattgaggatgggtttacctatccttttttgtttgttaaaaaaacttttggaggtgcagtcctatcagcaagcccgagctttccatcaacgaagagatccgcgaccgtgaggtccgcgtaatttccggagacggagaacaacttggcatcatgtcgcccaaagaggccttgagaattgccgagcagagagatctcgatctcgtaaaaatcgcacccggcgcaaatcctccggtgtgcaaaattatggattacggaaaataccgctttgagcagtcgaagcgcgaaaaggaagccagaaaaaatcagcacattgtcgaaaccaaggaaattcgtctttctcttaacatcgacacacacgattttgaaaccaagcttaaccacgcgaaaaaattcatcgccggaggcaacaaggtcaaggtttccatacgtttccgcggccgtgaaatgggtcatcccgaaatcggactcgacaacatgaaacgctttgccgaggccatggaggagacggcgacggtcgaaaagccggccaagatggaaggacgcaatatgctcatgttccttgcacccaaaaaagcttgaattattaaggaggacctttgttatgcctaaaatcaaaactcacagcggagcaaaaaaacgttttaagctctccaagaacggcaagcccatgcgcggtcatgccttcaagtcccacattctgaacaaaaagagcaccaagcgcaagagaaatctccgcaaggtttcggtcgcagacaagaccaacaccgctcagatcaagaaactcgttccctacaaataatatcggaggtattttataatggcacgtgtaaaaggcgctctcatgacgcgcaaaagaagaaagaaaacattaaagcttgctaagggctatttcggctccaagcacagactttttaaaaccgccaaacaggcagttatgaaatccggcaactatgcctacatcggccgcaagcagagaaagcgcgacttccgccgtctgtggattacccgcatttccgccgccacccgcgtaaacggaatgaattattccacctttatgaacggccttaaaaaggcaggcatcactctcaaccgcaaaatgctttccgagattgccattgccgatcccgcagccttcaccgctcttgtggaaaaggcccgcgccgctctttaattaaccctttcaacgcccgaccgacttttggtttcgggcgttttgcctttttatttattatgattatttcttcaaaagacaaccctaaaatcaagtatgcggcaaagcttgtttcaagcacctccttccgcaaaaaggaaggtaaattcataatcgaggggcttcggctttgctccgacgccgcccaaaacggcgccgcaatcgacacatatttttactcggcggattttgccgagaaatttcccgaaaagcatatgctgatttgctcccgcgcaaaggaaagctttaccgtcaatcgggagcttatggacaagatttccgacaccgaaaactgtcagggcgcggtatgcgtctgcccctttccagagctttcgttaaagcttgagtcggggaaaaaatatcttgttctcgaaaatctttccgacccgtcaaacgtcggtgccgccgcgcggacggccgaggcgctgggcgttgacggaatactggtctgcggaggctgcgaccccttcgggccaaaggtgctgcgggcgtccatgggagcgctgcttcggtttcccgtggaaattttccccgatatttcttcggccgcagagcgtctttgcgccgctcatgttccgctctactgctcggtggtgtcaaattccgactgcaaaataggcgagcttgacttttccgtcggcggggcggtcataatcgggaacgaggcctcgggcgcaagcgctcgggcaaaagagctttcggaaaagcttttcaccattcccatgtccggccgtgccgagtcgcttaacgccgctgcggccgccgccataatcatatacgaaatgaccaaggggtgaca

SEQ ID NO: 1438 - DNA, 19563 bp, Unknown
  16S sequences of unknown bacteria
tgtcggcgccggtgatgcccgcgttggtggccgtcatctcgtgcccgtggtcgatggcattcacaaactcgtagaccggaagcgtcgtcttgatggggttcttgaacgggagctggctgaccaggtaggtgggcggctccgcctcgcgctggccggtgttggtgcccggcaggccgatcttgccgagcgcgatcgggatcatgcagatcgcgcgggtcgtctgctcgccgttggtgtggcgctgcgagccccagccctgggcgacgaacggcgcctgggcgttctcgaggtcgcgtgccagctcgcggatcttgtcagcgggaatctgggtgatctgggctgcccattccggcgtcttctcggtcttgtcctcgccctcgcccatgatgtaggccttgtaggagaggttcttgcccttggcggactcgggcatggtgtcctcgtcccagccgacggtgtactcgcgcaggaacgcctcgtcggtcttgccgtcgacgatgaactcgtggacgagcgcggacgccagcgcggcgtcggtacccgtgcggatggggagccattcgttgacatggcccgaagaggtctcgttcaggcggtagtcgatgttgacgatctttccgccacgaccggtcaccgcctcgcgcacgcgggcgaaatcccacgtcgcgttggcgccgcccatgcgggtctctgccggcgagttgccaaacagcacgaccaggtcggaatgcgcttcggcctcgctgaacgacgacgcgttgacgttgtcgtacggcgagaagacgctgcccttcttcttgtcggagccgaacatgtagggcatgacgacctgcagcatatgcgtcgagtagtcggcaccctggttgacgaagccgccgagcaggcccagcagacgcttgctcgggttgcggcccgtggtgctgtacatgcccgtcgcgtagttgatgaagacggactcggggccgtaggtcccgtagatgcgctcgaacttgtcgtggatggtctggattgcctcatcccagctgatgcgctcgaacttgccctcgccgcgcttgccgacgcgcttcatcgggtacagcaggcggtcgggatggttgatccacttgcgcatgctgcgaccgcgcaggcacgcacgcgcctggaagtcggcatcgccgatgttgtcggtttccatgtactggatcttgccgtctttggagtgccactggaagatgcagttgccaccgcagttcacgttgcactggctccacgcgatggtctcctcggcggcctcctcggcggcgtgggcaacgaactcgttgctcgtctgagccagtcctccgccggccgcgacgagtgctgcgagcgcgccagaagccttgatgaacgttctgcggttcaagctcatgtctggcatatcgtcccttctttcctctcttgcattcaatgcctgaaaacatgcccgatactagtgcggacacggtcacacgctgtcacataaaacatgcgaattcgcaggaaaacagggtagtacacgcgtttttggcagcgggtgacaggtgcgtgccagattcgcggcagcaccatgcgagggcacgcgcgcggtggttgccctccagtgcgaactgttgataccatcgtgcttcgaaaccaagggaagacaaccctccgacccaaagagacgagcatgttccagacggcactcaacgccctcaaacccaatacgacggttctcggatacgccttgttcctggcggtcaatgccacgggcgtctggggcggcgtctttccgtttctgcccatgaaaattcagacggccgaggtgatgtttcagttctacctggcgcagtcgctcatgatgttcgccgtgttctttgccctcgcgcgggcatcgtacggcagggtgcgcctcaagccgagcacctgcgtcctcgttgccgccgccgtctactttggcggatgggcgttcctcatcgcgagcatgtacctgcaccagaactcgctggtgctggtcgttgtgggcggcatcttcctcgggtgcggctcggcgatgttctacctgctgtggcagcgcgtgttcgccagccgcagctccgacgatggcatgcgcgacctcatcgccggcttcgcgtacgccgcgctgttctacttcgcgctctacctcatcccccgcgcagtgaccgcctacctcatcccgctcgtgttcttgccgctgttcgcgctcgccgtgattctgggcagcaggcgcatcgacttctcgcagcccatgttctccgatgccccgcgcgagaacctgcgcgtgtaccgccgcgccgtctcgtcgttgtggcgcagcgcgctatgcatgggggcgatcgcgttttgcgcgggcctcgtgagaagcatcgccatagagcagcccgtcatcggctcgctcgtcaacttgctttccatgggggcgatgctggtggcgtcggttgccgtgctgctcctgtggaagacgaaggggctcaagctcaacctgatcaagctctaccgcatcgtgttcccgctcatcatcagcgcgttcgtggtgctgccgttcacccacttcggctatatccgctggctcgcggcggggctctttgcgctgtacagcatcgggctcatgctcacgatgatgcagtgcgcgcagatctcgcgcgaccgcggcgtgaacccgtttttcgccttcgggctgtttgggggcatcgtctacggattgcacgacgtgggctttatcagcggcgcgctcatcgggctgatgccaggaggcgacctctcccccaacgtgctcacggctctcgtggcgatctacctgctcgcgctcatgttcttcgtgggatcggtcaacttcaagaacagcacagcgcagttgctctacggtgacaccatcgagctggtggcacccgtgatggagggcgcggcggctccggaagcacctgccgaaccgcgcgacgatgataccccgccgggcgacgccgcggacctgctctcgctgcaagtgggaaggctcaaggagcattaccatctgagcgagcgcgaggccgaggtcgtcgatctggtggtccacggcaacacggtggctcgcatcgccgagcagctgttcatctcggaaaacaccgtgcgcacccacaccaagcgcatctacaccaaactcgacgtccacaagaaacaagagctcatcgaccttgtcgcccagttctagcggtgtggggtggcaccgcggcgcgccgccgtcaccccttcttgcgagcaatccgatgcttgtcgtcgcggtagaacgcgaggatgaccacgccgaccgccgagcagatggcggagaggatgaacatccccttgaagccctcgttgagggtctgctggaacaccttctggatggtcggcgcctcctcgtcgatttccgcgaggtagttttgcccaccttcgtcgaagcggtccggtatcgcggccttcaccgcttccatcttgtcgatcgtgtccgccaactcggcgcggccatccttcatctgggtgagcgcggtcttcatctttgccatgccggactcgatgcctgcaatgcccttgcgaatgcccgcggcgccggcctcgatgccggatacgccctgctccatccccgacacggcgcccttcatctcggagactgcggtgttgatgccgtcgatgccctcctgcatctgcgcggaagcttgctgcagccccgcgagcgccttctcgagcccctccttctgttcggcgggcgttccctcgggcaggtggtcgagcgcgctctgcatcgcggtcaccttggcatcgacctcagccttggcgtctttcatcgtctgcgcctggtcttgcatggtcgagatcttgccgttcatcgtctcgatgctgccgcgcatctttgccgcctggctgtccatatcctcggtctgcgcggtcatctcggatttcttgtcgtccatctccgacaggctgtccttcatctccgcgatggagtcgtcgaacttgcccagtccctcgttcatcttgtccagacccgtgtcgatgccctgcagcgcctcggcctcgagctgcggcttgatctggtcgtagatctcggtcgacatgtccttgaccgtggcgacgatggtcgtgacgtcggagtcctggagccgctgcttcatctcgtccgagaccgtcacgtcgtactttgagtcggtgtcgctcatgtccatctcgatgtgcgtgtacgacgacatcttggggatgtccacgccgtcgagcatgtcggccgtgtcctcgtcggccttcatgtcggccacgcgctggtcgagttcctcggcgtagggcagctcgctgatggtcacctcggtgggcaggacctccatgatgttgtcctgcatggcaagacccgcgtgggcgatgaacgcgaccatgatggccggggcgatggccgtcccaatcgagcgcacgagcgaaagcgtcgccagcgcggagttggactcagactcgtcggtctttgcgagcatcatgtagttgagcggcgtgcccatgatgaacccgatgcccaggccgcttaacgccatgctgatgcacacgttgagaagcgtcggatactcgcaggtcacgaacgccatgaacagcgagcccgcgaccgacaccagaaacccgaatcccaagatgggcttgacgccgatcttgtcgatgagcctgcccgaaagcggcgcgccaaagcccgtgaacacgccgaggatgatgaggaagtagccgccggagcccgagcgcatcatcatggcgttctcgcagaactgcggcgcaaacagcgtgcccatcatgatgatgcccgtggtgatcgagcacaggagcgtgatgacgatgtcgcggtccttgaaatatgcgaggttcatgatcgggtctgccgcgcgatgctcggccgcgatgaagaccggaatcagcacgagaaacgcgatgaggaacggatagacgtccgtcgacgtgatcgaggtggacagctcgaagaaatcgatgttcttcaggccgtacatgagcgagagcaccatgaccgtgagcaccacagtccccagtccgtcgatgggcttgacctcgtcttctttggtgttgggaatcttgaacaggcccgcgaccaggatgaacaggcagattggaatgttcacgtagaagatgaactgccagttggtcgagccggcgacgtcgaggataaagctccccgccgtcgagccgagtatcgaggccacgccgtagatgccgccgaccaggccaagcgccatgccgcgcttctcgggcgggaacgcggtgccgaactcagccgtggcgaccggcatgatgccaccaccgccgatggcctggatggcacggctcgcgatgagcatctcgaagctgccgacgtcctgcgaaagcccgcaaagcagcgagccgacgccgaacagcagcacgcacagcaggtagatgtacttgcggccgtggcggtcggcgagcttgcccatcacggggatgctcgccgcatacgccagcgtgtagatggtcatgagccacacgccgagctcgtcgggaaccgacagcgtgttttggatgacggtgcgcgccgggttgacgatgttcatgtcgatggcgcccatgaagatgccgagcaggtacacgatggcgacgacgacgtagcccttcgacgacgcgcgggtcgcggaatcggcgcgctgggcagagtcgggcgcgggattgcctgcggcttgagccggctcggcagagccagtggcctcggccgaggcgagctcggcggtgtctgcgggattttccttcttgcgatggcgcatcatgttgctagttctccgattcgagggaaaggttttctgcgatggtcctgagcgaggtctgtagctgctcgatctcgtcttgggaaaggcccgaaaacatccgggctctgatgacgtcgtattcccgcttcatcttgtcgaagacgcgggttgccttgtccgttgccacgacgagcttctcgcgcttgttctccgggttgactgtgcgctcgacgtagcctttgtcctcgagcttggcgacggtctttgccaccgcccccttgtcgatgtcgagatagcgcgcgatgcgctcctggctaaaatccccgtgcgcgatcaggcacatgagcacctgctgctcgggaaagccgatgccctcgtccgcgagcgcgtgctcggcgtgcacgcgcatcttgcgcatgatgatggaaacgtcccgcatgatcatggtgtgcgacctttattgttgtcgttgcaactgttgtcacgacactatagttctgcgagggcggagttgcaaggttttacgtgcccgtaggctggcgaaactgcccccgcgctacgcgttttcctgcccttcgtcgctctcgagcgtggcccgatacgcctcggagcgggtatggacgcccagtttcgagtagacgtttttcaggtgggacttgacggtgttttccgagatgctcatcgccgtgctgatctcttttctcgacatgcccgcgttcagcatcttcagcacctcttgctcgcgcgacgtcaacgcgtacaggccaagcgacagctcgtcttggagctcttcggcctcgggtgccgcatcgtcggtatcgacgagcgagagcacgcgcttggcaaaatcgcgaagcggccgcgccgcctttctcgacgtcgcgacctccaggagcaggtcgcgcgtatgcgccccgtacctgaagtagacgcccacattgccttccttcagcgagagcttgagactgcggacgagttccaccatcgcctggtcgtggtctttccgctgctcgaacagcaccgcgagcgctaggctcgcttcggcatcgacctgcacacttccgcacttccgcgccatctctcgcgcgcgctcgaacagagagatcgccccgtcccagttttccctgagcatctcgatggcgcctttcgcctgcacgcaaagcatcgtgcgcagcacgtcaggattatcggcgaactcgtcgagcgagtgctcgcagctttccgccgtcgtgaggtcccccagacgcgcggcgataatcgccttcacggcaatcgcctcgaactccagatggcgtgggacgtttttgcccttcgtgacctcgagggcattgtccaccgcttcaagtgcggcagcgtctttgcccagtgccattagataacacgcattgcacgtctggatgtcgatgtacatgtcgacgttcgagccgggggtgacgtttgacaaggcgcggctcatgtacccttccgcctcgtcgagctcgccttgcgagacgagagcagaggcgataatcgcgcagaactccccacgcagcggagagcccgccatagtctctttgatcgcgtgctgcgagaggcgtatcgcgctgtcgaggttgccgatatccaggttctggtgggcgaggaggtagtaatcgaacaggcggaagaacggcgcgctttcccgctctgaaaacgacagcgccttctggtagagggcacgtgacttcttgatctgccccagacgctcggtgcactctgcctccatgtgcacgagcaggcacctgaacgagcccggcagctcgtctccacgctcgagaatctggacgatcatgtcgagcgcttcttgggtgcggtctcgcaaggcgaggcagatcgcagtcgcgctatcacgtgccgaacgattgatgtcgcgtgcgtcgaggccggcgattctttcaatgcagtagtccgcctcgtcgatgagcccggaggcaatcgatgcccaggtggaaagccagagcagatacaggtctctcggatagcacgatgcgggaacgtcgagcaggaactcggtcaagttctcatagcccgacggcctgtgcaggccagtcgagccccgcaccgacccctcgagatagtaggggtcgcacgaaagcacgagatacttgaacccgctcgccatctctcctgtctggaaataccatgcgctcgcatggtaggcaagattcgagatctgctccaagcgtagcgaaagcaacttctcgtgcaggaacctcaagaacgcgccctgatagcgatagcactccagctgcggatcgaaaaacgtgaagacgttctcgttcaaaaggtactcgaggatatgccccgaacgtggatttcctgtgacgcgctcgcatacgggcgcggtcatattctcgagtatcgatgtctcgataagaaactcgctcgtctccccatcgacacgagaagtcacatgctggtcgaaaaagcggttcaggtactcgttcagataatgtgcagggttgccacgctcgcccgccctcgtccttgccagactatagaacttgagcagggctggccagccactggacatccgatagcaggaatcgatctcggcttggctcaactcccccatcagattgtgagcaagcctgtagaagcgctcctcgtccaacacgaagtcacggttgtcgaattcgaggacggaaacgctcagcagggcatcgccgagaatctcgtgtggcagaccgccgctgaccacgaggtgcacgttgtccggaagatacctgcagagaaatgcaatcgcacggtcgttttccgccgaactggcgcactcgtactcgtcgaggaagaccacgtagctcatgtcagactcgacatgggagtcgacgagattgacgaaggtggagaggcgtccctcgaaatcagcaccttgagggggcaaagcctcaacgaatgcatggtcgacgcgctggaatgcggtatacagcgaggtcagaaggccaaaggccgccttgtcagatgccgtcgcggaaatccagaggggacatgcggaaccggttgacgcgaacagctcgaaccatcgggagagcgccgtggtcttgccaaagccgggagccgcgttgacaaaacacgcacgccacgtctcgagcgcggtgacgcgctgctccatgtgctcgtcgcccacatagctcgcaggtaccgacgggcacacgaactttttcttcatcagcccctgggggacgaaaaaacctgcttctgtagcgtctgccatgagttgccctccctctgtgcctatttggcaattctagccaatcaacccctggatttgcccggcgcgtgaaaaggagccgtggcgcaagatttcgccgaggccccgggaggggcaattgccaatagaccgcagctcatgcacctgccacttctgaggtcgacctgcccgccgcaggcggagcaccggttgtcgttgtgccgtgccgccgccttgttgatccgatcgaacttcccacacgcgttgcatgcagggcctttgcagggaaaacagttcacgcgacctccttattgtcagctggtctgcgcacctgctcgacaccgtgcggcggaaaggcgcgcgccctaatcggctcggaacctgcatgccgcaaggcacacggtgcccacaatgcctatcgcgagcactcctgcgccggcgatatagacgttgtcgaacgcgggacccaacaagagctgcacaaggaacgtgcccaagaactggccgatgccctggacggtgatgagggcacccattccgatggtcttgagcgatgggtctggaagcaccttcatgaggccgagaatcatcaggcccgtagagcccatccccacaagccccatcaccactgccgcaccccacatgacggcgcctgaagacacgtagagcacgaacgcgcaggggcctagaaaggcgacggtcagcacgaggagccgcttcgtctttcccgtcttgtccgacacgcgcccgaaaaacggcgaggacacgagggagagaatcatcggcaacgtgctcacgaaccccgaggtcgtcgcatccataccgcgattctggagaatcgtggggacgtacgagagcactgcgagcaggcagacattaaaggcgatgaacccgacaaaatacagcagcatgtctctggtgaacagcctgccgaaacgcgcagcgccaccgtcttgctgatctgcagcactgttcggcttcttcacgatgacgagcatgaggatcgccgccacgacgacgatggccgcgtagacgagccaaaggacgctcatgccccacaaggcgaacagggtgggcgtggcaagcgcggcaaccgtcgagcccaaaggcccccacgtaccccagatgcccatcgccgtaccggcgtcacgcgggtcgaccgagccctcgatgaggatggggccgcacaccgttatcgcggtgatggcaatgccctcgatggcacgcgatgccagaagaaccgaggtgccctgcgagaaagcgccgacaaccgagcctatgacgataatcgcaaccgccacgacgctgattgtgcgcgccccgaagcgctgcgcgaggattccgaagggaatggcggaaaacaccatcatcaacacgaagatggtcatgagccacgagcctgccgtcgcgtccatgtgcaggttagtcatcagcacgggcagtatcgtcggaatcttgtactgcacgatggccatcgccactgccacgagcgtgacaaacactccgacaactgcagcattctgataagttctggtgcctttcacgttggcatttcctccccgggacgccgtgcgccctctcttcgttgcgcgaccttcaggccgccgtggttatctcgcttccgcgcagcgcgcccaatcacgcgcagacgtgcattcctacccgacgacgcgctcgacgcgcagccagtattccagggtcttccccgcaaagggatggttgaagtcgacgacgacggtgtcgtgcgcttcgtcgatgacgcggacgggaatctgctggccagaggcggggttggtccaggcgaggacgtcgcccgtcttcaaggtagcgccgccgggaagcatgcccctcgggtagcgctgcacgccgtcggggtcgtgcttgccatacccctggtccggcgtgaccgtgaccgtccgctcctcgccgacggccatctcgcaaagagcgtcttcgatgcccgggacgacctgcccggcgcccaagatgatctggacaggctcgccttccgacctgtcgtcaacaggcgcctcgccctgcgcaccgcccttgtagtgcacgtaaatcatcttcccgaactggctgttgtctttcatctgatgcctcccaagaacacgcgagagggccgaccgccgctgtgcggccgaccccccatgagcgtctgctattcgacgattccgagctcgaaatgctcgtcgtcgctgcgacggtgcgccgcggtggaccagtcgctgttggactcgatggtcacgtccttgacgacacgcccctcgttgttgctcttcttgtcgggtacgaactcgccctttgcctggagcggcttcaactgcggctcccagaggacctgcttcgtcttgccctgcatcttctccgcaagctcggagatgggaccgtacgtgatgacattggcgaggcaatggtgcacgcacaggggctctttgcccttctcggtacgggcgatgcacaggtcgcacaggtcggtgggaacggggatgttgttgtagttgaagaccccgctgccctcctcgagctcccaagggccatcggtgaacaccctgatgccccattttccaaccgggtagttgtgagactccttgcaggtcacctcgcacgactggcaaccggagtagtactcgtaatcgatcaaaagcccgtatttggcatccatcttactggtcctccctcttgaacttgttccatacctcttgcatgtccgtgtcgtagttctcgtcgatcggctcgatgttgcagatgaggttcttgtacggggcgccgaatccgagcttgccaaagtggaagttcgggacgaggttgttgatgttcgagcggaagttgccgtacaggttgggctcgttgccgtcctgctcggggaaccaccatgcatgctgggcatgcacgacacccggcctcaccgtctccgtgaccttcgccttctcgacgcattcgccgaccatgttccagatacggcaccattgcccgtcgccgatgcccaggcgcttggcgtcctgggggttgatctcgaccagcggatcggggttgagctcgcggcagtacgggatctgcctgttctcggaatggaagaacgcgtacgagcgggcacccgtggtcaggacgaacggataggtctcgaacaggtccggggagctcaccgggctgaagtcgggctcgaagtagtacgggagcggatcgtcgttgaactgctggaagatcgtggagtacagctcgacgcgtcccgtcggggtgttgaagccgatctttccgtcgccgcgcagctggccggtctcgtacttgcggtaggtcacggggtcctggacgtacacttccttggcaacttcgcggaaatcgtacttgttgctcaggcgcaggtggttgatgaactcgtcgctgttcgcgtactcgtcccaccactcggggtgcagcaccttgccaaggtagtagcagatttcgatgtccgtctttgcctcacccgtcacagtcgccttctgcgagaagcccttgatgcccatggatgcaccgtagtgcgtgaacgtcgtgccgtcgcgctcggcagatgccgcgaggggcaggaagacatcgcacgacgcctgtgctgacggggtcatgaagggctcgatggtaaagcagaagtcgaggctcttcacgatggcgtcgtgccagcgcttcggttctgccgacgtgcagctcatgaggttgttgccaccgtacataccgaatttgatgggatacggctcgcctgtctcgagggcctggagcatgaggtctgcgtgcgcgttcatgatgaggttgcagtacgccgggtacttgtcgaggccgatcatcttgacggcgaggtcgcccacgcccttctcgaacccgaagccgacttcgttcaagccagtcgtcgcatctccaaggatgttgccgccggggacatcgagattgcccgtgatggacatcaggtcgaggaggcactggcctacctgcatgccgtttttgttctggtcgattgcgaggccccagttgatggcagcgggctttgcctgcgcgtacatgcgcgccgcccggtagatgtcatcgacgttgaggccgcagatcttcgcagccttctcgggggtcatgcccttctcggggtcgttgatacgcgccttgagctcttcgtagccatagcaccagtagtcgaggaagtcatggtcgacgaggtcttcgttgatgatgaccgacagcatcgccatggcaagggcgccgtcggtaccggggcgcaggcgcagtgagatatccgcgcggctcgacagccagttcatgcgcgggtcgaccgagatgatgcgcgtcccgcgcttcatcatgtcgacgagcgcatggccgaacatgccgtcggggttggatgcgagcggcatcttgccccagaccataatcacctcgggaagcacgaactcggggtcgtcgtagcggccgggcagcgccgcggcaaagtcgacttcgggatacgccgcgccgattatgtagctcgaggcggcaagacgcgggatgtagcaggcatagccggactgggtgtagcagtagttgggcgtgccgagcatgaccgagccgtaggggttgaacgttccgccctcacgtccggttccgacgaagacgacgcaactctcgcggccgtactgcttagtgatgcggtcgtagttctccttgatgatctgcgcagcctcttcccaggagcactcctcccacttgtctgcctgaccgcggaacttggggtcgcgcttcatgggatgggtgatgcgggaagggttgtacaggtagtctttcagagacaggcagcgcacgcacaggcgtccctgggttaccggatggttctcgtcgccctcgacgtcgacgacctttccatccttgtccgtgtagaccttcaaaccgcatccaacggggtggcagccaggggcagaccagggggaaagacgggtgacggtgaggtctccctcttcgtagcgccatggtttgccgagatcgttgacatctgacagcgtatcgagcttcacggctttcgccgctttcatctcagccatgtttcatcctctctcgtagagtcgttttcggacagcaagcgcgcacctggcgagttgctccgcttttgtcctgattgagagtctacgggtgagttctcacaggcacatgacccaccctcacgcactaaaggggtgatttataggggttaggtttcccagcatttgggtaatatccaatagacgctgcccccacaacatggcgatacccgcaagcggcagaccctcgtccaccgcaagcgggcatcgctcgatgggtatctttgttcgcagcttttgactgcagtcagtgccgcctagcggatcttgcccttcaggccgaaaatcgcgacgagaagacccaggaagaacacgggcgcgagcacgcacacgccggcaagcgtgtagccgattgcgttgatgacgttgcccatgaacatcgagccgaggaacatgccacagctctgcatgcaggcgagcgtcgccgtcgcgccggagacaagatgcgacggaaccgtctcggtgcacgaggtccaaagcatcgacgaaatgccgccacccacgaagccgttcaaaatgatgacgatgatgtacagacggatatcggtcacggtgaacacgagcaaggcgaacagcacggcgcaggtcatgcagaagatgaggatcttacgacgcgacttgatccggtccgaaatcgccccggaaattggtgcgaagcaagctccccagattgctccggcacttacgagagccgaaccgaccatgagtggggcgtccagattggcagtcacataagccgtcaagaagccctttgaggcgatgaaggcgccctcttcgaggaagaacaagatgcccaagatccacacgaccttatggctgaagaggtccttgtaggaaaacttcacctcaccggctttgtcttcctcgctgataaaaggatcgctcggctcgcggtagacgagcaagaacagaaccagcacgcaggcgtccaaggccagcatgaaccaccagacactcacgtagctgccggttgcgcccgcaatcgcggagtcgagaatgggggtcaccgcatttgcgattgcgacccacatcgcccacacgcccaacggcaggccgcgcttctccggagggaaccacggcgagattgccgcgacgccgataacgcccatcaggccgaagcccgcgccctcaatgatgcgggaaatcataagcgctgtcacgttcatcgagaaggcaccgatgaggttgcccacaatcccgcacgccaacgcgatcacgacagaccagcggattcccagcctgcggataaacgacgccgccggaaacgcgatgaccgcgccgagaatgtagaagacgccattgacccaaccgagcacatccggcccgaactcgagcccttgcatgacgagcggggcaagccacatggtcttgcccatgttggcgggcatgcagaaaccagcaaggaacacgacgagaactatcgcccacgcgcgtcccatattccccttcttgacagcagcagtactgctcacggaaatcatcctcccccttgccaagttaattgtttcgagcggtgaccggacgccatcaaagcccctcgccaggaaggcacagggtgcccgcaggcttcttgggagcccgaagcacagctttggcttacagactagacaggagggagattttggagcagccccgcaatgggggttctttgggggtgagatagagcggcttaaatatcacccgtttgccgctacacgccgctctaccgcccgcttgcgcccctcttgcgcagtcgacggatgacaacgtctgcgaccagggcgacaagcgcgagcacggcgacgagcgcagcccactcgcgcatgccccagtggcggttcgcgagcgagcccgcgtcggcggcctcgtcggggttgtagtcggtgcgctcgcagtgcacgagcagccgatggtcgttcacaccgtagggcgtgcaggtcacgagcgtgagcaggtcccgctcgggctcgatggccagcgaatccacctcatcgggccataccacctcagagccggtgacacggtaggcgtacgtgtcgcccatcgtgtgcagcagcaccaggtcgcccggcaccaattggcggatatcgtcgaacatacgcagattgcccatgcccgaatgcgccgtgagcacgcagtgggcagatgccccgcccaccggcaggctcccccgccatgagcgcagcatcggacgtgccatggtagatgggcatgctcacattgatggaggggatgtcgacccagctcatcatggggtcgcgctcgaaggtgagctgttcgtcgtagggtacgatctgggaaggctccatgctgggcgtacgccccgcgagttcgtcgttgtaggcatgcgcctcgtcgaggtaccactgcttctcgtcggcgggcagggcgtccacgtgcgccgtgacctcggagatggtggtgcccacgcccgtggacgagacgaggtcggcaacccagggccaaaccatcagcccaataccacacgcgatcaggacggccgcaatcagacggtccgcccaccccggcagccgccgtctttttctcgtatccctgccgccgtgcttgccgggcatgttcctccccatgacgcgagggtcccgcaaccaggcgggaccctcgtgctacgctgtgctatagacgcctactgctgcgccttgtccttcttgcgcgagcggaccaggtacacggcgcctgcggctaccataacgccgccgacgatccacagcagcgcgataccgttttcgccggtgagcggcagggtcatgcccgccttgtctttgacgaccaagtcgaccacgccgtcgtagacgttaatcgtggagacgttggcgttcgaggtctggacgcgaatcgtgtcgatatcgcccgtggtctccttgtaaacgggatagatctggaaggtgaagctgggcaccgtattgtacccatcgggagcctgggtctcgacgacggtgtactcgcccgcgtcgagcccgctcaccgcgatgctgccgtcagcagcagacgtgaactcataggcggcatcgccgagcgtgccatccgactggacgtacttgatgcccgcgccctcatcggcaccggtagcttggatggtgaacttggcattctgcaggccctttgaattatccgagctgtcaaccttcatgagcatgagctggtaggtatagtcgcgcaccgtcgccggcgtggtgtcgccgtggcttttggttcccgggttgttggagtacgtgagggtcaccgtgttgtcatttgagcggccggcggccttcgcatgctcgttgagctgggccgtgtaatagacgtttaccacggaattcggcgtgacggtgatggcgttgccgtccgcgtccttcaccgacttgagatcgttgacggtcacggtgagcgtgttggtggcggagtcgagagcggccgtgtagtcattggcgcgtacctgggtctcggactgagcggtaccgcccgttgccggattctgcaccatgaccttgaccgagcccgcatcggccgtgagccccgaatcgaggacgtcgctgaaggagtagtagtacgtgtcgtagctcgcgagcgccgtcgcgaccgtgcccgtgagcttataatcgatgttctgcccaatctgggagtccgcggcctttgtccagccggaacccgtcgcgtcgttcttgatgtacttgttgaccgtgggcaggctcgatttctggtcgaccgtcaccgcgctgccgccgaccaccgcgtagatgggggcggtacccaccttgtcgatcagatcgctcgtcgtgtcggtgtcggtcacgaacagccagtaaccctcatcgagcgtcgccttggtgccgggcgtgaccgtggtggcagccgcgcctgccgtgcgcatggcggcggcaatcttgccgaacgcatcgttggcgtcgacgacggtggcagaccccgagccagacgcgtgcgtgctcagccagtcggccgcatcctgtgcggacgtgcccgcataggcaggctcgatggccttaattgcatcttcgacagccgtctgggcctgggtgctgccccagacgatgttggacaccgccttggacgtcgtggcgcccaccgtctgatcggcaacgtccgccttgaagagctgatagcccaacagcgtcgtggtgtccgacgagacatgcgtgttcgcgttgatcgtgatgtcgccttgggtcgcggtcccgtcggcggcaaaggccccggggagagcggcgcctccaaaggcgagtgttgccacaagaccgccggcaagcgccagccgcgcgatgttgtttccggctttcatctgaactccttcatctgaccgagtctgtcatttcctcaaacagctgctgctgcatctgccgatgtccgaacggttgcccgcgcaacctgcgctgcgcgaacgcggtgcatgcccttctcgcgttcacgaacgctcccccgtcctccggcgatgcgccgcaaacgcgagaagcgcagctgcggcgagcagcgcgagagcgccgagcggcgccgtatcacccgtcttggggagagcggacgcgaccgcatccagagggcccgcgggcccatcgagcaccgagaccgccgcctgacccgcatcggcgtcgaagccatcggcgcgcaaggggtcagccgccttcagcgagacctgcacttgcgcatgcacgatatggtcggggtcgagcgtggcagaaagctcgatggtcctcgtaccggcaaatgccgcgtagccctcgggcgcagagacctcttcgaccaggtaacggccggaatcgacgcccgcggcgcgcacgagaccctccgcatcggtggtcaccgtcgcatcctcccccgtccacgtaccgtcctgggtcagatgacgaccctggccatcggtcacgcgcaagacggcgccctgcaggggcgtctcgtcctcagaggagcgtttgacgagctgcaggccccacgtgtaggcgaccgcatcggcaggctcggtctgcgcgaacgcatctgaatacggcgaactcggataacgcagcacgacctcgtccgggttgccctttgccacgccctgcgcggcagcggccgtgagcggggcatcgtagaccacgcacacgcgcgctccggactcgagcgctccgccgcgcttggccagcgaggcgacgaggtcgtttaccgtgacgtcgaaggtcgcccccgcatcggacgtcgcgtagctggtggcgtactcgtctgcatcgagctcgacccaagcgtcacccccctccggggagtcaccctgcgcccaaaacggccgtgccgcgtctgcggtatccgacgcaccgacgatgctcgacgtcgcgtcccccgccgccagatacacgtggacctccgaaggctgcccgatgccgggggcaagcgtgtcgtggaagctcacgccatacgccgagtagccggcaatccccgcgggaacagtcgcctcgaggcgccaaaacaggctgtcgcccaccgtgacatcagcctgcttttgccaggcaccagacgagttctcgagcacgtgcttgtcgaccgtcggagcggcccccttggttgtggccgtcgccgg

SEQ ID NO: 1439 - DNA, 2522 bp, Unknown
  16S sequences of unknown bacteria
aaatcgactgacctttcttttttacccaacaatatctttaattaagggagacgggcgacggcgttcccgatatcgtatgtctgaaaaacatcgcggacctgttcggcgtcagtgtcgactacctccttgaatcggagcacagcacttcccccgccgcagctgcacaagataattccgcacaatccgatgagcagaatcaaagcgagagctacattataaaccgcgccgccatcgtcggagtaacactcgcgggaatactcatgctctcggctaccgtttttgtgatattaaagctctgcggcatcgtgtcggcgcttccgtttgtgatagcctgcccggtattcgcactgctcatcgtcattttcaattcaatctggggtgtgacgaagtacaatttctacacggtttcgctgctcgttttgtcaatactttttctcatctcgttcattctccgaagctacggaatgtggcagataatgctcctcggcatccccggtgtcttcatagtatggctcgcgtgccgtgtgaagaaaaaggtctgactgtaatacatctaaaacggcgtgatttctcatgtcgttttttagttgtttttgcggttttccccggttgacatccgaactgtgttctgctataatatgcatgaacaaacgcaggggtgctgtgctatggtgcacggctgagacggcagacgctgaaccctttaaacctgattcggacaataccggcgtagggagattttgtgttcggttttcgaatgattgccgatttgcttttacagacatctccgcaccagataatttccggctgcggactttttttgattctgcgcttgtttaatatacttatatggagttttttatgacaaacgcaactcaaaagaaaaagtttgacctgcatctccttgtagaatgcgcgataatggtcgccctcgcaacagtcctcagccttatcaaggtttatgaagcaccgttcggcggctcggtaacactgctttcaatggctcctatcattgtgctgtccattcaccgcggtataggtcccggtcttgctgccggatttgttcattccgtaattcagctcatcctcggtctttccaacgttggctgggttcccgatatgggcggcaaggtgctctgcgtactctttgactacatcatcccgttcacacttctcggactcggcggtatgttcagaaacgttaagttcacaaagaacgaccgcactaacctcattgttcaggcgcttctcggcactctcgttgtcaccgttatccgttatctctgccatatcgtttccggtattgccgtatggtacgctctcgaccttgaatggtacgcagacgaccccgaccacatcgttaacaagtacggctcatggatgttctccgctatatacaacggtacattcatgctccccgagataatcgaaacctgcatcggtgttcccgttatctgcaccgcgctgaacagattcatcaagaaaaagtaatcaatccccctcctcgttacagtccgctatttattccgtcctcgacccacggagtaacacagcggctgttttttgttctgataaagaaaaaactcaggtatcgcaaaatgaatgcctgagtttttgttttgttcagttgtcctcaacctcgtcgaagcgtctcttcttgaagtaatactgcttgtcctcgtcggttatcactcgcatcacgcggcacggatttcccacagccaccacattgtcggggatatccttcgtcacgacgctgccggagcctatgactacgttgtttccgatatgcactccgggatttaccatgcagttcgcgcctatccacacgttattgccgattgtcacctcgataccgtactcatatccggcgttgcgtggctcccagtgaatcggatgaccggcggaggatatggtagtgtttgcagcaatcattacgttgtcgccaatcttgaccttcgccacgtcaattacagtaaagttatagcttgcgaagaagttctcgcctatctctatgttcttaccatagtcgcagtaaacgggcgggaaaatctcaatattctctcctatcttgccgaaaagctcacggagaagctccttctgtctttccgtgtcctccggcgggcaggcgttgaatgcggcaaaacggtgcttgctctgtattctcttctcggggagcccgtccttccacgcctgatacggaagtcccgcgagcattctctcttcttctgtcatacaaaaaatcctttcgtgaaaataaaaaacgaacacgagagaaaacctatcgcattcgtttattcagacgcagggaaagggattcgaacccttgtggcattgctgccaaacggttttcaagaccgcctcgttatgaccgcttcgatatccctgcgtgtcatcgtacaggtgatattctaccacaatcgcgcgattttgtcaagagctatttcaaaaaatccggggggtactgtgttatggtacaatagataagtaacaacgacagaatggaaaagacaactcaaaaa

SEQ ID NO: 1440 - DNA, 10664 bp, Unknown
  16S sequences of unknown bacteria
tggaaattttaaaatgtgagatggattgagcacaagttttcagtgaagcctaaaagaattattaaaatccacggacgtaagtttacctttcttttaatagaagaaagctattcgtccgtggaaatactatttctgtgaatagcaatgacagcctttgatatctgatttactcacaccgattgctgcaagatacctcaatcaccgtattttgtgggaactgtccgtcggcttctgtgtatacgatcactccgcatttttgatcgtaggtgttcttattgtacgtgtagtaaaggaaagcgccgctctcttcttcctcatatgtcatatttccggcctggagcgtggcgagaaagtcctccttcgtcataccgatgcggatcccgcccggaagtgctccgtcgagcttcagatcataaccgccgacttcaaggctctcgatccagcagttctccgggatggtcgcatagtctgcgctattccatgcaagtgtatggaagctctggcctcccttgatgagaccgacccagccggaatcgcgcgccacaacgtactcgtctgtctcagaaggattgatctcccagccgtctgccaggagagcgctcaccggtaccggaaggctgtaggccgtaccgtccagttcgatctcataggcagtgaggtcatcacttaatccctccggcttctgataagcagtgatctctgccgggacttcttcattcactgctccggcctcgaagtcgtccggagcgacgaagttcctgatcgtaatgtcctccagcctgccactctccttgaataccttcatctcgatgctgctgttgtaatctgtctcgtacgtgtacttcgtgtacagatctccttcgtacgtgtcactcggcgtgccataggcagcggtgatgtcatctgcggtagcctcgccgcggatcaggccgcccggaagggtgatcgtatcggcgccgtccagcttccagtcgaaattgtcgatcgaaaggccggccatcaggcagtcggtagctggcatcgtattcatgccaagattcaggatgtaggcggtgcaggtcttatcgccctttttgaagcggcacatgctatagctgttcggctccagcatctgcgtcaggtcatcagatgcctcccagccaagggcttcgaactccggaatcatcatcgggaacttcagaatatcatcattgatctgaagctcatagtccgtccacttgtctgagagtgccgaagctcccttctcctgctgagcagctgcccggtctgcgatggcatccgcctttgccgcgttctgtgcgacatccgcagctgcttcggtcgctgcctccgtggtagcgtctgttgattcctgcgcgcaagcagtgctgccaaatgccagtaccgcggcaagcaggagggcgtaacgttttgtgtgcatagtgaaattcctccctttccttttatatcgctttgcaaatgagtaataatttcatattaacacctcgggacgcttccgtaaagaacttcctgcaaaaacctttccatgcgaattgctctgcacaacaaaaacgaaggacttgcctgattcggttaaaaaagagcaacaaaaaaagcggataacgggaatcgaacccgcctatccagcttgggaagctggtgttctaccaatgaactatatccgcatctctgtttattatatcatagaaattggaaatggcaagcattttttctcattttcttccaatctgaatatttctttttgtttttcacaacgtttatgttgctattcgtataagaataagatatcatatatttgctgtcgcacctccagcagagaggaggtgatgagatggaagcataagccacctctgaaataggtatagaaaacgccaaggactgcattccttggcgttttcgtttcctccagcatatttgatatgctaagcacatttatacatgagctatgatagtttttccctatttctgcctggttcctttgccatcccgcgtaccgatccgcagccggttgatatggacgacacggtcgtggaattcgacctcggtgctgttgtctccctcgagccagtagatatcggagagaaggtctccttcggcaagcttcatgccgcgcacaccgaccgccgtctttttcttgaacgggatctcggaaatcgggaagcgcaggaagaagctgttctcggaagccaggacgatgtgggcctgctcggaagcagcatggacggcaagcacggtatcgccctcctgcagcttggtcgcctggatcgtgcgcttggagacgacatcgaactctttgccctccacacgcttgaccatcgcctgcttcgtgacgaaggtcaggacagtatccctgatgtcgttcatcgccatgacggtcacgaactgctcttcgctgcttgagtagttgcagaggttgtcgagcggcgtgcccttgtcacggaagcgtccatatgggacatcgatgagcttcagcagatgcacctttccggtgtctgtaaatatcatgacgcggtccgtgttcatgcagtgcagcacatagcggttctccgcatcggcggcctccttgttgcgctcgtagacgctctcgtcgatcgtgcgcacgtagccgaagcggtccatcaaaaatacgaccggcattgcctcaatcttctgctcctcgagcacaacttccccggcattttccagcatcgtgcggcgtggacggccgaattcctttttgaactgttcgagctctttgatgatgacctctgccatcgagccgtagttgttcaggatatccgtgtagcgggcgatgttttttaaagtctcctcgtgctccttcatcagcacatcgatctccagcccgatcagcttgtacagccgcatatcaaggatcgcatttgcctgcatctcggtgaatcgaagcttcgcagccgcttttttggacttctcggtcttaaatcggatgccctcggtcacaccctttacgaggcagtcctttacctgctccctgcttctgctcccgcgcagtacctcgatgatcagatcgatcacatcacaggcacggatcagtccctcctgaacctcgcactttttctgctccttgtcgagcatgtttttgtatttgcgcgtcgtcacctcgaactggaagtcgatgtggtactccaggatcttctgaaggcttaaggtctccggccgaccgtctgcgacagcgagcatgttcacgccgaaggtgtcctcgagcctggtctttttatagagtaaatttttgaggcgctccacatctgcgccctttttcagctccaacacgatccggatgcctgccttggacgactggttcgagatgtcgacgatatccgtcgtctttttcgtctcgaccagagaggcgatgtcattcaggaatttgccgatgttcgcccccatcatcgtatatgggatctcggtgatgacgaggcgctcctttccgcctttgacctgctcgatctcgaccttgccgcgcatgcgcagctttccctgtccggtctcgtaaattttctcaaggtcgtcctgattgacgacgatgccgccggtcggaaagtccggacccttgatgtatttcatcagctcgtgtgtcgacagctgattgtttttgatcatcgcctttgtcgcgtcgatgacttcggcgagattgtgcggcgggatgctcgtcaccataccgaccgcgataccgtcggagccgtttacgagcaggttcgggatgcgcaccgggagcacgaccggctctttctcggtctcatcgaagttcggtccgaaatcgacgacatccttgtcaaggtccgcgagaaatgcctcctgtgtcaccttctgcagcctggcctcggtatatcgcattgccgccgccccgtctccctcaatggagccgaagttgccgtgtccgtccacgagtgccataccctttttgaattcctgtgccatcacaacgagtgcctcgtaaatggaagaatcgccgtgcggatggtatttacccatcgtatcgccgacgattcgcgcacatttccggtatggccggtcgtaacggatgccgagctcatacatatcgtacagtgtgcgccgctgtaccggcttcaggccgtcccgcacatccggcagcgcacgggaaatgatgacgctcatcgcgtaatcgatgtacgacttctgcatgatgtccgagtattcggctctgatgatctgtttctcattatccattgggagtgctcctttttaaatatataataacgatttcgtattttgattcctatgatacacggattgcttcgcagctcctgtctgaggctgatgggcgtcctgcccatcccaaaacgcaaatacagtcatgagcaaatacatttgcccatgcctgtctttacgttttgctgctgttctgaactgttatacgtcaagtaacgcatcctgtgcgtgttcatatataaatgccttccgcggcggtacttcggtgcccatgagcatacttgtaatgctcgcagccagacgggcgtcttcgatctcgacgcgctgcagcatccttcgctcgggatccagggtcgtctcccagagctgctcggcatccatctctccgagtcccttgtagcgctgcagggtaaacggtgccttgtgtgttctgcgatagcgctccagcgctttgtcgtcgtagaggtactgctcctgtccgcgggacgggatgaccttgtagagcggcggcatcgcgatgtagacatgtccctcgtagatcagctccggcataaagcggtagaacagcgtcagcagcagtgtgctgatgtgcgcgccgtcgacgtcggcatcggccatgatgatgatcttgtcgtagcgcagcttggtaatgtcgaaatcattgccgtagccctctgagaagccgcagccaaacgcgttgatcatcgtcttgatctcggcatttgcgagcaccttgtcgatgctggccttctcgacgttcaggatcttgccgcggatcgggaggatcgcctgatagttccggtcacgcgcagtcttcgccgagccgcctgcggaatctccctctacgataaagatctcgcagatcgacgggtcgcggctctcgcagtttgcgagcttgccattgctgtcgaaggagtatttctgcttcgtgagcaggttcgttttggcacgctcctcggacttccggatctttgcggacttttccgcacaggcgaggatcgcctttaaggactccaggttgcggtcaaagtagcggacgatctcatctccggtcacctttccgaccgcacgggccgcatcctggttgtcgagcttcgtcttcgtctgtccctcgaaccgcgggtccggatgcttgatcgagacgacggcggtcatgccgttgcggatgtcagcgccggtaaaattcggatccttttccttcagcacgccgatctggcgggcatacatgttcatgactgtcgtaaaggtcgtcttgaagccggtcagatgggtaccgccctccgcattgtagatgttgttgcaaaagccaaggacgttctcatggaattcgttcacatactggaatgccacctcgacctgaatgccgtccgcctcacccttgaagcagaccggatcactgaccggctcctcctcctgattcagctcacggacaaagccggtgatgccatccggctcgtgaaaggtgatcttctccggcgtctcgccgcgcagatcggtaaagtggatcgtcagaagcggattcaggtaggccgtctcatgcagccgggacttcagctcggtcgctgagaaccgggtcttctcgaagatctccggatccggcaggaactggatccgtgtgccggtcgcccgtgtcttgccgatgaccggcagaaggccgttttccagctcgatggtcggcgttccgcgcatataccggtcgtggtgaatttttccttcgcgcatgacctgcacatccagccaggtggaaagcgcatttacgacagacgaaccgacgccatgcagtccgccgctcgtcttatacgcgctgtcgtcaaatttgccgcccgcatgcagtgtcgtaaagacgaggcgctcggccgacatcccttttgcgtgcatgccgaccgggataccacgcccgttatcctgtaccgtcgcacttccgtccttttcgagtgtgacctcgatctctgtacagtaaccggccagatgctcatccactgcattgtccacgatctcgtaaataaggtggttcagtccctttcgcgaaacgcttccgatgtacatgcccggacgcttccggacagcctcgagtccctccagcaccgatatcgagctggcgtcatatgtgttgctttttgccatgttcctttccttcctgtctttcttctgtccggcgaaccgtcacggtccgccttttctgttacgcaagcggtatctgtcatacccgggcagctacttcgccgcgctttttatagatggaatccgccggtacgacctcgcgcacggatgaaagcgggtaaatgctcgaatgccgccctacgacagtccccggattcagtacggagccgcagccgacctcgacctcatcaccgagcatcgcgccgaactttttcaggccggtctcgatgcgctccctgccgtccttgacgacgacgagcttcttatcggactttacattggaggtgatggagcctgcgcccatatgtgccttgtagcctaaaatggaatcaccgacgtagttgtaatgcggtacctgtactttattaaagagcacgacgttcttcagctcggtggaattgccgacgactgcgccttccccgacgatcgcattgccgcggataaacgcgcagtggcgcacctccgcattttttccgatgatcgccggtccatgaatgtaggcggtcggtgcgacggtcgcggatctggcgatccagacatcctcaccgattttctcatattcctcttcggaaagtgtgctgcccagctgtaaaatgaatgcgctgatcttcggcagtacctcccacgggtaggtggctccctcaaataaatcctttgcgatggtttcgtctaaattgtagagattgctgattttacatgcttccatggctgatccctcctgattctatgatacactctgtgcttcgcgccttgcgtttcgattcgcctgcgtcccggctgccttcggcgctttgtaatacttcgcagcctcgtcgaaaaacggacgcagcgcatactgattgttcagcccgagcacaccgtcagtgcgtgaccgcacgaaatgctccagcttctgcatatattcttcttcggtgacggatccctccgcgacgtagttcagtcccttttcccagctcgcggtcagctccggattgagcagtgaacggatcgagtaaaagacgatgtcatagatcatctctccttgcagggtcggcgtcaggatctgggtctttttatttaatgcgatgtatttgttggcgacgagcttctttaatatctcggcgcgcgtcgcactcgtgccgatgccgcagctcttgatctgtgcccgcagctcttcgtcctcgatcagctgtccggcattttccatcgccagaatcatggaaccggaattgtagcgcttcggcggggacgtctcgccctcccggatcgccagtccctgcaccggcagctccatgccctttttcagccggttcagcacgtcaaggaactccaggccgaagctgctctccgccggattgccggcattttccccggtactctcttccgaagcatccggctttttctttttctcgtatggattgcctgccaccttgaagtagccctccttgagcagcacgcggaaggaatagaagaaacgctctgatcccatccccgtcaccatcgtgacctttgaaaactctgccggtgggtaaaaaatcgacagaaaccgccgcacgaccgtcgcatacacgccgtaagccgtcttacttaatgaggcaagcgcaccaaagccctgcccggtcgggatgatcgcatagtggtctgtgatttgcttgtcgttgacgtagcgggtctttgcgatcatcttatagctgcctgcagcgagcacctcctgtgcaaatccctttgccggaccgaaattttgcagtccggaaatattgcgcccgatctcctttgccactgcgctcgagagcacacgggcatcagtacgcggataggtgacgagctttttctcgtagagctcctgcacgatgcgcaaggtctcgtccgggctgatcttgaacatgcgcgagcagtcgttctgcagctcggcaaggttgtacagaagcggcggatttttcttttccttctttttgtcaagctgatggatcacagtcgtcagaggctgcgcttcggacagctctgccacaagtgcctcggcatcctttttttccttaaagccgttctccttgtagagcttcggcgactggaaataccgggagccctccacggcgcggaactcgccctcgatctgccgcccctcggcatcgagctgctgaatcacacggtagaacggcgtcttgacgaaccttcggatctcgcgctcccggcgcacgatcataccgagcacacaggtcatgacacgtccgactgagatgacggaatacttcatgcccaggtagttcgacacggaattgccgtattttaaggtgagcagacgggaaaaattgatgcccatcaggtaatcctccttcgcgcgcaggtaggcggcggaggccagattgtcataggcgctcaaatcctttgcctcgcggataccacggtggatctcctcttcggtctgggaatcgatccagacacgcttccgcgtcttaccctttacttctgccatctgctcgacgaggcggtagatgtactctccctcccgccccgagtcggtacagacgtagatcgtatcgacgtccttccggttcagcagatggctcacggtctgatactgcttcttcacaccggggatgacctcatacaggaagtgatccggcaaaaacggaagcgtgttcaggctccagcgcttgtacttcggatcgtatacctccggatagctcatggtcacgagatggcccacgcaccaggtcacgacgtaggagtcggactcgacaaatccgtcgccgcgcctcatagtttctccgagcgcctttgcaaattcctgcgcgacgctcggcttctctgcgataaacagtgcttttgccatatcatcctccctggtggctgaaatgcatccggacatgggcaaggtgtccggctttgtacagttacaacctgttattataaacatattttccggattctgtcaaatcgccactggcaggaaaacgccatcgaccgtctctgtatcccggtcgatggcgtcttgttgtttggtatttattttttctgaatgtatcccttcgcctttaaggtctctgcgcagaggagtgctccgcctgccgcgccgcggacggtgttgtgagataatccgacgaatttgaaatcgtagatggaatcctctcggatgcgtccgacggatatgcccatgccgttctcatagtcgacatccatggtcacctgcggacggttgtcctcctgcatgtagcggatgaactgcttcggtgcgctcggaagctccagctcctgcggcagaccccggaagctctcaagcttctcgatcagctgctctttcgtcggcttcttgcggaattttacaaatacggctgctgtatggccgttcagtaccggtacacggatgcactggcaggtgatcttcggctcggtcgccggaacgatcacgccatcctcgatcttaccccagatacgaagcggctccttctcgctcttttcttcctcgccgccgatgtacgggatgatatttccctccatctccggccattccttgaaggttttgcctgctcctgagatcgcctgataagtcgtagcgactacctcgtacggctcaaattccttccatgcggtcagcaccggcgcgtagctctgaatcgagcagttcggctttactgcgataaagcctctggtcgtgccaagacgctttttctgatactcgatgacatcgaaatgctccggattgatctccggaacgaccatcgggacgtccggggtccagcggtgtgcgctgttgttggatacgaccggtgtctcggtctttgcatatttttcttcgatcgcgcggatctcgtcttttgtcatatcaactgcagaaaatacaaaatcgaccgttgccgctaccttctcgacctcatttaaatccataacgatcagcttcttgactgcctccggcatcggtgtcgtcatcttccagcgtccgtttactgcttcctcgtaggtcttgcctgcgctgcgcggactcgccgctactgtcacgacctcaaaccacggatgattttccagcagagagataaatctctgtcctaccattcctgttgcaccaagaatacctactcttaatttctgatccatttttatgtcctcatttcctgttttgtctttttgatgcgcacatttgtacgcgtgatttgtatatcatagcgcattttccgacatttttcaaccctgacaattgaaaaactatgtctacttattaacgctcatgttactgttcccagtacctgtgaccagcaatgcgcattttccttataacgattagcactcttccagatacgcttcgtgaagcgcgatcacctttttcatagcttccggtccaggtgcac

SEQ ID NO: 1441 - DNA, 21865 bp, Unknown
  16S sequences of unknown bacteria
tggacaaatacatggataaaccggataatacggggaagataaagtacccgtttgcttttccggcatactgctgcaagaccggcgcaatgacggtattgtagtttgtgctgacggcgctggtaatcgcttcggacggcacggtggcaatggcgtctccaatatagctgccaaagaacgtaccgctgggcagcttggtagccgtcagggcaaattgattgagctcagcattgctcagcaaggattgggcctgcgccaagatttcaggctgaagcctggctgccgactgctgcaaggtcgttgcaaactcctgggcagacggcatgacggctgcaacgccggtatctgggcgccaaatattgtgtacccacagggccgaaggcggcattgaaactgtaccgttggccatgccgacgaccatattcaccgtttcggtgttagacaaaatcgtgatggcgccaaacatggcaaagatgatgggcagctgcagcagcaacggcaagcatccagcggacagctttaccccttcgcgcttatacagctcgttggtttttgcctgcgccatacgcggatcgtttttgtaccggcgctggatctcctgaaccttgcctgccaaagcgccctgcttcattgtgctgcgcttttgcttgatatccaagggcagcagcaaaagacgcactacaaccgtaaagagaattacggccagcagccaactgcccgtcaggccttccagccaggaaatgactgtgacaaaaaagcgcgagataaagttatcttgtaaccaactcaaaggatttcctccccaactgttttcgtgcgtgcaggcacgggatcatatccgcccttgcacaaggggttgcagcgcaatacgcgccatagggccaaacccagcccccgcaccgcgccccaggtttggatggcttctaaagcatattccgagcatgtcggcacaaaccggcaacaacccgggtgtagcggcgagatctgtttttggtagaagacaatgagccatagcagtatgcgtttcatgcgtctgtctccttcaagcagccgctccgctttaacagatgatacatgccgtcataaatcacagaaaacgaagcttgggcgctttgcgtccgcgccacaaataccagctgcaccttagggcgcaccattggcgccagcagacggtagctttcccgcatccagcgctttaccttgctacgggtcacgctgttgccgacctttttgccgacggaaaatcccgcacgggaccgcccgcggcagggggccgccaaaagcaccatctggccattggccacgcttttgcccctccggaatacgtattggaattccgatgtgcggcgcaagcgcatggactttggataagggtttttcttcatgatgaaaaaagccgcttggcgcggcttttatgcagtcagtaccttgcggcctttgcgacgcctgcgcgcaaccaccttagcacctgtatgcgttttcatgcgggcacggaagccatgtacctttttacgctgtctttttttcggctgataagtttgtaacataacagtgatacactcctttaatcggcggtatacgccggcaatttcaaagatacgcacccataaaagggcaatgctaatttattataatagaataagcaacccctgtcaatgagaaacaggcggttgaaaatgggttaaaaggatttccaatcctgcgtgtcctctgtggtagtggtggtgtagccagcgctgctgccaagcataccgaaactacattttccctggtaatagcgctccacatgcgtttccccgcacttgggacatggggcggtttgccctacgcgcaccaattcctcataaatatggttgcatttggggcagataaacttcaaaacaggcatgccgatccctccttttggctgtgcaatattgtatcgttttttcccgctttcggcaagggggcgcgggcaaagcattgtcaaaaccgaaagatgcgtttataatatgggcgcatagcctcaaagctgagatgctttgcggcctttttccatacgaccaggggcctgggaaaagcatacgccaaaaccgggaggaattatatttggagcctacattgatcataaagggcggaaaccctttgaaaggaacggtaacggtcagcggcgcgaaaaacgcagccgtagccatcctgcctgccgcgcttttaagcgacgagccgtgcgtagtggacaatctgccggatattttggacgtaaaggtgctttcgcatattttacagcgcatgggcgcaaaggcagagtttaagcataacatcatggccatcgatccgcgcggcgtggaaaaccaggccgtgccatatgatcttacacgccatatgcgcgcttcttattatttgctgggcgctatgttggggcgtttcggcgaagcaacgattgcgttgcccggaggctgcgtgataggctcgcggcccatcgaccagcacctaaaaggcatggaagcactgggcgcggacatcaagctggagcatggctccatcgtggctaaggcgccgcaggggctaaaaggtgcggagatctatatggacgttgtgtcggtaggcgccacggcaaacatcatgatggcggctgtcaaggcccagggcaagacgattatcgtcaatgccgccaaagagccacacattgttgatctggcgaactttttgaactccatgggcgccaacatcaagggcgcagggactgatgtggtgcgcatcacgggtgtgccgcgcctgcatggctgcagctacaccgtgattccggaccagatcgaaacaggtacgttgatgattgcagcggccgccaccggcggcgatgtgtggatccaaaacgtcatccccatgcatatggattccatttccgccaagctgatggaaatgggcgtctacgtagaggaaggggaagacagcatccgcgtgagcatgcagaagcgcccgcgccattgtgctgtgcgtacccatccgtatcccggctttccaacggaccttcagcagccgctgagcgcgcttttgtgcattgcagagggtaccagtacggtagaggaaaatatttttgaggacagattcaaacaccttaaccagctacagcgtatgggcgcagatgtgagcgtttcggggcggacggcgattttccagggcgtggaagcgctcagcggggcggatgtcgtggccagcgatttgcgtgcgggtgcctgtctggtcatcgcagggctgatggccggcggcgaaacgcgtatcaccgggttgaagcatatcgatagaggctacgatcatttggaggataagctgcgttgtttaggcgcagagatcagacgtgtggatctttaaatagagatgaggggaggcggcagcctcctttttttatttgtttctctccgaaaaaatgatacaatatatccttaggaaaaaaggagggagccatgaaactggcgatacagccgctgttttccggctcgtctggcaacagcatcctggtagagagcgagtctaccacggttttggtggatgcgggcatgtcggcggcggctatcacaaaagcattaaagctgcacggcaaaaccccggcggatatagatggcattttactaacgcatgagcatacggaccatgtcagcggggtaaaccagctctgcaagcgttatggcttggcgctatacgccaacgccaagacctaccagggcatggaggcaaagatgcatgatgtgcccattgggcaggcccgggtgttcactacgggcgaagacttttatgtgggcgatattgctgtgcatgcctttcccattccacatgacgccgcagagcctgtggggtatgctttgtatgcagcgggggccaaggtatgcgtggccacggacatggggcatctgcccaaacgggttttgacagagctggaaggagcgggagccatcgtgctggaaagcaaccatgacattggattgcttcaggcggggaaatatccgcagtttttgaaaaaaaggatactttccagcaaagggcatctgtccaacgacgcggcagggaaagcagctgtagcgctggctaaattaggaacaaggcagatcattctggggcacctgtctgcggaaaacaaccgggaaagcatggcccggcaggctgtctgcgagcagctctcgggccagggagcggtgcttggccgtgacgtctgcgtgcatgttgccagaagggccgaaggatctgccagaatcgtgctggagtaaaggggcgttgccaaatgcgcatacgcattttatgcgtaggaaaactcaaggaaaaggccttaggtacgctttgcgaggagtataaaaaacgactggggcgttttgcgaaaatcgaaatcgtagaggtagccgatgaaccggcccccgaatcgttgagccttgcactacaggaaaaggtcaaaaaagcagaaggaaaacggctgctgcaaaagagcaggcccggcatgcgcattgcgctttgcctggaaggaaagcagcccgattccgtacagctggccaagcacatacaagccctggaggaccgtggcgtggggtgtgttcaattttacattggggggtcgctagggctaagcgatgaggttgtgcaaagttgtgaggaaacgctttccctgtccaacttgacatttccgcacaacctagccaggcttttgcttttggagcagatctatcgatgttataagatcaaccgaggcgaaacctaccataaatagcggcgtatgcccaaggcagcggcggcatatcctgtcttaggaaagaaaacaaggaggataggagcatgctgaatgtgctttgggtatttttgttggccgggggcctggtttacggtgcgtttaccggccagccgcagctggctacgcaggcggccatggacggggcaacggaggcggtatcgctggtcatctcccttttgggcatcactatgctgtatatggggctgatggagattgccacccaaagcggactggccaaaaaggtgtccagtgttgtggctgtgctcatcaagccgctgtttccgggcctgaaaaagcaggagcccgccatgcaggcaatttgcatgaacctatccgccaacgccctgggcatgggcaatgcggcgacgccgttgggcctggcagccatggaagagctacaaaagaaaaataaggataaaaaacgagccaccaacgagatggtggcgttaatcgtgctcaatgcttccagcgtgcagctggttcccacctccatcatcgccctgcgagcagcggcgggcagtgcagacccagccggcattactggggtcatgctgttggcaacgttggccactacactggtgggcgccgtgctctgccgggtccttagcaaatgatggcggtgctatccaactatgcggtctgggtgtttatgctgggcattgtcctgtacggcatggcaaagaaggtggactgtgtcaatgcctgcatccagggtgcggaaaaaggatttcatgcgtatttgcgcgtgctacccaccatgctctgcatgctcagcgccattgctgtggctaggcagagcgggcttttggatgcgatcacggggctgctggtgccgctggcaaactgtatccatctaccagccgaggtgctgccgctggtcattttgcggcctttttccggcggtggggctttggccctgctggccgagttgttaaccacctacgggccggatggtgccattggccgcgccgcttgtatgatcatggggtccagcgagaccctgttttactgtgctacgctctactttggatcggtgggggttaccaaatggcgccataccattcccgtttctctgtgctgcagcttggtcggcgtagtcatagcagcgatttttgcataaatgatgggttatattggcaaaggcttgtggtataattaaataatagatgaattatatacttttctatattcaatcgtgatttaggggtagaggttttatgaaaatagaagtatttgcatcgcaaacacatgtaacggaaaaggacatccgagggaaggattgtgtggtcatcgatacgctgcgcgcaacaagcaccatcatcacagcgctggccaacggctgcgaacaggtgatcccggtcgaggaagtaggacaagctaccaggctgcgcgcttcggtcggcggggatacgatggccgttttgggcggtgaacgcggcggacaaaagattcctggttttgatttaggcaattctccgctggaatacggcccagagcatatctatgggaaaacgctgattctaacgaccaccaacggtacgcttgccatcggcaaagcggaaacggcaagccgcacctatatcggcgccatgatcaacgcgacttccattgcgctggcgctgctcaaaaccgaaacggatgttgtcatcctatgcgctggtatggaaggaaagtttgctgtagaagatgcgctgacggccggatatatcatccactgcctaagggagcaaagccccggaattcccatcgaaacgggggatcttggctacgtctgcgaggttttgtacgaaaccagccaggacgatctgctgactgccgtgcagaacggcagggggtttgagcagcttcatgccctcggtatggagcaggacgttgcgtattgcatgcagcgcgataccgtaccggccttgccgctggtgcaggataatcgcatcattttagttagacaataagggatagaagagagcaacaggaggcattgcaaacgatgagcgagaaagggaaattttacattacaacgccgatctattatccatcggacaatctgcatattgggcatagctattgtacagtggccgcagatgcgatggcgcgctttaagcgcttgactggctatgacgtaatgtttttgacaggtacggacgagcatggccaaaagattcagcgcaaagccgaggaggcggggcagtctcccaaggcatttgtggatgggattgtagcaaacatccaaaagctgtggacgctgatggatattcaatatgatgattttatccggactacggaagagcgccatgaaaaaaccgtacaaaagattttccaaaagctctatgaccagggcgatatttacaaaagcgaatacgagggatggtactgctcgccctgcgaatcgttttggacggagcatcagctggtagatggcaaatgcccggactgcgggcggccggtagaaaaggtaaaggaagagagctacttctttaagctcagcaagtatgccgattggctgatcgactatatcaatacgcatccggactttatccagcctgtttcccgccgcaatgaaatgctgaacaatttcctgctgcccggtctggaggacttgtccgtatcccgtaccagctttgattggggcattcccgtaccgtttgatgaaaagcacgtcatctatgtatggccggatgcgctatccaattatatctctgcgctgggctatttgtccgaagacgataccaaattccaaaaatactggccggcagatgtgcatctggtcggcaaagagatcattcgcttccataccatcatttggcccattatgctgaaagcgctgggcttaccgctgcccaaaaaggtatttggccatggttggctggtgctggatggcgggaaaatgagcaaatctaagggcaacgtggtagaccctgttgtgctctgcgataaatatggcgtggatgctgtgcgctatttccttctgcgcgatttcccctttggaacggacggcacctattccgaggatctgctaatcaaccgtatcaatgcggatctggccaacgaccttggcaatctgctgagccgtacggtatccatgattggcaaatactttgatggcgttgtgccgcagccgggggcaaaggaagaggtggatgagaccgttctatctttggctgccgcgctgcctgccaaaatggaagcgcagatggacaatctggcatatagcgaggcactttccagcgttttcgagctcatcggcgcctgcaataagtacattgacctgaccatgccttggaagctcattaaaaatgaagcagaccatcctcggttggccacggtgatgtacaatttggcagaatgcctgcgtatctgcgccattgcgctttcgccgtttatgacgcgggtggcgcctaagatgtttgcacagcttggcgtagaggatcctgcacttaaaacctgggattccatcctgtcgtttggcggattaaagccgggcacaaaggtgcaaaaaggcgatgcgctgttcccccgtattgtagaggataaacaggaaaagcaagcgccgaaaccgcagaaaaaacaaaaaacagaggaaaagcaggcccccaaacaggagagccccaagaccattacgtacgaccagtttatggaaatagagctgcgtaccgccaaggtgttgtcttgcgagcctgttcagggtgcggataagctgctgctgttcaagctggacgacggcacaggcaaggagcgcaccattgtatccggtattcgcaaatggtacggagacggcgcttcgctggtcggtaagacggtgattatcgtggcaaacctaaagcccgccaagatccgcggcattgtcagcgacggcatgatcctgtccgctgctgacgatgaagataaaacgctatccgtctctacgattctgtccgatgctggcttgccggctggggtaagggtacggtaatcatgcaggtgtttgatacccatgcgcatctgttgagcgatgcgtttgacgacgatagagagcaagtaatcgcccgcatacaagctgcgggcgtctgcctctgtatggaggcgggtaccaccttggaggacagcgcccaggccgtagcgcaggcagagcaatatggttttttatacgcggcagcaggcgttcatcctcatgaggcggaggatgcgcctgcggatgtgctggagcggcttgcagtgttgctgcgccatccaaaatgtaaggctttgggtgaaattgggctggattaccactatgatttttcaccgagagatgtccaaaagcgtctttttgccgagcagttggatcttgcaattcagctggataagcctgtcatcatccatgatagggaggcccaccaggatacgctgtcgttgctcagccagcgaaagggtagagtcaagggcattctgcactgctattccggatcgctggaggatgccaaaaagtatttggatatgggcttctatctttcctttgcaggcccgcttaccttcaaaaatgcacataaactgcagcaagtggccgcctatgtgccgatggatcgtgtgctttgcgaaacggatagcccctatttgacgcctgtgcccaagcgcggccagcgcaacgatccttccaatgtagcgcttgtcatccgccagctggcacagtgcaaagggatagagccggaggaggcggcccggcacaccatggaaaatggaaaagcagtctttgcaattgaggaatgatggatatggatacctatgtgtacgaatatggcagcggcttgtatgtcaatctaacgaaccgctgcaacaataactgtgcattttgcctgcgccataccaaccagggtgtagggcgccaccgcctttggctggagcatgagcctaccgcagaacaggtgattgaaaaaacgcaaaatctgtctgcgtatgaggaggtcgtgttctgtggctttggagagcctactttggcttgggaaacgctaaaacaggtggccgcttatgtaaagcggcaggggaagccggtacgcgtaaataccaatgggttggggaacctagccaacgggcgggatattacgccggaggcaaaggggttggtggataccttttccatctctctcaacgcctctacgcccgaagcgtaccaggagatttgccatagccaatacggccagcaagctctgcctgctttgctggagtttgccaagctggcgtcccgctatgtgccgcatgtcgtgtttaccgtggtggattccataggccaggaagagattgaaaaatcccgcaaattggcacagaactgcggcgccaagctgcgggtaagggcttatgtggaaaattgggaggaaagcgccgattgacggaacagccgcttcggcgttatcatacatacggcaactttttagagcataggaggcaattgggatggaaaagggatatctcgcaattccggcagaccggattataccggaagagcataagcatgttagcaagaataccggcaatgtgacgtatgagcaatatctggtaacggatgaggataccggcatgcttgtcaaatacattcggtatccgaaaggaacggtcacgcccatccatgatcatcactgcgcccatggcatgtatgtattgaagggcatgctgcataccgataaaggcgattttgggccgggcagcttcatctggtttgaagagggcaatgtgatgacgcacggcgccacccaggatgaggatgtggattgtctatttattacaaataaggcgtttgatatccattattttgatttggataaaaaatgagcgaaaaaaaggacgcaaacgcgtccttttttatttgtcgtttacagccctgtacgctcggccagcagcgtttgcaaaaaatccgtgcgctctggagaagacaagggggcaaaccggcaaggaatatccaaatgcatccaaagatcctctgccttgtcatatgggcgccagtcgggctggcccggcgcagtaggctgcccatctttggcaaaggtgcgccagaaagacatcatggtctggcttaaggcatggtcatctggcgtaaaggggcgtgctatcgcagctaggttaccgaaatggtaagggatctcactggcatggtaggccccgtagaagtcgcagtcgattcctggcacttggcgggaaaataaataggtgtacacagggctagcgttacagcggcgcaaaacctgcgtatagaatcgcatattggccagcgtattttccgaacggaagcgggctaaggccgctgccggatcgcgctccgcctcagcaccgtacatgttccacaacgtatcgatatggcggggatacttgcgggcaaaggtggcttcaatggaggcgcgagtcacttgatgccggtcgccgatgagcacagttgcttcgttggccgtacagcctaacagcaccggcacatcatacacatgcccggccaaaaaagcctgctctaaaggctccggaagcaaatctccgtctacataaggggagaactccgcagccatatagtccgcctgccgacccagcagagattctgccggcgcggcataggcctgatctagcgtatcaatgccgacggtttttagataatcggccgtgcgctgttccatttctgcccgtgtatgcgcccattcgtcatggttgaagggagaaaagctttggcttatggcacgatgaaaaagccctttggcctgggggcagaccaaaagcgtattcacggcggccgaccctgcagattctccctgtatcgttacgttgtgggggtctccgccaaacgccgcgatattgtcttgcacccagcgaagtgccatcaaaagatcacgcagaccggcgttggtggcggatttgggcagggaagggtgcgcaaaaaaaccaaaaagccctacgcgatagttggccgatactaccacggcaccctcgcgagccattgcttcgccgctatataaggccatagcggcattgcccatggcataggccccgccatagatccaaaataggacgggcagcggctgattgctatgggcggggcgccagatattgagggtcaggcagtcctcgctgaaatgctgcggcggctccagcgtgcgatcctgtgcataggcgggaatggtagtaaagccggtttctgcatattgcataggggcatcgccatatgcatcggcctgccgtgtgccttgccaaggcgctggcggctcgggcggcaaaaaccgcagcggccctatcggaggcttggcataaggaatgcccaaaaacgcatgcacattctcatgcgctcggcccgatacccagccgtattgtgtttgtacgcgcggttgttccatacaatcatctcctaattcaatcagtcgttgagataagggttcaagcggcgctctcgggataaggtggtaacgccttcatggccgggcaaaacggtataatccccctctaaatttgccagtctgcgaagcgaagccatcatggcggccgcgttgccggtaggaaagtccacacggccgcagctgcctgcaaacagcgtatcgcccgaaagcagaagatggtctaccaaatagcatacactgccctgggtatggcctggtgtatggaggacggtaaagtgcatttgcccaacggaaaaggtatcgccgtcctgaaacagcctatccgcttgaaaggatagcggcgcgcccatcagcgcagagagattgagcgcgggctgcgaaagcaaaggctcgtcctcggcgccaaggcccacttcgcatccatatgcctgctttaaagcgggtagggcgcccatgtggtcaaaatgcgcatgggtcagcagaatcatcccgacatgcagaccttcctgctcgataaagtccatcacaggccggccggaaccatctccgtccacgatcacacattgcttggtatcatcgtacacaacatagcagtttgtccctaaactgcccaaagggaattgcttgtattggatcataaagtgtggtttcctttctgttttccattcttttataagaaaaagaccctggaaggatctttttctttgcatagtgattattctatccattcctcttcgttttcaaagcaggcataaatggcacgcaatgctacctcaaaatcatccgactccaccccggcaatgatattgatttcgctgctgccttggtcgatcatgcggacgttgacaccggcctccgcaagcgcggtaaacagcatggcggctatgccgacacggcgtaccatcccgtggcctacggtggcgataagcgccagattgctcactacctcgatacgatctgggctgcaaacttcacgcagacgccgaaccacttcctccttatgcccgttgagctgcttatcggaaatgacgacggacagcgtatcgatgccggtaggcagatgctcaaaggaaatgcccagctcttcaaacacagacagaacccggcggccaaagccaagctcagagttcatcttgtccttttccagatggatgatggtaaagccttttttgccggcgatgccggtgatgcatccatggtcgtcctccggctctgccaaaatcatggtgccggggtgctctggatcgttggtatttttcacattgatgggaattccgcctttttgtaccggaaaaatgctgtcctcatgcaatacggaggcgcccatataggaaagctcccgcaattcgcggtaagagatcttggagatggtacgggggttggggacgatgcggggatccgtcatcaaaaacccagaaacatccgtccagttttcatacagatcggcacccacagcacgggctacgatagcgccggtaatatcgctgccgccgcgggaaaatgtcttgatgcggccacccggcatcacgccgtaaaagccggggatcacgccgcgctcatggcgagccaaaagggcggaaaaacgcagctgtgtcccgttttcatcaaaattgccgttggcgtcaaacaggatgccgccggctgggtcgataaaggggatgtgcaagaggtctgccaggattaggccgttgaggtattcgccacggctggcggcatagtcggcatcggccccttcccaaatggcatggcgcacggattgcagcggcgtgtgaatgtcaaaatgcgtacccaatccatctacgatggattgatagcgcgcctcaatctggctgaaaacgatttcaaacgcgacagtgtcctgtacgacagccgccttttggcaggcatataaaaggtctgtgaccttatcctgaaattccggcgctttgcccggcgcggacggcacgatgtaccgccgttctggattttggcgaacgatggccgctaccttctgcatttgtcctgccgttgccagcgagctaccgccgaattttgcaacaatacaacccatgggtcattctgcctcctgaatgtttcgatttgtgtttgtaagatcctaagacaggacccagatcctgtcaacttaaaataattttatacaatgcgtttggcttccagatagcaacgcttttcgtctgcttcgcccatggaaaatgatttgcgcggcaacgccccgtatcgggataccagggggaacagctcatctttttgcacgaccttgagcagcaaccccatctggtttggccgggcacccagggcaagagtctccttttccccatggatataatctaccgagatttcgggatgcgcctgcatcagcacggaaatcccatcatccgccaaagcggcatccaaacgatccgtttccttccgaaagacaaatacgcccgcttgtgcgccgcacacaaacggcatgcaccgcttgccttccacgggctgatcggcaatgtccgcatccatggcctcggccagctcctgtaccgcttcgcccggcacttgaaataaagcgcggtgaatgggctcaaagagcagggaatcgtcgtggatatttaccaattcacacagcgcaaagcgcgcagggtgggttgcctgctgctccggcgttaaggtttttttgatgttttcccagtgcgccttggccgtggcaaaggaatggttgccatcgcccatggcatacagcattgggtcgccctctcctttgggcagcgcatcgtacagcgcgctcaaggctttctgcacaccgcccattttgctttccggcacaaaataacccgcgatatggcccatgccaaagcccaggtctgcgtcatacactgtttcaaacgaagcgtgggcctctgccaacggttccagaacggtgcgttctggatcgtcgaacaataccatgatatggggcagctccaagctggccttttcacggatggccaggcggggcggaatgcgcgctggaatggtgccctctgtcacccgtaccaaggttttggcatccgattcataggaatagcgctctagatccatggagatgacaaggccggtacgcacccttttgccgtccggcagggtacgctgcgttaagatacagccgcacggcaactcgcggagaatgccgctgtccaaataacgctgcatggtgcggtaggtttcttccacacgcgcctgctgcttttccgtacccaaatatacctcgggcagcaccattttcagcgtggagggctgatcgcccaccgtgcgctccacattttcccagtaggcaggatcgctggtatattggtcgcaggcgatcacacaccaggtatccagcgccctggtattttcaggcagatatatatgagggatcttcagccccaacgtttccaagctatgcggcattacgctcagctcccttgatttttctatatatatcaatataccatgcaacacatttcacgcacaaggaaaaaacgatgatagatagaaaaaactatgttataatgaaaaacaagaaactttgcaggcggactgtgcgctgccaagatgaaggagtgtatctgagcatggactatcgtgcgaacgagaaaaaatggcaaaagaaatgggaggaagcaaaactatttgaatacgacccttccgccccgggcaagaagtggtatgtattggagatgttctcctatccctcggcagccaagctccatgtagggcactggtacaattacggcccggcagatacctatgccagatttaagcgccagcagggatacaaggtatttcatccgatgggctttgatgcgtttgggctgccggcagaaaactatgccatcaaaacaggggtgcatcccaaggattccaccttttccaatatggaaattatggagcagcagctgcgcgccatcggcgcctcgtttgattggacgcatacggtaaagacctgcgtgccggaatattacaaatggacgcagtggctgtttttgcagctgtataaaaagggactggcctaccgcaaggaagcgcctgtcaactggtgcccttcctgcaatacagtgctggccaatgagcaggtgaatgatggcctgtgcgaacggtgtggcacccaggtgacgcgccggaatctaacgcagtggtttttcaagatcacggaatatgctgacgagctgctggaagggctgaaggacctggattggccggaacgcatcaaggccatgcagaccaactggatcggccgctccgaaggcgcggagatcacgtttgacatcgtgggcggcggctcgtttacggtgtttaccacaaggccggataccctatttggcaacacctattgtgtcattgcgccggagcatcctatggtggatgaaatcactacgccagaatgcaaggcggcggtggaggcgtaccgtgaagaggcaaacaaggcttcggatatcgaccgtctgtcctctgtacgggaaaagaccggtgtgttcaccggcgcctatgccatcaaccccatcaacgggcgccaggtgccgatttggattgccgactatgtattgtattcctatggtacagggtgtgtgatggccgtgccggcacacgacgagcgcgattttgtttttgccaccaaatacgatttgccgattattgaggtcattaagcctaaagagggcgaggaacctttgccgtatacagggccgggtgtattgatcaattccgaatcctttgacggcgtggacaatgaaaaggcgaagaaagccatcgtccaagcgctggaaaaaacgcagcatggtgcgctaaaggtgaattaccgcatgcgcgattggctaatttcccgccagcggtattggggcgcgcccatccccatgatccactgcccgcactgcggcgctgtgcctgtgccggaagaggatctgccggtgctgttgccgtatgatgtggactttacgccggatggcacttcgccgctgctcaaacatgagggctttatgaatacgacctgcccggtgtgtggggcgcccgcaaaacgggatgcagataccatggatacctttgtttgctcttcctggtactatctcaggtacccggactgcaatgatgcagagcaggcgtttgataaaaagattgtggacgagatgctgcctgtagacgtatacatcggcggcgcagagcatgcctgcatgcacctgctgtatgcgcgctttttcaccaaggcgctgcgcgatatgggcctgttggattttgatgagcctttcatgcgtctggtcaatcaagggctcattttgggctcggatggtgaaaagatgagcaaatcccgcggcaatgttgtggcgccggatgattatatcgaggtgtatggctcggatgtgttccgcatgtatttggaatttggattcaactacattgaaggtggcgcgtggaacgacgagggcatcaaagccatggcccgtttcctggatcgcgtggatcggctggtgcagcgcatcgtagagcagaaaaagatggcgaaccttgccggccatgtgtttgggcaggagccggcgcgccaggcggacggcacggcagagcaagatctgcgctttgtgctggccaatgccattcagaaggtaacagaggacttggaacgtatgtcctttaacaccgccattgccaggttgatggagctcgtcaataccatgtaccgctatttggatgccaagggagagaaaaatatctccttgctcgcgtatgccgcagaagtactgtctctgctcatggcgccgtttgcaccgcattttgcagaggagctgcatgctgcccttggcggcccgaaggattttgtgatccaggagccttggccgtcttataacaaagaagacctggaaaaagacgtgatggagatcgccgtgcaggtcaatggcaaagtgcgcgcaaggctggaggtgtccaagtctgctgccaaagaagaggtggaaaaggccgcgttggcggatgccaaggtacaggcggccatcggggagcagacggtaagaaaggtcatcgtgattcccggcagactagtcaacatcgtagcaaaaggctaaaaatagcccccgcttgcaaagcgggggctattcttttggcacagattgtggaaattgcgaaaaagttatggataaattgtggatttttattgctgtgtcaactactgggtgctataataatatggtaacacttgtggctttggtgatggggaggcgtgttcatgtacgatatgtatgattatcatttgcattccacccattctggggatggaaaggtaccggacatcgtgcaggccatggcggccattgagcgcggcgtgaaagagatctgttttacggaccatttcgacgtggattttcccaatgcaccaacgatggatttcgaggtggatattcctacctatcacgatgatatacagtttgtacgagaacagttttccgataaactctcggtaaaatggggcatcgaggtgggtatgcagccggatgagcgtatcatggcggagaccaatcggcggctggccggctgggagtttgattatatgatcgcctctgtacactgcaaccctggcaacgattaccaccgcgcttcttcctgggaaggggttaccaagcaggatgtactgaaaacctatatcgccctgctcaaatatggtatcacccatatggatcgatacagctgtatcggacacctgacttattattcccgctatacgccgcaaaaggatcgcatgatgacctatcaggatgcaccggacgaaatcgatgatctattcaaactcatcatccaatccggccacggcatagagatcaacacctcagtatatgatacgctgggcttctttttgccggattatgatattgtccgccgttataaggaattgggcggagagatcatcacgacgggctcggattcccacaatgctgtgcgcattgcggcaaacttccagcccgccatgcagatgattcagcgcgccggctttgactacatctgttcgtttgataagatgaagccggtattccataagttctaactttgtcacccttatcaaatcccgcagcacccaatcttgggctgcggggtttttttattttgcatggcgcttcaggcgtaccatccccttgcttagctctaccaacagcagagggactagagagaacagcagcgtaacgccccactgcgccagggagagcgtagtcagcttgaaaaagctgcggagcggcggtagaaaaacaatggcagccaaaatgacagcagacgctgtcatcgcccagaaaagcgaacggttatgcgtcgaggcgtgaaagaccgattccacattggaacgctgattgagcgaatgaaagagctgggaaatggccaagacacagaacgccatcgtaacccccgccgtataaccggcctggctctgcccgataagatatgcggccatggtgctgcctgcgatgaagagtccgtgaagaatcacgcggcggatcaatccgcgctcaaacagcgtaccggatcttacgggcggttcgtgcatgatattggcgtccgcaggatccacgcctagtgcaatggcgggcaaagaatcggtggccaggttgatcaacaggatgtgaacagccaaaatcggcggttcccaattcaataccgtggcaatgaaaagcaccaggatctctgcgatattgccggccaacagaaattggattaccttttgtatgttgcgatatacacgccttccttcgcggatggcatactcaatggtggtaaagttatcgtccaataggataacgtcggcagcgtccttggccacatccgtaccgctttgccccatggctacgccgatatccgcagcttttagtgcaggagagtcgtttacgccatcccctgtcatggccgccacttcgccgatccgcttgagtgattggatgatgcgcagcttatccgttggagacacacgggcaaacaccgtggtggtttttaccttttcatccaaggctttgtcggacatggcgtgcagctcgttcccctctatcacggtattgccttcacggaaaatcccaagctgcttggcaatggccatcgccgttatcttatgatctccggtgatcataatggtacgaatgccggccctgtggcaggtctccaccgccgtaatgacttctttgcgcggcggatctatcataccacaagcaccgatgaaggtcagatcatactcgatattttcgtcatcatcttctggaacagcctgcatttttttcattgcaaatcccagaacgcgtagagattgcgaagacatgtcatagcataactgcagaatatttttccgctcctgctcggtcataggccgcggcccttccgctgtcagcatttgtgtacagagcggcagcatttcatccacggcgcccttggtataggcatagaaagcgccattctcctcatgaacagtgctcatgcgttttctatcggaatcaaagggttgttcaaatacgcgcggataggccttctcatgtacaagctggtcaataccaaacgcatcggccaaataaatcagcgctccttcggtgggatcgcccaatattttgccaggatggtccgggtccagtgaggcattgttgcaaagcgccgcggcatgtaccaaggggcgataggccggggtaccagaaagagcggcttttgcggcgggaagagccttgtgtacagcaaaatcctccgccacggcaagttgggtcacggtcattttgttttgtgtcagcgttcctgttttatcgcagcaaatgacggaagcgctgcccagggtctccacggctggcagcttgcgcaccagtgcttggcgctttgccatgcgttgtacgcccagcgccatgacaatggtggcggtggccggcagcccttccgggatgatagaaatggccaatgaaacagctgtcatcagcagcggcaccagcgggcgtccatatagcatcccaatgataaagatcagcacacaaacgaccaagccgacaacgctcagcgttttgccgacggagttcagctttctcttgagcggggtatccgtttcatcctgcgtatccaaagcgccggcgatctgccctacttctgtatgcatcccggtctccacgacgaccccggtgccgttgccgtacataacaatggaagaggtatacgccatattgagtcgatcgcctaaaggagcatctatagatgttaagatttcagcgtctttttccacgggaacggattcgcctgttaatgaagcctcttggatcttcagattggatgagtctatcagccgcatatcggcgggaacaatactgccgtcctccaaatatacgatgtctccaggtacgagttcactggctgggacaatgctttcttccccgttgcgcagcacacgtgcctgcggagaactgagactgcgcaaggcagccaaggcatcggaggcttttttttcctgtacgacgccaatgatagcattgacaatgacgatcgttagaatcacaatggcttcaatccattcattgagaagcccggacagcagtgcggctcccaaaaggattagtaccatcacatcggtaagttgctcaaaaaacatctttcctacgcttttggggggagattgccgcaattcgttttttccatactctttgagtcttttggctgcctcggcatcgcttagcccgtcttcagaagtttgatagtcgcggtacacttcttctaacggcatggaatgccaaggctgttgtttgtgattttccatatctggaaaagatcactcctattacaataaatttggacaggaaagccggacagccagtccggctttccc

SEQ ID NO: 1442 - DNA, 10714 bp, Unknown
  16S sequences of unknown bacteria
taacagaaaggcgcttgcaagggtttcggccactcccggaaagacgataacgataaacttttataaaattgacgacggccgccttgtggaccttccgggatacggatacgccaagcgttccaaggccgagaccgcccgtttttccgagctttgcgagggctatttttcagaggagagaaacgtggctttggtggttcagcttatagatatgcgccacccggcctcgcaggacgacatgaacatgataagctttctttgcgactacggttttccctttgtgcttgtgctgacaaagtcggacaagcttaacaaaaccgaaacggccgcgagacttgcggatttcgaaaaacagttttccgaatatgaaaatctgaccatgattccgttttcttcaaagaacggacatggtgcggatgagatcaaaagggttataagcgaatgtgtcgccgattgcggcgccgacgcttgattttccgctttttgcggacataaagggaggatttaaaaatgtttgttacaagctgtctcggttccaacgacaagggacacctgacaatcgggggagtcgacgccgtcgatctcgcgaataagtacggtacgcctctttacgttatggatgagcgcaccataagagggcattgccgcacatttcaacagtcaattgacgataattacggcggcaaaggtcttgcggtatatgcgagcaaggccttcaactgcaaggaaatgtgccgtataatcaaagacgagggcctcggtatcgacgtggtttcgggcggcgagctttacaccgcgctttcggtggattttcctcccgaaaaaatcgttttccacggaaacaataaaaccgaggaagaaatcaagcttgctttggaaagcggcgtgggacggatcgttgtcgacaatctgaccgagcttcgcaccattgaaaaaatggcggccgagcttaacaaaaatcccggagtcatgataagaataaagcccggtatcgacgctcacacccacaattttatccgaaccggccaaatcgacagcaaattcggatttgctcttgaaaccggcgaggcctttgaggcgataaaggaagtcctcgagcagaaaaatgtcacccttaagggcgttcattgtcacatcggctctcagattttcgaaattgaccccttcaaggcggcggccgaggttatgcttggatttatggcaaaggtcaagaaggaactttcctatgaaatcaaggagctgaatttgggcggcggtttcggtatacgctaccttatcgacgatgacgccaagctttataaaacctttatggagcaggtgtcggttaccgttaaggaaacctgcaagcgcctcggtctgaacattccttttatcatgatcgaacccggccgttcgattgtcggccctgcgggaacgactctttacaccgtgggagcggtcaaaaccattcccggcataagaaattatgtttcggtggacggcggaatgaccgacaatccccgttacattctttatcagtccgaatattcaatcgccgtggcgaataaaatcgacaagccgtcggattacattgcgacaattgcaggacgctgctgcgaaagcggcgaccttgttcaggaggacgcaaaaattcagactcccgaaccgggcgatattttggcggttttctgcacaggcgcatacaactattcaatggcttccaactataaccgtgtgccgagacctcccgtcgttatgataaaggacggcgagtcaagggtaataatcaagggcgaaagctatgaagaccttgtgaaaaacgacttataattataaaagtccctctttggtttgcaaagagggacttctttttttacaatgtcttttcgattataccgaccataaccgttatgtcgtcgccgtgctttccgtccgagcggcgtttggcataatcggcaagatgttctgcaagatcctgtgccgaaccgtccttccaaacctcggcttcaacgcctatccaatcgtatccgctgtctgctgcaccgtcggtcatcattatgataatatctcccgacgaaagctttaagtccgattttgcaaaatcaacgttttttaaaatgccggcgggaattgtttcgctttcgatatttacggctttgccaagtctccttataaccgttgcgggagcgcctgccttgaaaaaacgcccttgacccgaaaacaggtcgaactgcgttatgtcgagggtggcgagcgattcgtcggtggatttgaacagcatggccgagttaactattttaagcgagcagtctatgccgaacccggctttgagcagcttgctcatcaaatttgacgccattgcgccgtcaaccgccgctcggccgccgcagcccattccgtcgcttatcagcatataaaaatgccccttgccgtcaaaaaatgtgtttattgcgtctccgctgaataagctgtcgttgcagttgatttggcatattcccaaatcaacggtgtattccgccttttcgcagagcgttataaaggttgagctttcaagctcggtgatgttgggacgttcaaatgtcctttcgcagattttttcgatttcctttaaaaccgacgaaggggatatgcgccgctcgtttgagggctctgccttgatctccaccgttattcggtcgtatatatcttttctgcagcaaacctcctcggcctttatgccgagctttaacagcgccgagcttataagcgcagccgttttcggcagataactgtcggaatttttgaattcctccgaaagaccgcacagcatttttgaaagtcctccgaactgttcggatataaccgaacgcacctcgcaaagccgccgctcggccgccgaacgggaaagaaaatccgaaaagttttccgaaagacagttaagcagcgtgccgcacctcgggcattttgtgcggaaatcttcggacaaatcatcggtcgataaggctccttttgttttaagagtttttaccgccgaaaggagaacttcaagtgtgctgccgcgactttcttcccagcaatgcacccgaagtccgcagcctttacagcagccgctttcggttttgtcaaagacctgttcaaagctcggagcggttattgccgaaagcttgtccgcaacggtgtttacggtttcgctcacctcttcaagagcttccgacgcaaacttcagcctcattacggccgattcttcggcgccgcttttgttttgtatttcggcggagggcttaataaattttagaaattccgaatacaggctttttggggtcacgaaaaacagcacgcttccgataagaacctcgtaaagaacggtaagggaagcggtgtcggtaatgtcccgcagaaatataattccgtttgctgtcacaaaggcaacacagcaggaaatcttagaaagccgtccgaaaattcccgacatgagaccgccgaaggcaaaacccagcgcggaatatgtttcgctttgatttacaaggcaaagagaaagcccgaaggtcaatccgaatatggcgcctgccgcctcgtggccgtaataggcagcgaatattatgagagcaatcgccgcggcacgcacgggggagatgccgaagacggtaaaccgcgtaagggatattacggttatcgaaagggcaattatcgccgaagtcattttaaagggtgtgacggcggtatgttctctgttcagcgcaagctcggctccagatatgaggaaaaaggtgcttcccgccgacagaacgccttcagatagatgaacaaatatttgcaaaaaggcctgtccgcctaaaaataccgttgcaaatcctgttgcacaaaaggacaccagcggaattaaagagcagaatatcgttttgttttttggcttaaaaagctcggtgaaaatccattttagcgcgaccgacaaaataagggtcgtaatatatctcaccccggaagctcccgttgccgttatcgctccggtgattcctcccaaaagggatacaagggaatattcgcccgggagagcgcaggcaaaagcggctccgaagggaaagtattccgaaaaaaccgccgtcgaggacatacagaaggaaagaattccgcatccgagctgtgtaataacggtgcgtgcaactgtgctgccctgcttttcggaaaaaatacctgtcgaagagatgttagccaaaaaaatcaccccaaaatatcttttgtcacatccgaattataatttcggcggtaaaaatattatgtcgcagcggcagaggacttaaataaaacaatttgtccgaaaaaagaataaaacggaaaacaaggttaaagatattaaaaatatgaccgaacgggggaagaaaaatgcagtatgtatggtcttttgttatcggaggtattatttgcgtaataggacagctgcttattgattttaccaaactgactcctgcgagaattcttgtggcatatgttgtgtcgggcgttgctctcacggcagtcggcgtttatgaacctcttgtgaaatttgcgggtgccggagcgaccacgcccttaaccgggttcggatatgccatagccagcggtgtgaaaaaagcggtggacgagcagggcactttggggattttgacgggcggactgacagccacggcggcaggcataacggcggcggttattttcggtataattgcggcattctttttccgcccgaaaataaaaaaagcgtaaaaaataaaggttttgggagaatttttgcgaataaatataatgaaagaaaaagagagggtgaaaagtatgtccgaaaacttgagagaacgttgggaaaaggccgaggatcttttgctttgcgaaaatgcgagaaaaagctcgatgtccaagggacgtgtttcctttgaaccgcccgacccggtcagaacctgttttcaaagagaccgtgaccgtattatccattgtaatgccttccgccgtcttaaatataagacccaggtgtttctcgatcccgagcgtgaccactaccgaacgagacttactcacacccttgaggtttcgcagattgcacggacgatttcacgcgccttgcggcttaacgaggatttgaccgaggcgattgccattggccatgatctcggtcacactcccttcggacacgctggggaaagggcgcttaacgaaatttgccccctgggatttcgccacagcgaacagagcgtccgcgtcgtggaacgccttgagaagaacggccgaggactcaatctgacctttgaggttcgggacggaatacttaaacacacgaacggcgtggccgagaccctcgaggggagagtggttcgtcttgccgaccgaatcgcatacataaatcacgacatcgacgacgcggttcgcgcggatgttttaaaggaaagcgacattcctcgggatattatctccgctctcggagaccgccgcagcgcaaggataaacacccttgtcggagcggttatttcgggcagcgagggcacgggagacataagcgtcgacagttcggtttcaaagcagtttgacgatctgcacgaatttatgtttgagcgggtctaccgaaatcccgttgccaaaagccaggagggaaaggcagcctttcttgttaaaaccctttataattattttcttgaccacaccgatatgctgagctcggaatgcaagctcatacttgaaaaagagggcgtcgagcgggcggtctgcgattatattgcgggaatgaccgacagatatgcaattcgtgtgtatgaggatctgtttataccctattcatggaaatgaggcgattttatggcgtttaatgaggattttctccttgagcttaaggagcgaaatccgattgaggatgttgtttcgtcatatataaacataaaaaagggcgggcgcaatcccaagggactttgcccctttcacaacgaaaaaacgccctccttcacgctttatcccgaaaacggctcattttattgtttcggctgcggaacgggcggggacgttatacggttcattcggcttatcgaaaatctcgactatgtcgacgccgtgaaatttcttgcccagcgtgccggaatgaccgttcccattgacagcgccgacgacggagtccacaggcttaaaaacaaaatctattccataaatcgcgaaacggcgaaatttttcaatacgaccctctttttgccggcgggcaaggcgggatatgattatttcaaaagccgaggcctttcggacagggacatgaagcatttcgggctcggattttcaccggattcgtggaacggacttcgcgatcaccttaaatccaagggctttacatatgaagaaatgacggcggcaaacgttgtgtcaaaaagcggaagaaacaacagcttttacgaccgattccgcaacagaatcatgtttcccataatagatgttcggggaaatgtgattgctttcggcggaagaaagctgcccaaaagcgacggagccaaatatataaatacctccgatacccctgtctataaaaaaagccacaatgtctatgcgctgaattttgcgaaaaattcctgcgaggaaagacttgtgctttgcgaggggtatatggatgttattgcgctgcaaaaggcgggaattttcaattcggtagctcctctcggaacggccttcaccgaggaacaggcgcagctcctttcgcggtatacaaaggagatattgctttgctttgactcggacgacgcgggtcaaaaggcgatagagcgggcaatagggattctttcaaaagcatcctgcgccgtaaaaattatcgttattccgaagggaaaggaccccgacgaatttatgaagctttacccgagcgacggaacggcaaagtttaaggagcttatgaacaatgctctaagcgttgtggaataccgaatcgagcgtgcgcttgaaaaggtcgacgtgacgaacgacgcggggaaaatcagatttttggaaaccgcggcgcgtattctttcggatgttacatctcccgttgagcgggaggtttacgccggacggctttcggacaaatattcggtctccaaggactcgattctcaaaatgtccgagaatttcggtaaaaaggaataccgcaaaaagataaagcaacaaaccggcaaaatcattcgtccgaaaaccgaggacacggtaaacagggacaagcctaagaacctccgtgcggccaatgccgaggaagggatgctttcggttttgctcagaaatcccgactatattttgcgggtggcgtcaaaggttaccgaggacgattttgtgaccgaatttaatcggaaaatcttttcggttctgctaagccgcgccaagagcgggcgctcggtggacattacggcgcttaattccgattttacctcggaagaaatcggccgtattgccgaaatttcctccaagggagccatgagggcgaacacccttgaggaatgtgccgattgctattatataatgaggcaggaaaagttaaatcaaagcgcaaaaaaagagggctttgacaatgacgacgatttttttgccgcaatggacagaataaaaaaacaaaaagttaagggagttaaagaagatggcaactaaaaagaaagaaaccgaagaaattaaggacatcgagcagaatcagtccgacaagaaaacggttaaaaagaccgctaagtccaaaaagaccgacgccgatgtgaaaaagaattcaaaagaggacgagcttgaccttttcgacgatctgcttgacgggcaaccggccgcaaatcagcccgagcaggaggagcccgaggaagaagatatcttgaaaaatatcgacgagcttgacgacagcgccatggcggaaaatcccgatgccgaggttcctcttctcgatctcgattttctcgagcccacagccgaggagcttgaggtcgaggaaattcccgaggacaccattgaggacgaaataattaccgataatgtcgctctcgacgacccggtcaagctttatcttaaggaaatcggccgtgttccgctgctttccgcggaggaggaaatcgagcttgcaatcaagataaacgaaggagacgaaagggcgaaaaaacgtctgaccgaagccaatctgcgccttgtcgtcagcattgcaaaaagatatgtgggaaggggaatgcatttccttgacctcattcaggagggcaacgtaggtcttataaaggcggtggagaaattcgattataccaagggatttaaattttccacctatgccacctggtggataagacaggccataacaagagccattgccgaccaggcccgcaccattcgcatacccgttcacatggtggaaaccatcaaccgactcaaaaaggctcacagccgtttgcttcatgaaaacggatatgaccccagcgaggagcagattgccgaatatatgggcctttcggtggaaagggtcagagaaataatgcgcgtcgcacaggagcccgtttccatggaaacccccatcggccccgaggaggacagccgtcttgtggactttatccgcgatgaggacgctcccgcacccgacgacgcagctttaaaatccataacaaacgaggatattgacgccgtgcttcacacactcgctccgagagaggaagaggtcgtgcgtcttcgtttcggacttcgcgacggccgctgccacacccttgaggaggtaggaagtcagtttaacgttacccgcgaacgaatccgtcagatcgaggccaaggcgctgagaaagctccgccaccccgttcgcagcaacaaatttaaggaaagataaagaacttttaaacgttatactatattttttaaagggtgaattttgtgaaaaatcagttggtattagttttggacttcggcggtcagtataaggagcttattgcccgcagagtcagagaatgcggagtatactcctttataaagccgggcgatacccccattgaagaaatcaaaagcatgaatcccatcggaatcattctgacgggcggtccctccagcgtttatgacgacgcctctcccaaatgctccgatgagcttttcagactcggaataccagtgctcggaatttgctacggttttcagctcatgacctacctctgcggaggcaccgtggaaagctgtaccgtcagcgaatacggcaccaccgatatggaaatgacggcaaaatcgccggttttcgaaggtcttgagggaacacagcccgttctcatgagtcataccgattatctgagcatgctgccggaaggatttgtcaatctcggcaaaaccgccgactgccccaatgccgccgtggagaatgccgaaagaaagctttacggttttcagtttcatcccgaggtggttaacaccaagaacggaacgaaaatgataagaaatttcctctataatgtttgcggtgctttgggcgactattccatggacgattatatcaaaacccaaattgccgccgtcagagagcaggtcggcgaccaaaaggttgtgctcggtctttcgggcggagtggattcttcggtttgcgccgcgctgctttcaaaggcaattcccggacagctcacctgcatatttgtcgaccacggatttatgcgtaaaaacgagggcgacgaaatcgaggaaatattcacaaaacgcgatcttaattttatcagagtcgacgcatctgaaaaattccttggcgagcttaagggtgtttgggagcctgaacagaagagaaaaataatcggacgtctttttgtcgaaacctttaacgaggaggcggcaaagatcggcggagcggcatttcttgctcagggaaccatttatcccgatgttatcgaatcgggtaacagcaaggcggcgaccataaagagccaccacaatgtgggcggacttcccgaggacataggctttaagggcattgtcgaaccccttcgcggtctttttaaggacgaggtaagagaggtcggaagaaagcttaatctgcccgattttcttgtcgaccgtcagcccttcccgggtcctggtcttgccattcgcgttatcggtgatctgacgagagaaaaactcgacattctccgtgacgcggatgcgattgtccgtgaggaaataggaaattccggcagcgaggccagccaatattttgccgtgttgacgaacagccgctcggtgggagttatgggagacggaagaacatacgattataccgttgccgtccgcgcggttgtgacgggagatttcatgacggccgaatatgcaaggctgccccacgagctcctttcgaaaatttccagacgcatcacaaacgaggtcgacggaatcaaccgtgtggtttacgacattaccgataagccccccgccaccatagaatgggaataatttacagaagtcgtaaaagtggcttaaacactgggttttaggctctcaaattcccgatttgatagcaaaatgatagcaaaccgtaaaacgccattattctaagtgttctatcggtttgcaggtacaattatcttaatactataaaaggcattactgacttttgcagtcggtaatgccttttttgcgttttctattatattccgttttacttacgagaattaaaagcgacgctttcaggatagttatatctccagttatcatattcctcttttgtgatttctccgtttttgaacttttccgcttgttcctgccaagcggaaaacatatcaaacattgtaagatagtttgttcccatacccttatcaaggcgtatgcaaagctcgtcatcaag

SEQ ID NO: 1443 - DNA, 29368 bp, Unknown
  16S sequences of unknown bacteria
ggcctgtttcttttgcatttggagctgtcttatttgttgttaatgcgacagccccttttcgtgtaatgtaaagggagttattatgtgtaaagtgatgtaaatggatctatattattctatgccagcgtctgtcccaggttccggcaagcggtcttcgcttcgtcgtccggttcctcgttggccatcacgctgtcgcaggccagaatcgcaccggcattcccagcgctctcttcccaggtgcgcatccattcgccgtcgccccatccataggaaccgaacagcgcaatcttcacgccactgaggctgccttcgcactcattccacatcggctcgaattccgcttcttccagcacttccgcacccattgccgggcagccaaaggcgatggcatcataggcactgattttggaagaatcgaaatccgacggagtcagcacgtccgcttccgcaccggcagcctttgcgccggcagcgacttcctgtgccatgatttctgtattaccggttccgctccagtatactactgcgattttgctcattttttctacctcttttctttgtaaaaataaactacatatatgttaagcagctaccgtgagctgcaaaacacttcggccttgctcccagagacggagatacacgtctcggcattttcgaaactgggcaaacttcttgcggcaggcgcattcatcgcagtacaccttccagcagccgacgcatttgaaattacgaccgctgttggcgatgaatccccgaacatctcccagggggtaatcgaggaaaatcccgatttcgtggggaaaatcacggttcgctgaaatgcggtcccgaagtcgggccagtgcggcggaaaggtgaatatcgtcatatccgtaggaatgaaggaactccgccacttccgggctgttcagccgggacgccagctgtttttctcggtatacgtatatcaacgcacgatttccctgaaagcgcaggaggaacagccggacacccttgattttcagttgaatattccagaatcgaatctggtcttccgcatcctctttactgagaaaggtgatgttgaagaggctggcagccttaatggatgccagtgtagaggaacagaattcaatcaagcagcgttccagcatgtaaacctccttgcagcaagttaatgtgtagtatgaacatccgtaaatgggattgatggttagatgactgttacgaaagttaaagaactctaaccacaatgaaataatacaagagggcgattgcaatgtcaagaaaaatataaaaaaagattgcaccccggccgggatgcaatccgatgcttcgcgatattttatttttaccttacagataatcggcaatcacctgcggcactttctccggttccttggccttcagaatttccttttgctcttcccactcctctttgagaatcgcccgcatctgcaggtcgaagtagtcatttccctggcgacccgcattcttcataatgccctccttccggaaaccgatgctgtcgtaaaggtgctcgctcaccatgtcgtccaggaagtgatcgatggccactcggtgcagattcatctcggaaaaagcgtactccagcaccgcacgggtggattcgctgccgtagcccttgccccggtagcaagcgtctccgatgtagatgatcttcaaattcatggagttgttaatcgggtcgatatcgttgatgccgattcgaccgatgggtttgcgattttccttcagcatgatggtgagccatttccgagaaggatcgtgcgtcacgtcgtggaaatcgtccgtcagggtatccagatttcgcttgtggtccaggcagaaatgctcaataacatcgtcccgggattcccattcggcgaaagtatccaggtctgcaaaagatgcgtttcgtacaattaggtgctcagtttcaaccattgcctcgtaatctccttctccataaaaacagtttgcgccgcgccggacgtctccgggggtgcgaattttctttttaccgtatacgaattatagcaaaaaattatacggaattccacaccgtggaaagagttttataccgtacaacccttgaaaatgaaagggtatgagtgtaaaattactaagttaatatttttttggggagaaaaaatgaaagcaaagttacagagattttttgaaatttccggatttgaagggaagggaaaggtccttctcgtccggaagattattttgacactgattatcatctgcggaatgggaatggtgctcatgaatgccggcacctttaaccgcaactacgtgctggagcggctggagacccattcctacgagccggtgcagattgccggcgaccgggaggtcacgcagaccttcgtggctcagaaggcccatctttggaaggccggggtgcggctgtacaccttggacaaaaccgttctgaagggaaaggtgaaggcggaaattcggaacaaggacggcaaggtgctgtctgccatagaggtgccgtgcaacgaaattcacctgaccaagtacgatgattttacggaattcgaattcaacacggatttgaaaaaaggacaggaatacgtgctggcggtgcgcaccgagggcagcccgaaatcggacaacctgggcgtctacatgggcaagatggccgatgaacagaaggactacctgaagggcagcaccgtttacggcaaaaaaacatccggtcaggatttccgcgtccggtgggtctatcagttcctgccggtagtgagcgtggcatttatgattatcatgctcctgatgtccttgattttcacatggctgccgatggactggattgatgcgcggtggaagcggaagaaattcttcccgcaagccggcctgaaccgaatcttcggatggctgttcatggcggcgacgccgttcttctgccacatcatcatgatgcggtactacgacatgggactgggtgccatcatccatcaggcgacccgggtgccgctggtagttctgctgaacctgctgatttacatcctggtggcgtggattttctacgtgattaccaaccggaccaccgtggcagcgtctctgaccgtgctggtggcatcggtctgcgcgctgggaaactactacgtgttcaagttccggggaaccccgattatgttccaggacatctattccctgggcacagcgacggaggtggcggggaactattcctttgaactggatttgcggattatctattccctgatattcaccatcgtcttcgtgaccgcagcgctgagcctgcgcatggagaagggttttccttggaagaagcgtctggtgggcctgctggcctgcgccgtggcattgggcgggttctatcacaccctgttcaacaccgacttcctgaagaaccacgatatccaggtcaagacctggcatccgcagggatattataagcggagaggcaccgccctgtcctttatcatcacctggacctacaacaccatcgagaaaccggaaggatattccgtgagtgcggtggagaaagttgcggcaaagtatccgtcggatccggagaaaaagaacacaatcgggaagaagtctccgaacgtgctggtggtgatgaatgaatccttggcagatttgaacgtggacggtaagattaaaacctcttcggattacatgccgtatatccacagcctgaagaaaaacaccatcaagggacattgccacatgtccatcttcggcgccaacacggccaactcggaattcgagttcctgacgggaacctccatggccttcctgccgccgcggagcgtggcttacaattccctggtgcacacggaactggccaactttaccaccacgctgaagcagcagaactacggatacaacaaggcggtgcatccgtattacggaagaggctggaaccgggaagtggtctatccgctgctgggatttgacgacttcatctccatggaggacattccggaaagcaagttggacttcatccgggcgaaatacatgtccgacgaaggagactttaagctgctgaaagaatactacgagggatatcgggcaaagaatcagagcaacccgttctatctcttcaacgtcaccatgcagaaccacggcgggttcgatgcggcgaagcagggagacatcgatcgtccggttaaaatcaccgattccaagctgaaggacgatcaggcggagctgttcctgaacctgatgaagaaatccgacgatgccttcaagaatttgacggaatactttgagaacgtggacgaaccgacggttatcgttatgttcggagatcaccagccggccctggaagattccttctgggatgctctgtacaacggaaagtccgtggacaacatctccaaggaacagcaggccaaccggtatatcaccccgttcatcatctgggcgaattacgatatcggatcggaagacaatatggacatcagcgccaacatgctgggcgcctacaccttggacaaaatgggtgttcagatgacgggttaccagaagtatctggtggatatgcataagacggtgaagttcgttgccggagaattctacatgggtgacgacaacaagctgcaccgcttgacggagaaatccaagtactccaagaaaatcaacgagtatcagaagctgcagtacaacctgctggcggataccggccacacggtggacagcttcttcaacctgaaaaaaagcggtaaatagacatggaaagaaaactgtatctaatccggcacggaaacacggaggggacggaacggaagctgttctacggaagcacggacctccccattacccaatccggccggcaggaggtggaggcgaagcggcggcgcgggttgtatccggagggcgaggccgctgcgctgtacacctccgggatgctccgcacggagcagacctttgaggccatctacggagaaaggcctcacggccggattccggatcttcgagagattgaaatcggaattttcgaaatgaagaccttcgacgaggtgctggccactcctttgggaagccgctggcttaagggggagctgccggaatttgattttccgggcggagactcctacgaaggcttttttcgccgggtcaaccggggcctggaaacccttctcaaagaggacaatccgcgggttatcgcggtccttcacggagcggtgatttccgcaatcatggaaatcctgttctccggcgagaagaaaaatatcttcgactggacaccgagcccgggctgcggatacgagatccacatccaaaacggcatggccacagaacatctggaaatcgcggcagagcacgaggcgtaacgagaagcgcctccggctctgccgttttttcattcccaggtatcaaaaagcgcctgccggccgcccgagttggcgcctcactcccggcaaagccttgagctaccgtttcgaggcgccaacattttgccccgaagcctgccggtcggccgcccgagttggcgcctcatccccggcaaagccttatgccaccgtcacgaggcgccaacattttgccccggagcccgccgatggaccgcccgagttggcgcctcactcccggcaaagccttgagctaccgtttcgaggcgccaactttttgccccggagcccgccggccatccgcccgagttggcgcctcacccccggcaaagccttgagctaccgtttcgaggcgccaacttttctcccacagagcctgactcgaaatccgtccaggcggctcgccgattgggaagccaaaaaagatagatgtacaaataaagtacactatgctatgatgcttatacaaccagaaaggaggctcgtatgaaagataagatgtttttatttccggcacttattttggtgctaaccccctgtgtttggtacagcaatcagccgggggtggatggaattcaggggatcgatttcctgctcagcccgggatgctttttggcgacggcaatagcggtgatcggatggcttctacggaaggaagcgatttgcttgattggaaatctgctgttcattccggcgatgctgctgtttgtgtatcgtcagggacagatttttgaaggaaacagttattccgcaatgacgttgatgtccggtctgagtgcatggggaattgcggtaatcggaatcgctgtggctggatgcattgtttctgctgctcgaatggcaaaaaaagcatgaaaaaagaacgacaaggcggcggagtgagttccgccgccgcattcgtatcaaattcctacctcattcctatcaatccaatctatacttctcaccctatctattgaaaaaaccttccaaaaccacagtcccgatagttgaaattcttttattcaccacaataatatagtataattcaataatgcgtaagcatatttgtaattagggacaggaggaaattttgacagcctatattttcagtattttatgtctgttattgttatccgctttcttttctgcaacggagacggcgtttacatccctcaatcgcattaagatgaagaatatggccaatgatgacgtgaagaacgcgaagctggtgttgaagctggaggaccggtatgacaagctgctgtccacgattctcattggaaacaatattgccaatatcggcatgaccgccattgcgacggtgatgttcgttgcgctgctgggcggctcgttgggaccgaccgcatcgacggtggtgatgaccgtggcggtgcttatttttggggaaatctctccgaagaatattgcaaaagaacacccggaagggttcgcactttttgcggcaccgattatgcgggggctgatgtggctgtttacgccgctgaacgtgttcttttccctgtggaagaagctgctgggaaagctgttcgggacgcaggagaacgggtcctacaccgaggatgagctgattaccatcgtggaggaggcccagatcggcggaagcatcggcaaggagcagcaggagctgattaccaacgccatcgagtttgacgacctggaggccatcgacgtgattaccccgcgagtggacatcgtggcggtggagctgggaacctccgtggaggaaatcggccggacctttaaggagagcgggctttcccgacttccggtgtacgaggacgacctggataacattatcggaatcatcaatcagaaggactttcacaactacgtggtgggcgagaatcgggagctggagcagtacatcaagccggtggcctacgtggcggaatccattaaggcggcggtgctgctgaagaagatgcagaccaagaagacccatatcgccatcattgtggatgagtacggcggaaccaccgggctggtcaccatggaagacatcatcgaggagcttgtgggaaagatctacgacgaacacgatgccatcgagatgcgagaggtgactcggctgtatgacggatcctactccgttgccggcggcgccaatgtggagaagttcttcgagatggtgggcgaggacatcgatatcaatgccaccaccatcaacggttgggtgatgattgagctggaccggctggcaaaggtgggcgacaccttcacctatcggtcgagacataagatttttcacgtgcgggtaacccgggcggatgaaagaagggcgttaatggttcaaatccggattgaggacattccggaggaagatgaatagttttaattaaaggagaagttgaatgggatttttggaaaaaatattcggagatcttaatgcgaaggaagtccggaaggtggagaagattgtcgaccgtatagaggcttacgacgaggatatgcagaagctgacggacgacgagctgaagggaaaaacccgagagttcaaggaacgactggccgagggagaaactctggacgaccttctgccggaagcctttgcggtatgccgggaaggtgcgtggcgtgcggttggcatgaagcatttccgggtacagctcatcggcggtgtggttcttcatcagggacgaattgccgagatgaagaccggtgaaggtaaaaccctggtggcaaccctggcggcatacctgaatgcactgaccggcaagggcgtgcatgtagttaccgtcaacgattatctggcaagccgtgacgcggaatggatgggaaagatctacaacttcctgggactcaccgtgggctgcgtgacccacgccattgaaggagaagaccggaaggcggcttatcgctgcgatatcacatacgggaccaacaacgagttcggtttcgactacctgcgggacaacatggtgacctatgaggaagagctgattcagagagagctgaacttcgccatcgtggacgaggtggactccatcctcatcgatgaagccagaacgccgctgattatttccggacagggcgtggattccagcggaatgtacgtatccgccaacagttttgtaaagacgctgctgaaggatacggattataagatcgacgagaaggacaaccagatttccctgactgatgaaggtgtggcgcagtgcgagcagtactttgacattcagaacttctcggatccggacaacatggagctgaaccactatgtgaatcaggcacttcgtgccaactacctgatgaagcgggatgtggactacatcgtgcaggacggcgagattctgattgtcgacgaatttaccggtcgtctcatgtacggccgccgcttcagcaacggtctgcatcaggcaatcgaagccaaagaaggggtgaatatccgggcggagtccaagaccctggccaccatcaccctgcagaactacttccgtatgtaccagaagctgtccggaatgaccggtacggcgaagaccgaggaagacgagttccgggatatctacaacatggacgttgtggttattccgaccaacctgccgattgcccgtgtggacaagcaggatgcggtgtacgctcacgaatccggaaaatatgcggccatcgtgaaccgagtagcggaggtccacgaaaagggacaaccggtactggtgggtaccatttccgttgagatttccgaactcatcagccagcagctgaagaagagaggtatcaagcacaacgtgctgaacgcgaagcaccacgagcgagaagcggaaatcgttgccgaggcgggacgcctgggcgcagtaaccatcgccaccaatatggcgggccgtggtacggatatcatcctgggcggaaatccggagtttgaagcgcggaaagagatgaagcgccgggagtatacgccggagcagcttgcttttatgaccggaatcaccaagtcggaggatccggagctgaacgaggccagagatacctacaagcagctgtgcaaggagtacgaagcggagagaaagccggagcaggagcaggtaaaagaattgggcggactgtgcatcatcggtacggaacgtcacgaatcccgtcgtatcgataaccagctgcgaggccgtgcgggacgtcagggagacccgggtgaatcccagttcttcatttccctggaagacgatctgatgagactcttcggcggcgagaagatgcagcgcctggtagagcgcgtggggctggaggacgatgaggccattgaagccggcatgctgtccaagtccattgagaacgcgcagaagaaggtggaaggcaagaacttcggcatccgtaaatacgtgctccagtacgataacgtaatgaacaagcagagagaaatcatttacggccagcgccggatggttctggacggtgtggacctgaaggagtacatcctgggcatgatgggcgaactggtggacggaattgtggatccggtgaccatggaatccaagtatccggaggaatgggacttcgaccgaatctacgatgcgctggacaacatcaccccgagataccgggaggagtttgccggatataccgatgaggagaagctgaacctggatggggacagcttcaaggacgatctgaagcaggccttcgagaaggtatacgatgccaaggaagcggagatcggcagcgagcagatgcgtgaagtggaacggatgattatgctccgagtggtagataaccgctggatggatcatatcgacgccatggatcagctgaagaccggtatcggacttcggggtctgggtcagcaggacccggcaatggcatacgcatcggaaggtttctccatgtttgaagaaatgatttccgatatccgggaggaagtggtaaaatactgctataacgtaacggttaccacccgcacggagcggaccagccgaattctcagtcaggaatcttccaaggcggaatatcgggacgaggataccgcaaacggaccggatgcggctccggaagaggagaagcaccaggagacggtacatcggaaagcgccgaaggtgggacggaacgatccttgcccttgcggaagcggaaagaaatacaagaactgctgcggaagaaacgcataggaataacagggtgcccggataagatttttatccgggtgcttttggatagacgaaagatcaggaggaacgaaacatggttttattggaagagattaaatccgcaatccctcaggagaaggcgaagctgctggaaatcggagagtatctttgacctgccggcgctgaagaaaaccatggagggatatgagaaagaaatgagcaaggagggcttctgggacaacccggcggcggcgcagaagctcatgaagaaaaagaaatccctggaaaatgagattgagggatacgaacgcatccggcaaggcttggatgatacggcggatctaatcgatctggcggaagaactgaacgacgaggcggaagccaaggagattcgccggaatttcagtgcgctgcaagaagacatggaagagctgaagctccgcatgctgctgggcggccgctacgattccaacgacgccatcctttccgtctatgcgggcaccggcggcgtggacgccatggactgggcggaaatgttggagcggatgtaccttcggtactgcgaaaagaagggctttaaggcggaagtagtggaccttcagaacgataccgtggcaggcatcaaaagcgccacaatcatggtgtccggggagaatgcctacggatatctgaagagcgagaatggcgtccaccggctggttcgaatttcgccgttcaactcggcgggaaagcggcagacgtcttttgccggcgtggaagtggtgccggacctgggagatgacctggatgtggtcatcaatccgggggatttgaagatcgatacctatcgggccagcggggccggcggtcagcacgtcaacaccacggattccgccattcgaatcacccatttgccgacgaacatcgtggttacctgtcagaacgagcggtcccagctgcggaacaaggaagtggcactgaaaatcctcacctccaagctcaccaagctggcggaggaggaacacaaggagaacctgaacgagctgaagggagatatgagtcaggcctcctggggcgctcagattcggaactacgtgttccagccttatactatggtgaaggatacccgtaccggcgcggaaaccggaaacatcggcgcggtgatggacggggatctggatctttttgtacgtgcgaaactgtctcaggatgcgaaagagaggaatctgtaggtgaagaaaaagcatattatttttgatttcgacggaacaattttcgattccaaccgggtcatcgtggcttcctggcaggaggtgttccgccactacaccggcaaagaaggtcgggtggaagatatttaccatacctttggggagaccattcggtacaccgtgaagaagttcttccctcaggcgaacgtggacgaagcggtgcaaatctaccggaactaccagcaggcccattacgacggaatggtggggctctttgacggaacccgggagatgatggaccgcatggtggaagggggtcacaccctttcggtggtgacctcccgcaccaaagttaccacgttaaattacatgaaggaattgggcatccgggactatttcgacgtgctcatcacctgcgatgacacggacaagcacaagccggatcccaccccattgcgcatggcgctggaggagctttccgcgaaaccggaggacgccatcatgctgggggacacgaagttcgatatcggctgctgcaacaacgccggcgtggacagcattctggtgggctggagccatgatatcgacgagaacgagctaaaagaattgggctttcagccgacgtaccgggtggagacaccggcagacgtgctgaagctgatctagagaacgcgcagaaacggatataggagggggacatgctgaagatctatcagggccgagagaacatcgacaaggaaaaattcatctatgagcataccgaaggggagaccctggtgatcgtgcccaatcagtacaccctggtggcggaggaacaggctttgaaatacctgaacacctcctgtctgctgaacgtggagattctcagcatgaaccggctgggcctgcgtatgctgcaggagcagggcacggataacgtgcggatgctggaccggtatgagcggtacatgcttttggcgcggattattcgcaatcgggaaaaacaactggatattttccgcacctccgccggcaagcggaatttcgtggagatggttcacgatttcatcgcggatttccgccagcaggaatgcacccgagaagaactggaggaaattctggcggatccggaaaccgacgaactgttgcggaaaaaaatccgggagctttccggtattttggaggagtacgaatccctggtgcagggaaagtacaaggatgtggaggattacgtggacctgtacacggacgccatcgggaaatcccgggaactggcgggaaaaacggtgtgggtctacggattcgacagcatgacggcgaagttcgtccgctccctgacagagattgccggagtggcccggaacgtatacgtcatggtgaaccggacggatttcggtctggaagacgtgctgattcggagcatccgccgttccgccgaggaaaagggcctgacggtttccgtggaaaccctgaccggcgacgtgctggagaagtcggaaaccctgaagcgcatcgaacagggtctttttacccaatcggataaaattaaaatcgcctcggcggatttccgtccggcggatcttaaggtggtggaatgcgccaacctgtacaacgaggcggaaaatgcggcgattcaggtgtacaacctgctgcaccggggataccgcatgaaggatatcgtcatcatctgcaacgacacggagaagatgcagcccatcgtggaacgcacctttcgggagtacggactgcctctgttccgggacgcccggcgaagcattcgggattcgcaggtggtgggtttcgtgatgaaccttctggaaatctgcagcggcggctaccggacgccggcggtgatggcgctgctgaagagtggcctcaccgggctggagagggaggccatctggaacctggagaactacgtccgggatttcggcatcaagggctccatgtggacgaagccgtttaaatacggggatttcgagtacgattcggaggaattcgccaagctggaggaaagccgggtggagattaccggacgaatcgaacagctgaaggtgctggcggaagagtcggagcggatggcggattttatcgagaaattctaccgttacctgaatgaggtatgggatcttcggaataaaatccgggagatcgaagacggccagtacaaccgggatcggttcgaggaggctcagtggaccgcccagagctacaacgaggtggttcggattctgggatgcgtggggaacatcatgggggacgaggccatggacctgaaggagttcgtggacctgtattccgtgggaattctcaacgcggaagtggggctgattccgccgactcaggacgggctgaccatgggcgtgatgattcgaacccggccggcaccgccgaaggtggtgatggtgctgtccgccaatgagggaatcctgcctcagaccccgtcgccggaaggactgttttccgtggatgaaaagcagcagttcgcgcggcatgaattcgttctgggaagcctggacgacctgaagatgatggaagagaacggcgccatgtaccgcaccgtgtcccaggcatcggagaagctgtacgtaagctattctctggcgggaagcgacggcagcgatatgaagccgtccgttctggtagattacctgaaggacctgttcccccagctgaaaatccgaaaggatgcggtgagccggggttttaatgcggatctgatacagaacggaccggagtccctgcgccacatgatgaaccacttcaaggagcggccgatggatcagatgatcggagctcttcaagaggaggcatcgtcagaggaagaagaggcggaggcaattccgacaccggcacctgcagcgacaacggaatcggcggaagaggaagaaaaatacctggcagagggcatcctccgctggtacgagcagcaccggccggagcagctgaaggaactcagccgggcgggactggatgagaacagcgctggggatctggacatcgacaccgccggacggctgtaccgccgaggggaggatttcgtcttcagcgcctccaagctggagaaatacaaccactgtccgtttgaattctttgtgatgcacggacttcgggcggaagagccgcgggagtttcgaagcagcggccgggaaatcggcgatgtgtaccacgagtgcatcatgcgggtttccaaacggcttctggcagagggcattctggaggataaaagcaatacggaagaggcggaagctgccggcaccggtatcggtgagggagcggaggaaccgaagacgtcggaatcgcaggcgaaagcggaaggaggtatctccatggagcacctggcagaaatggtggacgaagagcttctgaagctgtccgagtcctatcgcggcggactcttcgtttccggcgaccgagagaaataccgcatgagccgaatccgccggatctgtgaggatgcggtgcgggtgctggcggaacagctgcgccttggaaatgtggaaatgtccttcttcgaagagcagttcgggcggggctgccgattccggcccattgaatacaccctccacgggcagaaggtctacatcgagggaaaaatcgaccgggccgatctgatgcggggcggcaatatccgaatcatcgattacaaaaccggaaaggacaagctggacatcgagcagatgcggatgggctacaaaatgcagctgatggtgtacctggaaggggccagcggcgacgaatacaatccggtgggcatgttctactttaacatcagcgacagcgagctcaacgccaacaagctggatgaagtcaagcagcaggaacaactggccaaggaagagggcgagcggttcagcctgcggggcgccgtgctggacgacccggcggtgctcagcagcatgccggtggaaatgctggagaagaagccgaagaagctgagtcaagaagaattccgcaccctgcgggaggatgtgcacaaaaccatcgagttgctcagcgatggcatcgtccgcggcaaaatcgacatttctccgacccgcctgaagaaggacaaacgggcagaatgcacgtactgccagtaccgtgccatctgcaaattcgacttaacttacagaaacaacaagtacagacagatatagaacataggcagaaattcatgaatttagcaatacaatcaatcgggagcagcagctccggcaattcctatttaatcaccgacggcaccacccacctgcttctggacgtgggcctcagcggcaaaaatatccgcggggctttggcggacgccaacatttccgaggatgccgtctccggaattctggtgacccacgagcacgtggaccacgtaaagagcatccgcatgatgtcccgcatctgcgagaacgcggaggtcatctcttcccggggcacggctcacaactgcgacaagttccagtacgtgccggagagccggcttcggtatttttccgctcaggatgaaacccggattggagacattcagatcaagggctttgccctttcccacgatgccagcgagccgctgggcttctccttccggaaggacaacacgaaaatcacggtggtgacggatacgggcaccgtcaccgatgaaatctacgaagagattcgcacctccgacgtgctggtgatggaagccaaccacgaggtgtccatgctggaaatgggtccctacccgtatccggtaaaaagaagaattctcagcgaccaaggccatctttccaacgtggcttgcggcgaagccctgacccgcatgctggaagaccggccgtccctgagccttgccggacacccttgtgaggacgggaagctggcgctgccgaaaattcttttagcccatctcagtaccaccaacaacacgcccttcaatgcggcactgacggtacgggatgtgctggaccaaaacgattaccacaagaacgtgaatttccgcatggaggtggcggccaagagcgcagccggaccgctgatcggattctaggataggaagaaaatgaacatcaatattatttgcatcggaaagttgaaggaaaaatattggcaggcggcggtggcggagtacaccaaaagaatcggggggtatgcccggattcagattgtggaactgaaggaatcgaagctcccgaagaacgcatcgccggcggatgagagtcaggtgatggagaaggagggggagaccatcctgtccaaaatcggagagtcggattatgtgattgccatggaggtggaggggaagatgctggactccgtggaactgtcccggcacctcacgaaaaccttcgacagcggccggtccaccgtggatttcatcatcggcggcagcctggggctgtccccggcggtgaaaaagcgggcggacttcgggctttccttcagcagcatgaccttcccccaccagatggcccgggtgctgctgctggagcaaatctaccgcagcttcaagattgccaataacgagacttatcataagtaaagaaagcaaaaagcagggcgtgtccctgctttttgctttccgtgcgcccaaggcggcgcctgagtttgcgcctcatccccgtcaaagccttattccaccgtcggcaggcgcaaaccttttggcgagaaaggcgccgtgcgcccgcctgagtttgcgcctccctcccgtcaaagccttatcccaccgtcggcaggcgcaaacccttcggcgagaaaggcgccgtgggcccgcctgagtttgcgcctcatccccgtcaaagccttattccaccgtcggcaggcgcaaacccttcggcgagaaaggcgccgtgggcccgcccgagtttgcgcctcatccccgtcaaagccttatcctaccgccggcaggcgcaaaccctttgtcgagaaaggcgccgtgcgctcgcctgagtttgcgcctcccgcccgtcaaagccttatcccaccgtcggcaagcgcaaacccttaggcgagaaaggcggcaggcgcaaaccgcccggcgcgcccttgctttttttcatctcttcatgtaattatcacacggttgtgtataatgataagtgtgtattagcactcaaatagataaagtgctaataaaacagcggcaatccgaggacctgcagcattcccgctgatgcaggcacgccgcaaacaaatacgtagaagggatgaagagagatgacattagtaccgatatataatcgaatcataattccaaatggaaaagtatacattatcagcgaccggtaccggatggtaaccggtcaattgccgcaagtgggagaacgagtgattctcctgctttctcgggaagaggacagctggaaggaactgacggaagaggggttctatcccgtgggcgtgggcggcaccgtcaccgatgtgagcaagaacggctactgcatcgtggaaaccacagatcgggtgagcctggatgccattaacggaaagggtgcgttccacgcagagctcagcatcagccggattccggacgaggaggagatggatcccgaaattgaacagcctcgagtgaaccgcatgaagcagaagctttacgagtttctgagcaccgtgccgtggggtgtcatggccaaaagctacctgaagaacatggagagcgtgggagaaatcgcttccgttctgtccatttggatgagcaatacgccggaggagaagtaccgggtgctgctggagagcagtccggtaaaaagaatggaaatcatggagaacatggtttatgaatatctggagatggcgaagctcaccggggaagccgagagcgctcaggaaaatgagaacgagaaggcgtaccggaaacaggccatccagcggcagatggaatttctgcagcgggagctggacgaaatggatccggaaagcgtttccgatattcgcaaattcgagaagaaaatcgacgaggcgggcatgaacccggaggccgagaaggaagcgaagaaggtgctgaaccgcctgaagcaggagggtcagaacagtccggaatccggcatgctttatgactatctggactttgtcaccaccctgaaatgggacaaggcggagccggagcacatcgacctggacgaggcggaaagcgtgctggaggaagatcactttgggctggataaagtgaaacaccggattattcagcagatcgcggtgatggagcttcagaaaaagcagaccggctccatccttctttttgtaggtgcaccgggcacgggtaaaaccagtatcggccgcagcattgcgcgcgcgctgaagcgggaatacgtccgggtcagcctgggcggcgttcgggatgaggcggatattcggggtcatcggcggacctatatcggcgccatggccggccggattatgaacggcattcataagagcggtgtgtccaatccggtgatggtgctggacgaggtggataaactgtccacgtcctataacggcgacccggccagcgctttgttggaagttctggatccggagcagaacagcacgtttaccgatcactacatgaacgtgccgtacgacctgtcggatgtgttcttcatctgcacggccaattccacggataccattccggagccgctgctgaaccggatggaagtgattcagttctccggttacacggccacggagaaattccagattgcacggcggcaccttttgccgaaagccatggaatccatgggaatccgggaagagaatttggagattccggaggacgtgctggagaccatcatttcggattacacggcggaggccggagtccggggactgaagaaacgactggacaccctgtgccgagtggctgcagtgaaaatggtgaaggaagcgggcgaagaaccggcgaaggtggaagtccggaaggaggatctccgggaatatttggatatgcggccaatcagtcacgaccggattttggagaaaaagcaacccggcatcgtgaccggactggcgtggacccgggccggcggcgaaattctttttgtggaaaccctgttcacaaagggaagcggcaagctgatccttaccggtcagctgggagatgtgatgaaggagtccgctcagattgcggtgagcctggtgaaatccatgcacccggataaggcggcgctttttgaggagaacgacattcacatccacgtgccggaaggggcggtgccgaaggacggtccttcggcgggaattaccctgaccacggcattgacctccctggtggagaaccggccggtatcgccggaaatcgccatgaccggcgaggtgtctctgcggggcgcggtgacgccaatcggtgggctgccggagaagctcatggcggcgcagcgggccggcatccgcaaggtactcattccaaaggagaacgaagaggatctgaaggatgtggcagaggaagttcgggagaagctggaaatcctgccggtaagccgggtggaggaagtgttggaactcaccggactgaagtagaagtcattacgcaaaaaagtctttttccgcaacaagcttgcggaaaaagacttttttgttgtaagatggagaggcatgaaatgcaattctttaagaagaaaattagcagagggaagaacgatgaataattttgagtttgagaatcggacgaaggtatatttcggaaaaggagtggtggcagaaaagctgccggtgctggccgctggctatggcggcaaggtgttgctgggatacggcggcggctccattaagaagaacggcgtatacgatgaggtcaccggaatcctgaaagatgccggcgtggaaatcgtggaattcagcggcatcatgtccaacccgaccctggagaaaatgcaggagggcgcccgtctggcaaaggaacagggggttacctggattctggctgtgggcggcggcagtgtgatggactgctgcaaatccatttccattgccgttccttacgacggcgacgtctgggaagagttctgggaaaagccgggcaatttgaatttcgatccactgccgctgggcatgattgtaaccatgccggccaccggcagtgaggtgaacggttccgcagtgctgaccaatacggagaaacacataaagaccgaccgggactatccgcggatgaatgcggatttcgccctgatggatccaacctacacctattccatgccgctgcggcagctgcgggcaggcactttcgatatcctgtcccatatcatggaaacctatttcagtttcccgattgaggacaacgtgtccgatgatatttccgaagccctgatgaagggcgtcattcgggatttccgcaaagcccttcagaatccggaggactacgatgcgcgaagcaacatcatgtgggaagcttccatggcggaaaaccgggtaatcaagatgggaaaaaccaaggatttcgaggttcacaatatggagcaccagctgagtgcctatacggactgcaaccacggagagggacttgcggtgctgcacccgacgtattaccgccatattttccgggacggcctgggcaaattcacccgtttcgcaacgaacgtatggggcctgaatccggcggactatgcggatgaagaggaactggcgctggcaggcattcaggcgctggaggatttcatccgggagtgcggacttccgggaaccctgcgggagctgggcgtggatgaaagcacagaccttcgggaaattgccgattcttgctacaccgccggcggagcctttcgggaaatccggcaggatgaaatatatgagatttataaggaatgtttctagaaaaaaagaagataagagagggatgagagtgattcgccgggcgaatcactctttttatataaagaaaactccgcgaactcacgttagatgcggagttccgttgatgcgtggcgaaggcggcgggattaattggtaaagaaagctctcattgcggtcgtgaaacagaagatgtgcttcccagcggtggggaaagggggtagaatacctgtaaagacggagattttgggtcgtgaaaggagtgagaacatgctgcttgcaatattgattttgtgtttcgtctgctgggcctcgaatattcagtatatcgacgggaaatgggtcaacgtgaagaagctggaggaacggaatcggaagccggagccgtacaatgccttcgagtattattgcaaaatcgatccgatgcacgcgcagcgatatgacgaatgttatcggacgaatttttttggtgaggaattaaaggatgatgaatttgaagacttataaggatcgaattccggcggcggcccggtttattatggagcggcttcaggcgtcgggatacgaagcgtacctggtggggggcgcggtgcgggacctgattctggggcggcagccgggggattacgatattaccacgaacgcgctgccggaggagacggaagcggtgttccgggattttgtgacgctggaaatcggaaaggcgcacggaaccatcggggtgattgtggatcacaaaatctacgaggtcaccacctaccgggtggatggggaatatacggatcatcggcggccggatgcggtcaccttcacccgctctctggaacaggatttggagcgccgggattttcggatcaatgcggtggccatggacttggatggaaacctgcggggcgtgccggggtacgaagaggatttcgcccggcggcagatttgtgctgtgggcaatccggtgcagcgcttcgaagaggatgccctacggattctgcggggtgtgcgttttgcggtgcagctgggatacgagattgaggcgaacaccggccgtgccattcacgagaaaaaacacctgcttcggcagatttcgccggagcgcattcgggtggaaatagagaaaacgctgaccgcgccgaatccccttccggtgcttcgggaataccgggatgttttcgccgaggtgattccggagcttcgggagaccttcgatttcaaccagcagaacccgttccactgctacgatgtgtacgagcacatcctccacgtggtgggcaatgtgccgccggaaccggtgctgcgcctggcggcgctgttccacgatatcgggaagccgaggtgttttgtggtaaaagaaaattggggacacttctacggtcacgagcaggtgtccgcggagatggcggaggcgattctaaagcggcttcgctacgaccggaaaacggtaaaagacgtgacggaactggtggcctcccacggatatgtttttaaccgcacggaaaagtacgtccgccggcggctgaaccagctgggagaagagcagctgatgcggttgatcaatctggagcgcggggacgtgctgtcccaggcggagcacgtgcgagaagagcgggcggcggccatcgatgcgtttcgggagctggtgcagaccgtggtggagaaagaaggggtgctgaagcggaaggacctggccatcgacggccgggatgtgttggaacttggggtgccccggggaccggaagtgggtcgggtactggatgaaatcttggaccgagtgctggaaggggacctggagaaccgccgggaggtgttgctggaagcggcagaggaatggaagaaaaggggctgtcgcattaacaacaaataagacagctccaaacacaaaagaactattccgcactttataatttcaaagtgaaaagtgctgtgcggagtccaaccagcctccgcatagcgcttcacatcattttatacagccgttttggtcagcaaaagaattagtaaaataccaacgcatagagaaacaatgcctgccagtgcgttaattgtgaataaagcaatggaaatacccagtatgaaggcgccatttacaacctgcacaaccggtgaaagtccaccaccgttttttccgtagtaatattcatcattcgatgtcttctgttctgctctaatcaaaattaatccaattactgctacaataattccacccaccagggaaattgtatttggtatttccggtttccagaaaagtcgaattccgtagcagcagattccaattactgtgaagtttctaatatttttgttccgattcatattgattctcctttcctttcatatttcgaagtcccgttttacatttatttccaggggcgaaacgtttcatggtctcacccctggagctcaatatttccagtattgattaattaatattctactttttcggacgaaaattccaaattagtacaaccgctaaaatgattcccgcagcaatcagaggaagcgttaacgcttgtcctctcgcttctaatgctttcataatactatccatagctataccaccaattaattcatatcaccattagaaagaattgcaagcaattctgcatccggaacgagcagaggtatctccggttagtgaagagcccattctctttccataaattgacatgataatcatctcctttacgatcagtgttttaatgttatactggaaattatgaaccgaatttaatccaactgcgctgcaatcattttgcaaatattattaaatgtgttaaaacttttttcgcatacaacgacctttttttattgtattatactcctcaaaatgcaatatttatattaaattttcaaaaaaggctattgataatatctatcgtaaatgggagtgggcgagattctttttatcgacggattaacgttgagaaagtgggcgaaaaagcatataatttggtacgtaggataaatatttctgcaaaatattgaaatttgtgacagaaaaacgtatagtgagtactaataagcaaccaaggaggtaggcaaatgctgagaattgaaaatcaagcaatcgtgttcgcgctgctttgcaaatacacggtggagagcgaaggcgagaaaggccgggaggtcattcagaaaggcatgattcggtatggccgggagcggggtgcgcggatggcggctcgagcgaaggccaacggggatccgattgccctgtggaccaatcaggcctacggcgagtggaagccggattacgagggacagatggagttcggatacgacgagacggaaccgaccctgaagagctacatcagcaaatgcgcgtggtgtgacgcctggaacaaatacggcctgttggagtacggccgggagtactgcgtgaatgtggacaaggcggtgtacgagggattctgcgaggatttcgtctgtacgcccaacgtgccgaccatgagctggggcggcaagcgctgcgagttcgattgggggcagccgctgacggaggaagatctggcgaagatgaaccggaagaaacaggagctgggcacttcagccatgcgggatttcgactaccacacggcgcacatctactacaccatcaccgatgaaattcagaaagcgttcccggagagtgccgatgaaatcatccaaaaggcggtgcaggattacgtaaagctctttggacaggcggaatacgatcgggttttggaatttgagggagaacgattctaagagaatgaacgaaaaaaaggaaacagaaagaaggtacttgagatgaaatttggtgtaattggattcggaaacatgggcggtgccattgtgaaaggcgccgttgctagcggtgttctggcgaaggaagacgtgctggtctacgatatcaaggggtcggcgcggaaagcggcggaggagttcggcctgaaggtggcgaaggacgatgaagatgtcactgcgaactcggatgtaacccttctggcggtaaaaccccagcagatggcggaggccatggcgcagaccggcaagggactgcaggacaaggcgatgctgtccatccttccgggcgtgtctgtggagcgtctgcgggatgcctgtgcggtaaaagaattccgcattctgcggctgcttccgaataccccggcacttgtttttgaaggagcgttcgcatgcagcaaggaaaacgacctgacggatgcagagcgggattttgccacaaaactcttcgagtccatcggcaccattacatgggtaaagacctatgacctggatgcggcctgcggcctttccggcggcggcccggcatacgtggcaatgttcgtggaggcgctggccgatggcggtgtaaaagaaggtttgacccgagatgtggcttacgagctggcgattcagacggtgctggggtccgcaaaactcctgaaggataccgggatgcacccgggccagctgaaagacatggtgacttctccggccggaaccaccattgaaggatgtgaagtgctggaagacaacggcttccgtgcggcgaccatcaagtgcgtgtccgccgctacccggaaatccagaagcatgtaattgagtaggggtatttaattggaattttaagatgtggggagcttgcgccggcgcaagctcccatcttatttgtgcccggcctgccggcagagccgcggattgtatttttcacatttatatcaattattttgtgttcaaagtggtaaaataaattgttgcgcagggaaggagattaacaaggtacacagatgtttaatataaggaagaaacggaagaaaaagaaaactgcaaacccgcaggtgcagctgacgccggaagagctgcaggccctggaaagcggcgatgatgaagtgatgcgccgctatgcggagcgacggattcgggccgcccgcaaggcacagcggaaaagaaaacagcatcgaatccggaggcggtcgctgacgataatcattctttgtcttatgggaatgaatctggttctgggcggccggtatgtaaacaatctgctgaaagccggcggaacggtattggacggagatgttcctatggtggagaccgctcgcacccagctgggaaactacggcggaaagaagttttggcagtggtacgggtttgattctcatgtggattggtgtgcctgctttatttcctggtgcgccgatcagaacggtttgatcgatgacggcaaggtgcccatgtcctgctacgtgccacagcaggtgaattggttccgagatcgggatcggtaccacgagcagggagacgggtatacgccgaaagccggggatatcattttcttcgactgggaacacgacggatccgtggatcacgtgggcctggtggcctcggtgttccgagggaaggtctacaccatcgagggaaactccggttttacgggcaaggacgagaagaagtggaaaggaatatgcaagcgaaacggatatccgattaagagcaaggatatttttggctacggtctggtagagaaataggtgcgaatatgaacatcaaacagatgaaaggtttcctggaattatccaaaaccctgaatttttccaagacggcgaagcaaatgtacatgtcccagcccgccttcagtcgaatgattgaaagcatggaaaaagaaatcggcgttaagctgattcagcgggacaaggtgaatccgaaactgactcccgccggacagaacgtgcttcggcattgcgaacgtatactgaacgaatataacgagctgatgcaggatgccaagcgcttcagtgcggagaggaaaaagcttaccgtcggaattctggaggacggcattcgggcggggaacaccggtcgaatgattcggcagtttgcagagggaaacccggatgtggaaatcgatttcagaaacaccagtgaatccgccgccttcgatcagattcaggaaggggaactggactgtggaattctggtgcattttccggaggtatacagagaacagctgaacggaacggttatttcctgggatcacgactgcgttttcatgaaccggaacaatccgctggcatcgaaggaaaaagtttccgtgaaggacctgcgctcggaaggtttcatcgtggtggatgcttctcagtctcgttttgggttcaatcggactatgggactgtgcctgcaatacggatttgctccccacattgccaagagcgtttcttccgtgactaccgcactgctggaagtggacatgaattacggagtaatgattctccacaattccatgcaggacatcgccggtccggagacggtggccatcccgttggagggggaaccggaagtgccggttcagatgatccagcggaaggacagcggcaatccggcattggagcgttttcgggaattcatccgggcgcgggttccccaagaggagccgaaggcgtgaccgcgctgccgtaggcagcagacgcccccgaagaactgcgccaaacggtttcgttcggggagtcggacgtgtgggatgagaggtaatgctttttttgcataacctccccctcaaaaatcgcatttccaattgaatgacaaaaaggatatcatcgagttatcgaagatatcctttttttagtggaagggattggagaaaaaacgatcataaggaggaaattcatgagcagaagaaccgaaatgctgctgaagaacatggaatttgtcggctacaatgacctgaacaagaagccgggattccagatgggaatgcatcgcacggaagatggaagatattttatctattcggcatgcttccgggataatggttttaatattattgaagtgacggatccgaagaatccggtgtccaagtgggtcgagggcgattgggtcagcgagattcatgacggtcagtccctggcgaagattcaggtggccggcggaaagctgattgcttgctacggcggaaccatgcgggtgctccacggaacgcacgagcagccatattggggcggtttcaagatctacgacatcaccgaggatccatggaatccgaagttcctgggtcagttcgagtgtgaagacggcccgggcgtgcaccggagctactatgatggcggcagatatgcgtacatcatgggtagtaaaagaaattatatgggatacatcctgcgcatcatcgacctggaggacccgactcatccggttgaggtgggcagctggtgggcagacggccagtacctgggcaacaagaaggcgtcggatattccggaattcggaaccgagccgttcatgaagctgccgaacggccacgccatcaccgagagaaatgacatcgtctatgcggcattcccgaatgtgggattctgcatgatcgatgtgaaggacaaaacccgtccgagactgctgggcaatgttccgctgaatccgccgttctccaacggccagtccggcgcagcggtgcacaccgcaatgcctttgggcgacagaccgttcgccatcgtaactaccgagggtgagcgtccttggtacttcgatccgaatcgtgaagagggcatgttccacagaatcaccagccagccgatgaacatcatcggaatgatcgagaccggtgacaaggagaacccgtccctgatttccgtattcccgtatccggaagttccggaggaatacaaaaagtgccacggcgagaacttcaacatcattgacggccagcgcgtggtattcggcccgcacaacatgtacgacgccgcaccgcaggattgcttggagcagagagacgacagagtctacaactgccacttccaggcaggcctccgcgtctacgacgtatcggatccatttgttccgaaggaaatcgcttacttcatgccgccggatccggaaggcacctggttcgacatcgaggacggcacgctgttcccaggaccgcacatcggcatcgccgaagatgttctggtagacgaccgcggatacatttacgtggacacctatcaggatggactgtacatcgtaagatgcaccgtataatcttgtaaaaaaacgctctgtaaaaatacgaacaacgagaccgtaggtgccggcagagcgaaggggaaacgtttcgtaataaggggaaaagaaagactagaaaggctagagatgtaggctt

SEQ ID NO: 1444 - DNA, 8395 bp, Unknown
  16S sequences of unknown bacteria
tgcgccgcccgctggtcggcctgtttttgaaggatcacaccaccggcgcgctggagaccggcatgttgtttatcctgattgtcacgccgttttatgtcgtcccagccgtcaagattctgctggacggcgtcctgcggggtgcgggtgccatgggctattttatgacgacgacctttacagaccttatcctccgggtcggcttggccttcctgctctcccactctcttgaaagcaccggcatctggctagcctggcccctgggctggatcaccggcacctgcctttccatcctcttctactgcaaaggcgtctggaaacggggcatgacctaaaaacacaaggggctcccttcccctcacgtcttccgcactaggcagaaattactttagaaatcgtattattttttttaaaataacgaattgtcttgacaattgcctgtagctgcgtatatgattagattatcacacagaattttttcacatcagaaaatgccctgcattttctgacaaggagcgatcatgggtaactataaaaacggtattgaaacaaaaacagcgctctaccagagcgcacgtaattgcttttacgagcaggggtatttcaacacctcaattcgggatatcgtcggcgccgcgaattcacggctagggctcttctcctatcattttgagagcaaggaagccgtcgccgtcatggtattccgggaatatatctccaacgtggccacgacaatccgtagcgcgctgggcaatatcttcgatgaaagcgacctgctgctgaacgatatgctcaactaccgcggctacttcaccgggctgctgcgcaacgagaacatctcccgcttcttcgtcgagctgacgacgacggcgtgctatctggagcagaatttccgctataaggagtatttctttcagcggctatgctccccgcagctggtgctgaacaagtgctggcgcaacgaggagatgggcaacctcttcgtctcgctgaccgccggcatggagatccaaatgtgccgggattaccgcagcggccgcatccgcgtcccgctggacagtgcgctggatgcttattttgagacctattacggcctgctggtacaaaaccgcaagcaggtggaaaaatacgtccgccagacccgccagatcatggacagcatcgactgggccgtcggccccggctttaccccctatatcatccgcagccgggaagataccgcaccagcagaggtccctgcagaagcctgagccattccgcaaaaaataacagcgcagcgaaactgaatgcatcagcttcgctgcgctgtctttctttctgttacgccagcagctccaaggcgtgcagggtaccatggatccggaagtgataatgcttggggcaggtctggccatagatcaggtccggccgcttggcattcaggcaggcctggacatacgacgtgtcctccgccgcaggcaaagccacaaagcgggcaagctcgcaggccgtcagcgcaaatgtctgcttcgggcacaggaatagcagcgccttcccgtccgccagtgcctggatctcatgcagcagcggtagcgtgaccgtctcggccatatgggccatattcttcggccccaggacattcacgccaccgacggaatcggaataggaaataagatccgccccagcctccaggaccttttctgtgaatcgcagcagctcggcgcggatgtgatcaaacacctgctgcatcttctccggctccttgcgcagccatttaaagagcggcgccgtgccgcacagaacattcagccaggtaaacggccccgtcagggcgatcatcacatgctccccctgctggtgcagcaggcggcaggcctccagtgtctgggccatccggccagcggaatagtcgatctcgggcatttgcagcagcgcatccagggacttgtaggtcgggtcgccaaagcgcgggccggtctcgacatcgtcaaagtgaatgataccgcctgtcgcctccgcctccagggtatggcagaaggggagcatacagaagcaggcgttgttctcccgcttcagctccagcgccgtcttggccatatccccgctctcgagatacgccgccgggaagctgctgcccgctgccgtcaaaagctccggcgtaatgcgcagcatcgcgccgacatcacaattaaaatccgcaatttgattcacgagaaaggcctcctttcttgcgttttcatgcgaatatcgtttcctaagaactgcaggacctgatacgtccccagaatgcgggaggcgatttgggcggaatagcgggtccggagctcttccggtgacaaattggtcgagaggatgacgggcttgtgcgccatcagccggtcgttgatgacagaatacagggccgagacggtgaattgggtcaccatctctgtccccaggtcgtcgataatcagaagatcacaagcggtgtatttcccggtgcggctgcggttctcctcggtgttctcgccgaattttgccgcttcatagtccgccagcaggtgaattgccgtgtcataaacgacggaatagccgccgtcggccacggcccgggcgatgcagccggagaggaaggtcttccccagccccgtctcaccagtaaacagcagggaggacgcattgggtgtaaactcccgggcgtaccgctggcacttttgcagcacgaggcgcatcgtctgccgggggctgatgccatagttcgggtccggcgtatcgggatagtagtccagccggaactgctcgaaccgctcccggccggtgccgaggagcatcgtcagctcctttttctgctcctggcggcagagctcccgcaggcactcgcacatctgcgcgccgacatagccggtgccgccgcactgggcgcagaccggtgtatcctccagcagggattcgtcatagtccgccaggatccactcccgacggcgctgcagttccagattcttggcccggatggctgcaatggcctgggccgggtcctccccttttcggaagctggtcgccacgacctgggccatcgtcgcccgcagctgtcggtcgatctggacaagctcggggaatttttcataagctgcctccagccgggccgctgtctctgcctcgtggtccgcttttgcctgggccagacgcgcccgggcccgctggacgaccgcaggggaatatgccatatgccgttacctccctcgccgggtcactcccggctctcttcctggaccagacgcgcgatggccgccttggccatgggactgaccgccggggccgtctggcccggccgccccttcggcgcccgctccgccgcctcgatcccggagacggtatgcaggtttttctgatcccaattgagtagaattttattcatgtactgccatttcaggcccccggtattcaagcaggtacgctcataagccagctgaagctccggtaggtcaaagcccatgccgagccagctgcggatataatgctcctccgccgccgtgagccgccggtcggaaagctgcagcagcttccgtacccggccgatctggctctggagctgcagctgattctggacaaaagccgccgcctgctccatggtgtcgatcccgtcatcggcccagcggtaggcttccttctccatcgtccggaaggagggggcgcgcagattgccccgggcccggttgcgctcgacgcagaaatgcaccaggatcgccaccacctccatgggcaggtctaaataatccagcatccccaagaggatcttcagatcctcgttcgacagcagccgccccagctcccgctggatctcgcccaccagctgggaaaagcgcttatcccgctccatgtggcgggagacatcttcctcggtatagacgggactatgatcctgcggcaggcggcgatccggcttctgcagcagccccagctgccgcaggctggcagctgcctgctctaattttgccgcagacagctgcagggcgctgcccgcctgggacagcgtgccgccggagcgcaagtataaatacaccagcgccgcatcgcccgccccggcgctgatcagcttccggacgtcgagcagcggtatttgcaaaagctcctccatagatgatcccttcctgatttttacgctgctttactgcagcagcccctcctggggcgaggtctcccgctgcacggtggtcgagaaataataatccaggatctccttggcgaccttgcccaggttaccgccctgggcgcccttttccacatagacggaaatagcgatctccggatcatccgccggggcaaacagaacaaacgaagcgttatccgagccctctgcaccatgctgcgccgtgccggtcttacagcagacggcaacgtcgtaattttcaaaaatattcttcgccgtgccctccgtcgcgcataggcgcatcccggtaaagacacagtcaatggcctcctgggacatgtccagcgttgaggcgaccttgggcgttttctcctccagcagagtttgatagtcgccggagatgatctttttcaaaaaatgcgcctcgtagcgcgtgcctttattggccagcgccgtggtatagacgcacatctgcagcggcgtgaatttattctccgactggccgatggacgccatcagcgtatcggcgccgtaccaaccggactggtccggatcgtcggcatacagctttttctttgtctcggggtttgcgcggtagccatcggcgttggcgatctctacgccggtatcctcgcccaggcccagctgctttgccgtttgatcgatggcatcgatccctgtccggcggccgacttcgtagaagtaatagttgcaggagacggagattgcctgcatcatatcgacgacgccgtgggtgacaccggaggccgtgtagatatagcaggcgggctggtagtcatcgtaataacggtagatgccctggtcctcgatctgcaggtaccggctggccgtgccgctgtcaatggcggcaatggcagtgaccattttatagatcgagccggggggatagattgcactcagggcgcggttatacagcggcgccgtctcatctgcgttgagtttgttgaaatcctcggtgtaggtcgcaagattgaacgtcggatagctggcgctggccaggacctcggcggtcttgacggacatgacgacggcagcgccgccctcggtgtcctttccttcgccgtccttgccgacgccgttctcccgcagatccaaaatgcagctctccaacgccttttccgccaccgcctgcaggtcgatatcaatggtgagctccacgttattgcccgccttgggctccacagcgtaatgctcatcgacgacctcaccgttggaggtcaccgtcgtcagccggatgccgtcggtgccatggagataggactcgaaggatttttccagcccatccttgcctacgtaggcgttcatggagtagtcctgctccttgtactttttgtattcgtcgctgtccatcaggccgacccggccgagaatgtgggcggcataggtggtgttgtactcccggaccgtcgtcgtctccacgctcatgccgggaatatccagctccatcagcgccgcaaggtccgtcgaattcacatcggcgacaaggacgtacgggtccagcgacgcgcagctgcgcagcttgagctcataccgcaggcccaggaccttccgtgcctccgcctcgtcccaatcgttggggatcttgtaaacagatttcatcagcttaatgatctgctgggcagaaatatccgcatcccaagtataggcgttcaaatacgcacggaaatagccctgccacgcctcgggcaattcctccagcgtgtaggcatagggcttctccgccgtgatgggcagatggtccgcatagtcgatgcccagcttgtcgcacaggcgcaccagccgcagcaggtcctcattggggctctcagaattaaagagcacatagtcgttgatgatgacattgtagctggcccggttcgagactaggatattgccgttgcggtccaggatctggccgcgtgcggcggagacattcgtctggtaggtataggtcgagattgagctgtcgccgtccgtagcgttgaccacctggacaatatacagccggaaggcaaaaaagcccaagagcgccgccagcaatacaaaaaagacggcgacccgtttttgtgtgattcgttccataatcagtccccaattttcgcgatctgacgcgacaagtaataaaacaccgggcaccctaccagcgacagcagcgcgccgggcagcagcaccagcagatattgcatcggctccaccgaccccagcagcaaccgcagcaggaaaatgcaggtctcattgacgagccacgctcccaggcagcacagcgctgtggagggcagcgtgtgataaaacagcgcacggcacagccatgcgcagaataccgcggaaaaggtcagcaccgcgatactgagataaccaaagtctgcgcccgccaacgccaaaactgtactggcgcacagggcaaaaacgccgccgcgctcctgcccctcctgcagtgcaacacagatgatgcatgccggcagcaggttcagctttacgccgaagatcgacaagcggctgaggatcgtgccctgcagcgccatggccagcagaaacatcgccccatagaccgcccagcggagaaagaagatccactgcttccgggtgatatgcagcttattcatgccttctcctttccgccgcggtgcaagccgcgtttattcattgacatattccgtgataacaaagacctgctcgagtgagtccaactctgcagccgggtcgatgatcgcatatttagcgaccccggtgccatccagaccggcatcgacaacatagcccaggatcaggccccgggggtagagggtcgagccggtggtcaccacctggtcgttgttgcggatgacggcgtctgtcgccaggtaatccatccggaggcggtcggagccgtcgcgctggtacgcgccctggacaatgccgttatagccagaggacgaaagcgtcgcggagacctgcagggaggaatccaggatcgtcgtcaccgtggcccagtttgttccgacctctgtcaccaagccgacgacttggccctgctccgtcgtgacgcacatattctcggcaatgccggaatttttccccttgccgatggtgaacgtgtttttccagttgctggaatcccagctgatgatataggcggagacgagctgatagtcctcgtgctcctgggtcaggcccagcagctgacgcattttctcattctcccgctgcagcgcatcggcggtgcggacctcgtcttccatcgaggcaatgcgctctttcaggtactcgttttccgcctgcagcgattcatagcggaagacatagttataaaagcgctccgccgtgcgggtcacagcagaaaccgtggcattgatcggcgtcatcagcgactgcacaaaattcttcccggaggagaccccagctgcgaccgcgctgccgaccgcgaccagaaccgccaggatcactgccgccaagaaaatgcgctttgttttggatgtgaacagcttattcaatcgcctcacctcgcacaacgccgtccgccacgcccaggacgcagacgccaaagctgcgcagcacctgggtcagacggcataccggcagccccataacattgtaataatcgccgcagatggcgctgacaaacagcgccgccccgccctggatgccgtacgcgccggccttatccatcggctcacccgttgcgacataggcgcggatctccggggcagacaggggacggaagtggatctgtgtcttttccgtgaatgtctcaacccggtcaccgcgcagaacgctgacgccggtcatcaccgtgtgatcccggccagagagcctgcgcagcatcgcctccgcctccgcttcgtcccggggcttgcccaggcgctggccgtcaatgcagaccagggtatcggcggcgatgatgcaggcgccctggggtgcctgggccagaacagcctccgcctttaatcggctgacccggccgatctcttcttcgaccggcttagtcgggtccatccattcgtccgctgcggcggacatcacttgaaattgcagccccatcagctccagcagctgccgccgccggggggattgcgatgctaaaatcagttccatgacttctcctattgattccggcgctggcgccgttattccacgccgcggtaaaacaggccgcgggtgaactgtttgggctgccaggtgccgccgcctgtatagcggcgcaggatggctgcgcactcggcgggggattcggtggtgaagcgcagccgggcgtagcgcaggcccaggcggcggtagtccgccttgtccgccaggaacaggggcacgcagttttcg

SEQ ID NO: 1445 - DNA, 5177 bp, Unknown
  16S sequences of unknown bacteria
gtcggcaggagcctctgccccgaccatcgcgacgactacctcgtcggcaagggagcgagcgcctgcgcacagcgcggttgcggcctctgcatgctcagcaataacgaatgccttcatctctgatatccccttctactggagcgcggccttgagggctgctgcgaacttgtcgattgcgccgtcttcggccgcgtcgaagacctcgagcttgcgctcggtctgctcgggcgccttgacctcgacggtctcggtggcattggggagctcgccacctgccttgccgacgttcatcggcttcttgcccgccttgaggatgtcgcgcatgccggggatacgcgggagcgcgacgtccggggaaacggcgataacgcacggcatgggaacctcgacctcttcgatgacatcctcgagcttgcgggtcgccttgatggcaccgtctgccgcctcgacggcaacgacaccgttcacgctcggcacgccgagcttgtaggcaagctgcacgtcgacctgctgtgcgtagttgtcggcagagccgtcaccgcagaagataacgtcgtatggcccgatagcggcgacctgcgcggccagcgcctcggcgggcgcgtcgaggtctgccgctgcgtcgtcggcgaccatgaacagctcatcgacgccacgggcgaggatgttcttcttgagcttggaatcgtcgatggcagcgcctccgacggtaactgccttgacggaagaatcgccctgggcttctgcgagctgtgccgcagcttcgatggcgttcaaatcgtatgcggagacaatctgatgggctttggacatatcgagcgagccatcggctgcagctgtgatgtcctggtcatcgggaacgaccttgagtgcaacgatgatgttcatctgagcaccttcctctatcgatatttcaacagtgccagcgtacaaaaatacaggccaaattggattagtcatattttgtttttgtctgaatgcaggccgctgacgggcgcaaagacacggaaaatccggcacctggcatgcaggcctgaggctcccgtatgaacgaaggcaaaggcgcagtcgggaagcgcgcccattaccgtcggggcatttgcgctattcggcgtcgcgccttgaagagaggtacctcaaagagaccgtgcgcgtcgtgatcgtgccgcacgagacggtgcgcccctgctcgtcttttgcctcgacggcccacgtctgcttggagccgcgctctcccaggtcctgtgcggactcgagcgtcgcactcccccggatgacgccgcccgtcacgctgttgaggtggtacacatcgatgtgcgagccaaacgcgcgctccgtcgcgaaatccgtccccagggcagcagcccagctcgccgcggattccagaagcgatatcgtggcgcccccgtgcagaaagccaaagggctggacgagggcatcggtcaccggcatctccatgagcacgtgggtgggagactcctccaatacgcgcaggccgagggtttgtgccatacctgtgatatgcagcacctcatctgggcgcattctcacacctcacctttccgcgtttgccacgtcagttcgagcgtccacggagccgggcgcagaagcgcagctccagacttttcgttcggctcatatgtttatggcaaacacgagcgcaatgcaagatgtgcgcatatgcaacggggcgccatcgcatggtctgccgccaaacgatgacgccccgtttcacaaggactgcagcgaaagttcgccacatcctaaaggagggacctgttcacgtagccgcgagcgtcagccgagcatgccggctttcgaaacactcgatcatgtaatcgccacttaccttcgaacaaggacagtatttcacctgcgcttacacatagacaatggtcaaaaacgagatgtgtacaaaacgccgaaacgtataaggtgcccgcgtgcatctcgcatgcgggcacctacggtcagttacaagcagctcgacgaaaaccgctacacgctgagcccgccccatttctcttggaacaacgccgcatccatggtcttcagatcatcggaaacggcgggcgtgaagcccatatgcgcaatgacatctttctcgacgtcgatgccaggagcgacctcgatgagcgtgacggccccgtcgataagctggaagaccgcgcgttcggtaacatagagaaccgtctgatccttgccagcatattttccagagaacgtcacctgctggacgtgctcgacgaacttctccgccgtgccctcttcgacaatcttgagtgcgccgtcgacgacttcctccttcgcgtgtgccatgaacgtgccggcgaacacgaccttcttggcgctttgggtgatgtcgatgaagccgccgggaccagacagacggttgccgaacttggaaacgttgaggttgccctcggaatcagcctctgccagcccgaggaccgtgatgtcgaggccaccaccgtcgatgaagtcgaacatgtcgttatgacgcatgatcgcctgggcattgtagttgctgccaaagttgggcaatgccgcgggcacgccaccatcgccgcctgcctctgcggtaatggtgatcttatcgagctggccctcttcggcaacgatggaggcgacgtctgccgggatgcccacgcccaggttgcagatgcttcccggagcgagctcctgcgcgcagcgacggcagatgaccttgcgcggcgagaggtcgagcacggggagttggtcgagtggcttttttatctgaccggagaatgcgggctcgtagtagacgccttccgtctgccagcagcagtccttctcggtcgcctggacgacgtagtcgaccatgatgccgggaatctgcaccttcttcgggtcgagcgtcccgcgctgcgcgaggtattcgacctgcacgatgacgataccgcccgtgttctttgccgccatggcaacggacaggccctcgttcataacactctcgtggtcgaacgtgatgttgccgtcttcgtcggcgaccgtgccgcgcagcagtgcgacatcgagggggaagcccttgtagaacaggtagtcctcgccgttgaactggacgagctcggctgcatcgtcggtggtctcctcgttcatgcggccgccctcgaggcgagggtcgacgaacgtgcccaggccgaccttggtgagcagaccggggcgacctgccgcaatctcacgccagaggttgacgatgacgccctgcggtaggcaatggcactggatcttgccctcctggacctgcttgcacagcgtgaacgcggagccgatatgcgccgccgaccagcgcgtcaccagaccgggaccagcctcgccaagcaccgtgacgccgcgggtcttccagtcgcccatggcgcagccctgtttcaagttgatgttgcaggggtgccccgtttccttgaaacgatcgcgcatcgcgcgggcgacttcctctgcccatccggaaagccccatgccggcgatgccaaccgtcgcgccatcggaaatgagctctgctgcacgttgagccgtaataaactcggccatattcgccatcctcctcgtgttccgaacgatgcttacacactttactcctctgggatggagcagcgcttgccacctggccgccccctttgaactttgtgcaacatgccgcatgaagccacgtgctacagtgcaagaaaaaccatatccccactactttggtgtcacgtgcggcacatcgaaaaagacgtgcgacaaaaccaatccgttatcgctactctgccccgagcttgaagtcgtcgctgagctctgcccaggaatccatgcgccgtttgagctccgctttgtcctgctcgtcgtcgctcagcgcgatcaggtcccagcgcatctcgtcgagcgcggtcacgacggcgtcgatcttgccgtagggtatggagatcatgaagcaccccgacgggtagacgccccgcctgcgcatgccatggccgagccccgtcatcatgtagttgaccttgtccttcacgtacggataggcgtacagccacgcgcagcccatcacgcaggagctcttgctctcccacaggtcgcccgaaaggtagctggtcgcccgcatgaggatgtctgcctgttcgaaatctgccaccacaaagagcaggtccggatcgaagtcgcacgaggcgacgggcgcgaagacgacgaagttcgtggcgcccggattcaggcaggatatctcgtggtacaggcgcgcgtttgccgcctgcgtcttgaagacgccaaagtcgaatcccgcctggccgcttgcccccagcgctggcttgggctccatcccgaggaccatctttcccatgcagtcctcgtcgtcgttgcagatgtaaaacgccctgttctcgagcgcggccttcttggcgaactggcacagcgagagcttctcgtcgacatgctcgactcctgccgggcgtgcgaagcagtacttgaccgcgacgggctgaatctcacagcccagctttccgaacaggtcttttgccttttgcgacagcattccctctcccctctcgcgcccgcgggtctctcacaccatctcgtgagtcgcgtacatcgggtcgtctttccacaggacgaccgtgcccgccctgcgggtctcgttgaggtcgatgatacgctgattggaagagcccatgaagcgcagcgtcacgctgtagaggtcttgctcgaacgggccgtctaccaggatgtcgagcgcgtcgagcagacggtcggtaacctccgtgtgccgcaggctctttgggtcgacgaggtcctcgtagaggtcgcccgtgaagcaccagatggtcttgtcggggtacgcgtccttgatgcgctccacgaagtcgacgagcccgcgctggttatccggctccatcggctctccgcccaggatggtcagcccatcgatgtagtcgtggtccaggctcgtgatgatctcgttctcgacggcgccggtaaactcctcgccgttgtcgaacgcccaggtctcgggctggaagcagcccttgcaatggtgcgagcagcccgacacgaacagcgtggtgcgcacgccctctccgttggcgatgtcgcagtacttgatgtttgagtagttcatggcccgtcctctttcgatgagctttgcttgtgttcagtgtagcgtaagggatgcggcggctcccggtaca

SEQ ID NO: 1446 - DNA, 32759 bp, Unknown
  16S sequences of unknown bacteria
gttgttttgccaacgccgcctttctggttggcgatggcgatgatttgcgtgttcaaataaacctcctccttctacaaaaaatatccctattccgaaaaatagggataaaaaataggcttcgcctattcaactcccctgcccctcaatcttgaggggttaggggtttcttttttctaaaatctatctcataatagtcttatgaatatcttgcagaaaatttttacagaccattatgaagaaataaaatatactctccatcccagagacaccgaaatggaaaatatcgaaaagatgatccattgtggggatccttcctttggcggtgccatgtatcattgcccccattgtggcaactttaaatatgtccctttccactgtcacagtcggttttgcccttcttgtggaaacaaatacagcatggaacgcaccacttctatgactttcaaactcatcaacgttaagcatcgccattgcgtctttaccattgatgaaaatctcagggattttttcctaaaagaacgctcccttttggattgcctgttccattccgttgccagtgtcatttcccgcatgttttttgaacttaacaaatcaaaaaattttacgcctggttttatcatggtcttacataccttcggacgggatctgaaatggaatcctcatatccactgccttatttctgaaggcggtctcagtgatgacggcctttggcgaaatgtccatcacttcaattactcttttttacgttctgctttccgtaccgctctccttaatgagatgcaccaacggctgggcgatcctttcaaacagatcaaatccctctgttattcttctcataagaagggattttacgtttatgccaagccttcctcttgtgatcctgagactgccatcaaatatatcggacgctatctggggcgtcctgtgatcgccacttccaggatcgacaaatatgatggttctatggtcacttttcattacaatcgacacgaagatgataaatatatacaggaaacgatcccggttatggacttcatcaaacgtctgatccggcatatccctgagaaacattttaaaatgatccgctatggcggcttgtatgcacgccaccgcaaaacagaccagcagctccataaagtcatttccaaacagaaacgtcccattctacgcaactttaaccattggcggaatgctattctttcttcttttggttatgatcccctggaatgtcccatctgcaggcataaaatggagtttttggaactttattttaaccatcagcgtctttccctcgaagaattatatgagagatctatgtcccgatctcgcggaaagcgttcttctgcataactttctctgtttttatggtataattccctcataggagggcattgcaatgaaaacagatgttgaggcgctgcgtaaaaaatacatggataatcctccagaaggacttacttccacggacattcgccatatgagcgaggaagacctgctggatatggattattttctaaatgatgacgatcttgatgaagaatttggtgaggaaggtttttatcttttttaatccctagatcgtctatttgtgttgcccgcctaccggcgggcatttttaattcaaaagagcgccggcggcggtctttcctataaagtgaaaaaagccgcttactcaaataaatgaataaacggctatgtaagaaatattcgattgtaagtaaagttttatatcactgcaaaataacgaagtgcatctttgattgcttctaccttttctggtgtcggatgtttcctcggctgtttcaattcttctaccgcattaggagcatcatacatcggcaatcccaaatttcgctttacctctgcgatatatgcggtatgtaccttgaagccgtatttcgcttctatgtactccttaatcattttgtaggtcactttttctttgggcttatacgcttcggctcttttagcaatactatctaccggaatcttgccctcgccctctccaaactccacatcaatgtggatataactgtcggcttttttgtgggataaaagaactaccgtctcgacgtgtgtatcgctgtccaaactcatttccatatcttcctcaataatcggaagcttgaatttgatggatttgagccactgaccgttcggctgccgttcctcatagatatggatttcagaaatcagcgattccataatctgtcgcttctcctgctcgtccatgacagcgtacagcttttcaaaataaatcagcactttatagatattgtcagcagtgagtttttctgcttctattgccattttctttgctctgacttcaatcaacagattctccgtatcctctatcttatcatacatcttataaaggcgatcatcaaggtctgccttgcgcttgatgtagtgtttatcgtccgggtcgagagaatcaatctcatctatcaaacgggacttcgtggcatagctctgacggagctgtttttcataattggcaatctcctgctcaatggcagatgtatctatcttcatattgattttttgctgcatcatcgccgcaaacttcggattgctgaccagcttgataataacctccgcaacagcactgtccagcagttcctcattgatttgcttcttgtattcacacttatgaccacgggtcatagtgcggtgtttgcagccataatagaagaaattcttatatttcgtgccgtccggcttgtgcttgatgcttttgttgccgtacattccggctccgcaaataggacatttaagtaatccggtcagcaggtgtaccttattgtctttaccgttgtttaccttttcatacttcttcgcctgggcaagaagttttacttgggcttcatgccaaagatcttctgatacaatagcctcatgcagaccgtcaactaacagataattttcctgctccacaagccggtaatcattgcgagttccatgtaccttttctgttcttctcctgccgtaagcaattttaccacagtaaacgggatttttcaaaattctgcgaatcagggctgcatcaaacagaggattttttccattttgccgctgaattttgttgataccatgattggcaaggtatttcgcaagtccgttagcgcccatatcggtatgtacatactggtcaaagataatgcggattgcttcggcttcttcctcgttgatatacagcatacctttttccaatttgtatccgtagggagcaaaaccaccgttccatttaccctcacgggctttctggattctgccttccatcgtctgaacacggatattctcacgctcaatctcggcaaccgcagaaagcacggaaatcatcagcttaccggcatctttggaagaatcaatgccatcctccacacaaatcagattgacgccaaaatcttgcatcacctgtaaggtggaaagcacatctgccgcatttctgccgaaacgggataacttgaacaccagcacataagataccccatctttaccggacttgatgtcctccatcatgcggttaaattctaatctgccctcgatggactttcccgatttaccggcatcttcgtattcaccaacgatttcaaagtcattaaactcagcataggctttcattcttgatttctgagcatccaaggagtaaccatctacctgaacagcagtagatactctcgtataaatatatacttttattttttcttccatatcgccatcctcatttgtgccacagcctgtggcataattcagctttcatcgtttgttattttttgccgtcagttttctgttccagcagctttatcgaattcagataatcctgttccacatcactgagcgttcttgctttgtatttccgatattcatccgtagccttatccaccgcctgtttgtgagaaatgcttccatttccaattaaaagttgttctccgctcatagtgaggatgcgatccagatgctctgcccagtcctgcatcgtcattgcctgttcacgctctgcctgacgttccgcaaaatccagataaccggatacaagctgtcccatagcacgaagctctttctcatccagatagtttttcgcaacaatcgcttctttaagtgtcggctgattgcctgcgaaggtagtcaatcccataaactctttttctgcatccgctcttgtataaattacttctgccgctgtctgtccgtgaatggcataatggattttgttctgaacctttttgaagaaccggatagatatttccgctttcgggtcatagtcaatgctggtggcatagatttcaagcacctgacgatagaataccttttctgatgcacggatgtctctgattctttcaagcagttccttgaagtatccaccgccacccagatttttcaatcgttcatcatccaaagcaaagccttttctcatgtattctttgaggatattggttgcccagattctgaactgtgtgccacgcttggattttacacgataaccaacggaaatgataacatcaagattatagtagtcaacctgataggtttttccatctgccgcagttgttgcaaaatttgcaacaactgactctcgctgcaactcaccttcggaaaatacattttttatatgtcttgaaatagtagatttatctctttggaacaactccgccatctgatcaatggataaccagacggtatcttcatcaaatgtggtttcaatttttgtcaatccgtcttctgttgtgtaaataatcatattggatttttgattcatatcatcataattgttcacctgaacacctcattcctaatgtgcaacggggtattgcacttttattctatgtagctctatgcgtagagaacagtagctctcgcatagagtttggacacttattacacgactattatatcattgatttttcgttaattcaataatgccattggattcttcggagacattttctgtctccaaacaagacggcggctccggaagattatcaatatccagaaccgccgcatatttttctattaaatttgcaagtaaatcggcaaaaccattccatttatctgtcaatagtgctctcctttctttttcgtccacgttcctgcgaaatgtcctgtacttcttttcctcttattaaaacggcattaagaaaagcccgtaccctttcaggtgcgagcttgacagcatccagatacggctgagcctgttccagaagtttctcatatcgttttttccagacaccagcatctttcttggctgtttcatatttctgctggtattttaatttctccgctttttcagcaaagctgctgacagcataatttttgagcgtacggcactcatcaggtgtcaggacaatgttcccggtaaaagatttcttacccatcgactccagctcctgaaccgtcaccgctgttgcagttgccgccttggtctgcgcttgcagggatttaagctcctgctttttcttctccgcagcctgtgtggtatcatcaagctgtgcttctttccgggtcagctccgccgtcacagcttccagtcgctgcttttcctgtgccaccttgaactgggtcacggtcagatgttcctcggtgctgtcacgctctccacgctccacatcggtatatccggcagccctcatgtgctggtaaaaatcatcctgcaaaacagagtaggattttctaaggacaggcttaccattggcttgcagaattggtttcccgtcctcgtccacagcaggcttagacagccactttttactgcggctgacctgcataatggtttcctttactgttcctctgagagcttcatccttgcagcgtttcgaccacaaaatctgtttctccaccacagggacatagaccacatgaagatgataatggaacacatccttaccgagtgcttcggacattgctcggttgatctcgtcagcgtgcatgactgccgagaggatatactgctcgccgcctacaatctccacagcagatttataggcttcctcataaaactgtctggcgtattcataaccgccgtgattgtcgaagtacgcagagttcacatcaaagaccatctcattgaagtggatggcatcctctttcagccctctggtagaaatgatattgtcagccttcatctgctcaaacatttcagtgtagctcccagtcggttctttgaagtgtacgttgagatgacttctttccgggataatatcttcgttgctgtatatttctttttcacgctcgttgtgtgcctgggcatctccgatgtcgttatctgcgacatccatatttcttgcacaggtacggtcaactccgtcatttcttgccatagctttttcttcctttctttggaatttgcagacagggtagctttggagatgcacttctgcggaagtgtaataacccactatgacactttcatccatactggctgcaaagtgccgtgggctctcccgaggggctctccgaggggagtgcggtttctgcggaaacctctgccgagcatcggaaagttgtctgctcatctttccaatgtccggcatggacggctgctgttttgcgaaactgccccgtctgttgacagaaaaaagactgactttttcctgtcatttgggtacgtcacgaaggttttatacaggagtgatttacgctcgtacactgtgtacgtacgtaccaaaaatcaatcccgccattcctccggtacgtacgtacacggcgaaacatcgtaaaacccatttatattcggacgggctacggcttcaattcccatgaagccccacaccctgcgcccggcagagttcgtgattttgttggtgtgttccagattgtagcggcttaaatttgccaccacactgtcgctgaaactgcgggatttcaggggcggcaaagagttttcctcacaccacatccgatagatttcatacagttccttagagctgatggacgcatccgctttcagacggatgtagccctcagactccatgaagtcgaagatattgttgttgtcacgcttgacggactcacggtttgctttcgttcgctcgctttccgtgaatttgaaattgttggcaaccagacgctgcaatccctcaaacgcccagaggaaaatgccctccacttcagctttcatcttctgggcgaggtcagggtcatccattcttccggcaggcttttccttggtggtcagcaccagctgacggcggtagaaaccgtcacttcggtcatacaatgcctgcaaatctccgttagagaaagccagcagtcgggcaaacatccagccctgatagctctgcttgcccttgcgctccaaatccatttttccttgcgccgtcacaatggatttgacatagttggtctgacgcagagcttccatccgcatatcatcgtccacacacaggaggatatgctccagatcggcacgggcaaatcggttctcggagattttaccaatgctgccgtctttcatggagttgcccagcatttgtcccagcactgcaccgatttgagatttaccctcgccgccgttgcccttaatgaccatcatgcgctgtcccttgttggagggaatcaggcaatagccgataaactcctgtaaggtgggaatatcctccgggtaaagcagaccatccagaaaggaaagccacaacacaggcttcggtgcatctgggcgatagaaaaccgggagtctgtttcgtacaatgtccagcttcccctccgtaaaagtgccgtccagcatgagcgtaccgtttgccagatgaatcctgtcctgctccggcgggaaatcctccacatgagccgccagcttcataatctcaatgatgttgctgattttgcggggaatgttgttcacggcacaatatttcaattcctcaaagatttcgccacgaagcggcaggtcatccgtcacacgaccatcaggcgtgaaaaaagctccgtttgcaaagacaatctgacgggttctcagaaaatcttcacaaaacagagcttcattgatactcttgccgtcaaaccacatcgtcacattcatctcaagcaatttcctgttctctgacatggcagcgcacctcctttttctgctcgtccagtcgtgtttgcattcttgcaatcgttccgtctgtcaaaagttccttgacggtatcagccctttcttcctgatcgctcataaggagcaaatcgttcagatactccacatattccagtttgtggcaagcttccacgaacctctcatccggctcgttctccggtgtttcgggagcatatcgctctttccagtcctccaaaagatgaagataccctgatagcacattcatgcagaaaagctcgtcctgtttcaactggttcacacggggacggtacttctttacctgtgccaccacggacgggcggctgatgtccagcccaaagtccgcagccagtctctgcgctgattcataagcagacagaccaagcagccttgccgtgaagtcaaccacatctccggtagccccgcagccgaagcaatagaaataatcctcgttcagcttcaaactggggtgtctgtcgttgtggaatggacaacagaccatgttgttacggcttaccttcaagccgtagtgttcggcggcctgtcttaccgtgacagtcgccttgatgttttcaaacagattcatacgcatacctccgtaaattttttgacaatccttgcttgtcacctgaatatacggagaaaaaggctatagaccgaaaaatccgtcacttatgcaaaaaagaaaaagccgccccgatatttttgcaaaaatgcaaaaacacagagtggcgattgttcagaatttatatcttgatattattccactaattgaatataatattataagtttcagcgggaaggaagtgcagagaatgaaatatctatcaacctttgaagcggcagagaaatggggcatctcgcaccggcgagtgagcattctctgcaatgagggacgcatccccggcgcacagcgagcaggaagccgctggattattccggaggatgccgagaagcccgctgacgccagaatcaaaaacggcaaatatatgaaagcaaaaaacgagggaagggggatataacgaatggagaatacatttctgcccggcaccgtcagagagcggcttgccgatctgatgaagtaccacaaggtatctcaaacagatcttgcgctcaaaatcggatgcggcgacagcttactcagccgttttctgaccggaaagacagataagattggcgatgaaaacattatccgcattgccagggtgttcaatgtgtccaccgactttctcttgggtgtgaccaatgtccccgacagaaaaaactatgagattgacgaattgggcttgtccacacaagctgcaagaaatctctacaccggaaaggtcaatacacaggtggtcaaccgtttattggaaagtccccgctttgcagagctgacctacatattggagcagtattttgatgataccctcgctgccggatatgccgcacaaaatcaaatgtatgctaccctcagcagcttgacacggaaatctgtaaaatccgatgcagcgaatcaggccgcaaggaaaatcctgcaaatgagaactccggtttatcaggctgaccttgccaccattgaaaatcaattcatgctggcggttaaggaagtgaagaaagaaatcggaaatgactatgcagcggcacaggctttgaccgccgcagtagcggagaaaatgtttacggagcttacaaaaggtcaggatatggaaaatcccaaggtcacgccggagcaagtgaccgaactgattattggtagtgttgccggtatggaaggtgtcgatcaggaagcattggacaagctcggtcaggcgttggccggatttatgcagaccaccttggatcaagccgcagcacaggagaaagaaaatgaaaaaccggagcaatgagcagctctgcgctctggctcagaagggagatatgaacgcccgtgaccttcttctggaaaacaatttgggcttcatccgtaaaaccgccaacgagatttatttcggtatgaatcttggggagagcgaactcagtatcgacaaggatgatttggaacaggaaggctgcatcggcttattggatgctattccccgttttgacggaagcaagggcatcaaatttctaacctatgccgccccatccatccgaaacgctatgaccgacctgatacgggatgcgttctctcaatatgaaatgcgaatgaccgacaccgcagacggacttgcttttcagaaaatccgtctggacgaagttctccccggcgaagaacggatgctgcgcatcgaagcgatagccgaccccatcgccaagccgccggaaaagatttatatagagcaggaaaccttgcgtgagctttatgaggcattggacagaattgaagagcgggagcaagcctacctcttgtatcgttacggcttcacagacgatgcagagcatacgatgatcggtacggcaatccatttcaatttgcgtgagagccgagcaaagaagctggaagaaacggcgatggacaacctctggctggagctgccgtggtggttttagtgcgtttcgctgcggcgggattttatataccattggctcccccgttggcacagggaattttcgctttgctgaaaactcccaatgccaactacacccgaacagtcggattttgctcatggcaaatccttcgcttttgttgtctgtgtagccacaaaatccgcctgttctgctgcctctggaaactgcctgtccggtagggtgacagcccctttccagcgtcagcggtcgccaaaggtataacacactagactttgcaagcaaaatcgtgtgccaacagggatgcttctcgcccctattggaaacccagagccgagggattgcatccctctggacacccgcatattttcctcgaaaatggtacccaaactgtaaaaatgcagtttgacacctttcctcagaaaatataaaaccgctgtactctccatccttgcgaggatgaaaaatacagcggttttcttatctgtgtcttttgctttgacacagatatttccgtttcccttacttcataagttcatcggaaagcctgagaatttcaggagcgatcttctcacgctctttcttcaaggtgcggttatacagcgggtaggcaaggcaaacaggcacaatgccaacaacgccgataacaatacccaagagcatcccaacgtcttgatgaataccaattatttcgctcagatcggacattgcgagactcatgccaagtcccataattaaagctcctacaataccaacgacaagtgcaacggttgttgctttggaactgacgctcgcatccagacggcgaagctgagccatcttatcttcctgctcagtggtcgtttcatatttcttacgaatgttctgtatttctgtctgttccttggcagagtaagtgtagctaaaggtttctttatccctgttctccatttgatttctcctcttgaattttcatttctttgattctctttgaactctgtacaatcataaccacagccatagttatcacaaaagcagagacagcggttccggttgtgccaagcataattctgcgtgaagcaagggacatagagccatcattgaaggtagtgagcattgtggattctaatgtcagcatagatacacaggcggcagccatgctgatggttttgcttgcagacaatatggggctgttatatttgcggtactttatgagattgatgattgccatggtaaatgttgtgaacgtgtatgcagccatagcgatagccgtaatcatgttatgctcgaaagtacgattccaataaaccataaagaaaatgatcagagccaacgccgtgttcatggcaaggaatatccacccgcaaaaacggtatcgctttagttcggtttccattttctcgccgggcttattcttgcgtaaatagcgcacaagataaaatcgcatgacagcaagacaaatataatatccaccaagggaataataccaaaaggtgtgatgatagaagccgagccataactgaaagactgcataaattgtattccatgcggatgagccataaagcataatgttagagcgcagccgcagatcgccaagccatagctttacatacttgttctcattcttgatcgctttgaaaaattgaattaggtaaggtatccgaaaacaccaaattgtaagagtataggcggcaagcacataggaaacatacgccggaatcgattctgttccgatatataccatcgaaaatacaagaaacatcgttgcaatcggaagtaaaacaaccataacggcggtatggggatataaaattgattttataagttttcgccaatccatgtcacaccttttcgatcttcaccgtaaaggtcgtgccttttccgacggtgctttctacattgatttctccctgcataatgtccaccacacgcttaacaagagccagcccaagtccatttccctgggtggaatgtgacgtgtcaccttgatagaacttttcaaaaatgtgtgcgccgatttctggtgtcataccgcaaccggtatctcttactttaacaatagcatgatgactggtagcagcaagtgatacactgaccgttcctcctgcttcggtaaacttaaaagcattggaaaacagattgttccacacaagagacagcagctctgcatccgcttttacttttacatcttctgcaatatcggtctctatctcaatgttagctttttcccaaacactctcatactgcaacagacactcgcaaagctgttcgcctaaatcaaacacttccatcttcggaaagatttgttgattctcaaggcgattgagtttcagaatattggtcatcatatctgccatacgtcgggacgcatcggtaacaccctttgcatattcgatgcgcttttcctgtgacagttctgctccctgcagcaaagtgccgtaattctgcataaccgaaagcggcgttttcatttcgtgagatacgtttgaaacaaaatctgttcgtaaagtttcaattccagacaattcttgcgccatggaattgattgctataatgatttgattaaagccctctgatccagccccctgcatgggagagatacggacggaaaaatcacctttcataaatttttcggtggcatcggtaatgatttttacaggacgatccacggaaatttttcgacggatatgatccaccaatgtaaagaggactgcaatcaacagcacgttaacaagtgtgatttttgcggcggctgcaatattggttgccgtgaaggtcaagttcattgtgtcagccagcacattcaaaaacagcatcatacaacaggaaattgcaaagcctattgtcagaaagaaagccaagaacccactaatcattctcaacacattttgtaaggtcagctttttcatttgatcaccgccttgtatcccaagccatggacggtctttatttcaaaatcctcgcaatcagacaatttctgacggagcttcgtcatatacacatcaacggctcttggtgctgttccggtatctacatcccaaaactcatccattagctgtgttcgtgtgaaagtctttttggggtaggacaggagcttatataggatattgaactcacggcttgtcaatgagatttcatcgtcacccaaataggcggtatgctcatctgcatccatgacaaagctgccgatttcaagtttcctgctggatgcaattttcgcacgacgcaaaagcgcaccgatgcgcagaaacaattcatccagatcaatcggcttgaccatatagtcatccacaccgatacggaatccccgctgcttagatgcaatatcatcacgggcagtcataaacagaatcggaatgtcgttgttcacatcacgaacattccttgcaaactcaaagccatccacacccggcatcataatatccgaaacaataaggtcaatcgtgttttcatatagtgcgtcataggcttcattcgcatttatgcagcccacagcttcgtatccgctgttattcaaaaaggcacatactgtcctgttcagttccttatcatcttccaaaaccaatatcttaaacatcgtgttacctccgcaaaatccattaacaaagatattataccatgtaaatgttaaagttttgtttgcgtttagaagatacagatgccttttttgaaaaaatgtaaaaatggggctacatcatcaatgacatagccccatcttcactatgcagattacttactcatgatcttgtcgctgagtgcaataatttcgccagcgtatttcttgcggcgagaagccaaaattttcttgtaaacaggatagttcatgatcgccagaaccataccaataactccgatgacaatacccggcaccatcggattttcaatatcaacggttgtaccaatgtcggtcatcacaaggctcatgcctgctcccataatgattgcgctgatgctgccgaaaacataggaaaagacgtttgccggacgcttaaccttgcggtcaagatctctcagagcatccagctcggtgttttctttttcggtgtactgtgttctgattttctgcacaagaaaatccttgtcattcttattcatgataattacctctttcatattttttacgggtacattatatcgcaccaatgtttttgaaatctttgagaaatgtttgcgttatgttaatgtgcttattttttgtcgccggaaagccttttcttggcatcctccacactttcaccctccttagtgaacagcacctcgacacatttatcagtaaccttgccaaagccttctactacgcctgtttcaatcttcttatagccaccgactacaccatcctcaattttcttgtagcctttaactacgccctcggcaatcttttcatttgcttctacgaatttagacatatctgtaatctccttttcttgattttgtgaccttattatacctatcggttgtttgcgagatttttgagaaatgtttgtgttttgttaaaataaaaaatgcccgcaggatttctcccacgggcgaagttttgtttagctatcaagcggtttgtactccgttacagttttcagatatatttcgggatcgccgttcagcacgatgtctgcatatcctctcggatcattgtagatcagatagtcaagctctgaccgttcgtacatattacgggcaacctcgttctccacggcaatcgtatcaatcgcaatcatgctaccatcggtgaatttcagctccacacaggcaatatccatgttgaactcgcaagaaagtaaactctccattttgccctccttagatcatgccgaagtgcttgagcgcctccttgattgctttttccttatcgggcgggcatttgggctgctttgcatcatcggacttcggtttgttgtaattttctcgctcaatgatgccgtatttctgcttcacttgggcgatatacaagctgctgaccttgagtccggtatgctccagcacatattccttgatttccgaataggtggctttcttctctgcatcggtgagatcaagttcgtccatgtggatgtctacctcgatatgttgcttcgcattaagtttggacaataaacataccgtctccacatgcgcggtacccgggaacatatcgacgggggtgacggcctcaatattatagtcctcggcggcaaactgctttaaatcgcgggcgagagtggcggggtcgcaggagacatagacgacgcgcgtggggcgcatggcggcgatggtcgtgataacggcggcatcgcagcccttgcgcgggggatcgatgacgatgacgtcggggcgctcgccgcgctcgtagaggatgcgcgcggcgtctttggcgtcaccgcaaaggaactcggcgttcgtgacatggttgtgcgcggcgtttttgcgggcattttcaacagcggaggggataatctccgcgccaatgagcttcttcgcgcggctcgtcatggaaagaccgatggtgccggtgccgcagtagaggtcaagcagcgtttccgcacctgtaagcccggcgtactctgcggccttgttgtaaagcgcctccgcctgcgtgcggttcacctgataaaacgcgtggggcgaaatttcaaactccagcctgcagagcgtatcgcggatcgtgggcttgccccacagcgtgcgcagctcgcgacccaaaacgacatttgtgcgctcgcggttgatgtttaacacaatgccggtaatttccggcacagcctcgcgcagcattttgacgagcaagtcttccccgtgcagctttgcgccgttcgcgacgatgcacacgagcacctcaccgctcttttcgccgcagcgcatgtaaaggtggcgcagaacgccgctgtgcgccgcttcatcgtagatgctctccccgctcagtttttgccacgcgcggaacgcttccgccgcgcgatcaaacacctcgggctgcaaaaggcaggtgtgcgtgtcgatgatacggtgggaattcacggcgtaaaagcccatctgcatttcgccgtttttggaaagtccgatgggcagctggcatttgttgcggtaacgcgtgcgggacggcgcgccgaggatcggctccatggggatattttcaaagccgccgatgcgctccaaggcgtcgcggacacgctgcgttttgatcttcagctccgcttcatacgtgatgtggcggtaaacgcagccgccgcacgggcctgcaatgggacaatccggtgtggtgcgatcgggcgacggcgtaagcagctcctcgagccgcccgaatgcgtactttttgaggacttttacgacgcgcacgacgcagcggtcgcccacggcggtaccgggcacaaacacggccatgccatctgcgcggcagatgccgctgccctcggcggtcatggcggtgatctccgcttcaaacaaatcatttttctttatcatggaaaaacctccgtcaaacacaaaattctctttttcatgcataaagcagagaacatgcgggtaatttaagggtgagatacgatttcaaacggcttatgtggaaaaacgcggtcaatttatatgtgcaaaatatacacaaatttttattttgatttgtgcgacaatagcaaaagggagattgtttcagaaaccgttgacaatcgatatttcagtcgctataatagagacataacaaatgacaacgagctctgcggtaaacgttaccgcgacttttcaatacaactcctccccaaaagagagcaaaaggcgagattcatttctcgccttttgctcttttctgcattactttttacagaaggcttttgaagtctccgcaaaaagcgaaaagagcgtaaaatcacgaaacgacgttctgcggcgtgccgctccggaacgctttcaggttctcggcgacagtcttaatgagacgggcgcgcgcgtctcgggacgcccacgcgatgtgcggcgtgacgatacagttttgggcggtgagcagcgggtcatcctttttcggcggctcgtgcacaaggacgtcaagccccgctccggcgatgcggccactattcagcgcctcggcaagggcagcttcgtccacaactgcgccgcgcgccgtattgataaggaacgcagagggcttcatcaggttaaggcgctccgcattcacaagcccacgggtctcgtccgtgagcgggcaatgcagcgagacgacatcggcatttttgaaaagcgcgtcgagctccgcccactgataacgctcggacagctcccgtttcgtgcggctgtatacaagaattttcatgccgagcgccgcgccgagctttgagacggtctgcccgatatgtccgaagccgacgatgccgagcgttttgccgtacagctcaaacagcgggtgcgtgctgtggctcatcgtttcggccttatcccagtcgccgccgcgggtggcggcgcttattttttcggtgtgattgcacagctccaaaagcagcgcaaacgcctgctgcgcgacggtctccacacaataaagcggcacattgcacacggtgatgcccagttctcctgcggctttgacatcgacagtattataccccgttgcaagaaggccgataaagcgcagcttcggcaatttctgcatgatttcgcggcttataacattgcggttcaagatgacagcttcggcgtcctttgcgcgctccacgatttcttcgggcttagtggaatcatacacggtgacgctgccgagcgccctgagcggcgcccacgagacgtcgccggggtttgtagagccgccgtccaaaataacgatatgcatagcgaggtcctttctgttttcattttttatcctacatgtaaaaatgtgttatagctctttctaacggccgtttctgacggccgtttaagaacccccttgataggggttcttacggctgaacagtcccccggactgttcggactcgtcgtttctttcgcttgctattataccgcattttgttttttgtttcaacgattttgcgcgctgtttgtcaaaggattttgtcatcctctacacatatttgcagtttttaaaacttagaattgcaatttcacaaaaatccgattataataattctgttaagcgggaaacgttttcacggcgtttgccgcctgtgtattttcggcagataaacagaacacaaacagcagaataccgcggtttgcggaggaacgggggacttctatgaactacgatcgaacaccatttgaaacggacaagcccggcgaggaatgtggcgttttcggcgcatacgattttgacggacacgacatttcttcttccatttattacggattattcgccttgcagcaccgcggacaggaaagctgcggcatcgccgtcagcgacaccgagggtcccaaaggcaaggtggattactacaaggacatgggccttgtaaacgaggtattcgacgaggagcgtctcaatcgcctgcacggcaatatcggcgtgggccatgtgcgctactccaccgccggcgcgagcaaccgcgaaaacgcgcagccgctcatcatccactatatcaagggcacgctggccgtagcgcacaacggcaacctgacaaatgccgttgacctccgcgaaaaactaaagtacagcggcgctattttccagacgaccattgattccgagacgattgcctactacatcgcacgcgagcgcgtacagacgaaaaacgtacaggaggccgtcagccgcacgatggacaaaattgagggtgcctatgccctcgcggtcatgtccccccgcaaactgatcggcgcacgcgatccctatggcttcaagcccctatgtatcggcaagcgcgacaacacgtatttcctctccagcgagacctgtgcgcttgacgccgtgggcgcggaattcgtccgcgacgtagagccgggcgagattgtcaccatcacgccgaacggcattctctccgacaaatcgcactgcctccccgccgaaaagcaggggcgctgcatttttgagtacatttatttcgcccgcccggacagccgcattgacggcatcaacgtgtattccgcacgtctgcttgccggccgtttcctcgcgaaagattcccccgtggatgcggatatcgtcgtcggcgtgccggaatccggcaacgcggcagcacagggctacgccatggaatccggcatcccctacggcacggcattcgtgaaaaacaactacgtcggccgcacattcatcaaaccgaagcagagcagccgcgaatccagcgtgcgcgttaaattaaatgtcctgcgcgaggttgtcaaggataagcgcgtcatcctcatcgatgactccatcgtgcgcggcacgacgagcgaccagattgtgaacatgctgaaagacgccggcgcaaaagaggtgcacatgcgcatcagctcgcccccgttcctgtggccgtgttacttcggcatcgatgtgccggagcgccaccagcttatcgcctataatcacacggtcgacgagatctgcaaggagatcggcgcagatacgctcggctatttacgtttagagcgtctgccggaaatggtgaacggtctcggcatctgcacgggctgctttacgggcgactaccccattcccgccccggaagaagacattcgcggcgaatacgaagcgtaacgcgtttctgtcggcaaaaaggctctgctcacaaacgcgtggtggatcatcgtcattcccggcgtgttccttatcgcaacgctcctttgcatcaccagcctcagcagtaccctgcaaacgggttcaagccgccgccacagcaatttgtaaaatcgaatttacctgtatacacaaaaacgctcccggcataaaaaccgggagcatttttcatttcgtgttttagcagcaaaggtgtcgcttcaaaaaacagtctactgtataaggtttttattccgccttggaaagcagtccgtcgatgaactgacgggcaagtctcgcggagcggttgccacgctccagcgcaaagcgctcggcgagcaactccagttcctgcgtcggcatatcgatgccgttttcctccgcaaggtggcgcacgatgtgcaggaacgtgtccttgttcggcttgctgaacgtcacgtggatgccgaagcgctcggaaagcgatgcaagctcctgcatcgtatcgttgcggtgaatgtcatcgccctcacggtcggagaacttctccttgatgatatggcggcgattactcgtcgcgtagattgccacgttctgcgacttcgccgtaacggagccctccagcaccgctttcagtgcattgaagttatcgtcgtccttgaggaacgaaaggtcgtcgatgaacagaataaacttcagcgggttcgcagaaagctcatcgagaattttcgggatcgactgtaactgatccttgcgcacctcgatgatacgcaacccctcgcgccacagcgcattgacgacggctttcaccgtagacgatttacccgtaccggcgtcgcccgtcagcaaaatgttcgccgcaggtttaccctcgagcagcgcctttgtgttatcgatgatgatctggcgctcgcgggcgtaatccacaaggtcggaaagctccgtcttgtccggattgctgaccggcacgatctcggcattctcgccaaggtagaacatacggtttttggcgtaaatgccgtagccgtacttgccgatgttctcggtgcgctctgtgtagcacgctttaatgtccggcgcttcgctgacaaagccgggtaaaaagcccctatactccatcgcgctgcgcaacgtttccggcgtgagctccgccgtcatctgcagcgttttaagctcttccaaaacggcctcgcgcaggtaagcgggaatctcttcctttttgcccacagcctgcacgtagacgttctcgctgttttcgcagatttcgcgcacatacgcgccgagtatgccgccgtttgcgcggtacagcgcagagacgaacgacgcatacagcgccggggacggctctgcgagatacttacgcagactatttataaccgcatcttcctgtaattctctgaacaccgccagcgtggaaaggcggatgctcaactcctgtaaactacccatcagttcaaaatcgcccccgaagcaccgctggagaccagcgccgcatagcgcttcaggtagccggaaagctctttcttcttcggcacaaagttcttcatgcgttcattgaggacagcctcgtccaccttcagctcaattttgttctccggaatattgatgctgatgatgtcgccttcctccacaacgccgatggggccgccggaagccgcttccggggaaacatggccgacgcacgcaccgcgcgttgcgccgctgaaacggccgtccgtgatgagcgccacgctgttgccgagacccatgcccatgatagcagaggtcgggttcagcatctcgcgcataccggggccgcccttcggaccctcatagcgaatgacaacgacgtcgcccggtacgatcttgcccgcgttgatggccgcctgtgcgtcctcctcgctctcaaacacgcgtgccgggccttcatgcacaagcatctccggcagaacggcagagcgctttacaacgctgccctccggcgcaagattaccgcgcagcacggcgatgccgccggtctgactgtacggattctcgatgggacggataacgttgtggttcaggttcacgcaattcttgatgttctcgccgacggtcttgccggtcacggttatgcagtccgtgtgcagcagaccctttttgctcagctcgttcatcacagcgtacacgccgcccgcttcgtcaagctcttcaacgtacgttctgcccgccggtgccagatggcacaggttcggggtcttttcgctgatctggtttgcgatgtcgaggttgatctcgatgccgcactcgtgcgcgatggccggcagatgcagcatactgttcgtggaacagccgagtgccatatcgaccgtaagagcgttcataatggcgtccttcgtcatgatgtcacgcgggcgaatattctttctcagcatatccatgaccgccatgcctgcgtgctttgcaagctcgatacgtgcggaatataccgccgggatggtgccgttgccgcgcagacccatgccgagggcttcagtcaggcagttcatggagtttgcggtgtacatgccggagcaggagccgcatgtcgggcaggtcttgcactcatattcgcgcagcttttcttcggtaatcttaccggcgttgaattcgcccaccgcctccgaaatggaggagaagctcgtttttgcaccgtctacgtggcccgcaagcatcgggccgccgctgacaaacaccgtcggcacattaaggcgcgccgccgccatcaaaaggcccggcacgttcttgtcgcagttcggcaccatgacgagcgcatcaaagccgtgtgccaatgccatggcttcggtggaatccgcaatgaggtcgcgcgtgacgagcgaatacttcatgccggtgtggcccattgcaatgccgtcgcataccgcgatcgccgggaagacaatcggcgtgccgcctgccatcgcaacgccgatctttacggcgtccacaatcttatcgatattcatgtggcccgggacgatctcgttataggagctgacgatgccgacgagcggacgttcgatctcctcctccgtgaggcccagagcatggtacagcgcacggtgcggcgcgttctgcgtaccgattttcagagaatcacttttcattttatttcctcgatccgtgaaattttggctgtggcgcggcgtcccacatggaaaaacgcgccgtgtgtaaatagggtttaagccatagaggaaaactcccctatggctatccccttaaaacagattccgttcaaatcagttgttgatgagcttatcctcgtcgctccagctgtacagcttgcggatatccgcgcccacagcctcgctcggatgctcggaagccagcttgcgcattgcgttgaagtgtacctggccgcctgcggaagacatgtcgagcaggaagtcctttgcgaaggtgccgtcctgaatgtccttcaggatcttcttcatggtcttcttcgtctcctcggtgatgatcttcgggccggtgatgtaatcgccgtactctgccgtgttggagatggagtatctcatgccggcaaagccgctctggtagatgaggtcaacgatgagcttcatctcgtggatgcactcaaagtacgcgtttctcgggtcgtagcctgcctcaaccagcgtctcgaagccggcctgcatcagagcgcaaacgccgccgcagagaactgcctgctcgccgaagaggtcggtctcggtctcggtgcggaacgtggtctccaaaacgcctgctcttgcgccgccgataccgagtgcatatgcgaggccgatgtcccaagcgtcgcccgttgcatcctgctcgaccgcgatgaggcacggtacgcccttgcctgcctgatactcacttctgaccgtgtgacccgggcccttcggcgcgatcatgatgacgttgacgttcttcggcggcttgatgcagccgaagtgaatgttaaagccgtgtgcaaatgccagggtcttgccctcggtcaggttcggctcaatgctctctttgtacagtgcagcctgcttttcatcgttgatgagaatcatgatgatgtccgcagcctttgcagcctcggcgcttgtcatgaccttgaggccctgtgcctcggcctttgcccagctcttggagccttcatacagaccgacgataacgtcaacgccgctgtccttcaggttcagtgcatgtgcgtgaccctgcgagccgtagccgatgatggcaacggtcttgcctgcgagcttctgcagatcgcaatcctgctgataaaaaattcttgccatgataaattacctctttctgtgcatgaattggtatgttaatttaaatggacaaactaaattagaaattgatggcctgacggatcgtcgtgctgcccttttcaagggaaacattgccggtgcggcagatctcaaggatctcatagtcgcgcatcaaatcgacgaattcatcgatttttcgcgattcggaggtcaggcaaagcatcagggaatccttggagtaatccatggtcgtcgcgccgaacgcgtccgccgcggcaaggatgtcactgcgcgttttggaatcgtttttcagcttaatgagcatcagctcgcagctgacggaggtgtccggggtaaactctttaatggagcaaacgtccggcagcttataaagctggttcacgagctgctgcttctgcgtctcgccgccctcaaacgtgacggtgatgcgggaaagcgcgttcgattccgtttcgctgacggtcagagaaatgatgttgaactgacgtcttctgaacatgctcgtcacacggttcagcacgccgaactggttattgaccagaaccgctacggtatatcgattcatctcattcacccaccttcatgataatatcatccatgctgccgcccggcgggagcatgggcaggacgaattcgtccttatcgattctgcaatcgatgacatacgggccgtcgcagctgaacgcgtgctcaaacgccttgtcgagcgccgccacggtatcaacagcctcgccgtccgcgccgaacgcgcgcgcaagcgccacaaagtcggtcttgcggtcgagaatcgtgttggaatagtgcttattaaagaacagcgtctgccactgacgcaccatgccgagcacgccgttattcatcagaaggatgacaaccggcacgttgtaggttacggcagtggtgagttcgttgagacacatgccgaagctgccgtcacccgtgacaagcacgctgcgctcgcctgtgccgaccgccgcaccgatggccgcaccgaggccgaagcccatggtgccgaggccgccgctggaaatgaagcggcgcggctttttaaagttcacgttctgcgccgcccacatctggtgctggccgacgtccgttgcaacggcggtattctcgccgaggtgcttgttcagcgtcatgatcgcattgcggggcgtaaggcccgggcgaatatcgagataatcgttttcggtttcttttaaggctttcacagccttttcccagtcgggcttctgctctgcgttgacgagcggaatgagcttttgcagcgtcagcttcacgtcgccgcgcaggccgcaggcggagttcacggttttcgagagctcggagccgtccacgtcaatatggatgatctgcgcaagcttcgcaaacttctcgcggttacccgtcacgcggtcgttaaagcgcacgccgagcgaaatgatgaggtcggcatcgtgcatcgccatggaagaagcgtagtggccgtgcatgccctgcataccgaggaaacgcgggtggtcggtcggaatgccggaaaggcccatcaaggagcagccgatcggcgcgtcaatcttctcggcgagcgccagcatttcttcctgcgcttccgatgtgatgagaccgccgccaaagtaaatgaacggacgcttcgaggcattgatgagcgccgcggcttctttgatgcgcacgtccttcgccgcgtggcgttcttcgggctgtacgggtgcctgcggctcgtagtcgcagaccgctgtctgcacgtccttcggcacatcgatgagcaccgggcccggtctgccggactgcgcaagcgcaaacgcctcgcggatggtgtccgccagattctccacagagccgacaaagtagttgtgctttgtaatgggcagcgtcacgcccgtaatgtcgatctcctggaagctgtccgtgccgatctgtgttgtcggcacgttgccgcaaatcgcgacaagcgggatggaatcgaggtacgccgtcgcaatgccggtcacaagattcgttgcgcccggtccggaggtggacatcaccacgcccaccttgccagtcgctcttgcgtagccgtccgccgcgtgggcagcgccctgctcgtgcgccgtcagcatgtgacgaatttcattctggtatttataaagactgtcgtaaacgttcaggatctgcccgcccggataaccgaaaacggtgtcgcagccctgttcaattaaagttctgatgaggatatctgcacctgtaagctgcattcaattactccttcgttaagtattcaaggatgaggtcgccgcactttttgcagccaaccttcgtcatgccgtcttccataatgtcggcagtacggtaacccgcgtcaaggtacttggaaaccgcatgctccaccgcatcggcttccttcgccatatcgaagctgtaacgcagcatcatggcggcggaaagaatggtgccgatcgggtttgcaaggtcctgacccgcaatgtccggtgcagagccgtggatcggctcgtacaggccgcagctcgttgcaccgaggctcgaggacggaatcatgccgatggagccggtgatcatggaagcttcgtcggaaagaatgtcaccgaacatgttctccgtcacgatgacgtcgaactgtgccggattcttcacgatctgcatcgcgcagttatcgacgagcatatcggtcagctccacgtcggtgtattcttccgccaagcggtgcatgaccttcttccaaaggcggctcgtgtcgagcacattgctcttttctacggagcacaaacggtgattgcgctttcttgccgtctcaaatccgatgcggccgatgcgctcgatttccgcttcgctgtacttcatgatatccgttgcgaccggctgaccgtctgcatcatcggtcttatgctcgccaaaatagatgccgccgatgagctcgcgcacgatgatgaaatcgatgcccttttcgacaatagattttttcagcggagaagcgtcagagagctgcggccagatctttgccgggcggttgttgctgtaaacgcccatacccgcgcgcaggcgcagcagacccttttccgggcgcttcgggcccggcacatcgttccacttgtcgccgcctacggcgccgagcagcacactgtcggaagctacgcacttatcgagcatttcctgcggcagcgggtcgccccacttatcgatggcacagccgcccatatcgacgtctgtataatgaaaggtgtgtccgtacagctctgcaattttatccagcacgcggagcgcttcgtttacgatctccgggccgatgccgtcgccgcggatcaccgcgatgttcttcgtcatttgttttccgcctccttgagggacttcagcaagccgcctgctttgatgatgttctgaatgaacggcgggaacggctgtgccttatacgtcttgccggtcgtgatgtcggtgatgatgccggtatcaaaatcgaccgaaacttcgtcgtttgcgttgatctcgtctgccgcttcctcgcactcgagaatcggcaggccgatattgatggcattgcggtagaaaatacgcgcaaagctctttgcaatgacgcaacccgtgccgcaggttttaatgacgagcggtgcgtgctcacgggaagagccgcagccgaagttccagcccgccacaatgacgtcgcccttttcgaccttctttacgaacgccttgtcaatatcctccatgcagtggagcgcaagctcctgtgcgttcggggtgttgaggtaacgtgcgggaatgataacatccgtatcgacgttatcgggatatttgaaaaccttgccctgtgtgttcatgcttacgcctccttatattcggtgatgtagccggtcagcgcgctggctgccgccgtgtgcggagaagccaggtacacttcgctgtccacatgacccatgcggccgacgaagttgcggttcgttgtggcgatgcagcgttcgcccgctgccagaatgcccatatagccgccgaggcacggaccgcatgtcggggtagaaacaacagcgcccgcatcgataaatgccgtcacgtagccgcgctccacgcattcgcggtagatctgcatcgtgcccggaatgatgatgcagcggatgccgtccgcaatcttcttgccgttcaaaatgctgtacgccgcttccatgtcttccattctgccgttcgtgcagctgccaatgacaacctgatcgaccttaatatcgtgcagctcgcttgccgggtgcgtgttctccggcagatgcggacaggcgacggtcggcacaatctttgcgagatcgatatcgataaccttttcgtattccgcgtcggggtctgcttcgtatacaaccggctcgcgttcgcttctgtcctgtaaataggcaagcgtaatatcgtccaccgggaaaataccgtttttcgcaccggcctcaatcgccatattgcagatgcacaggcggtcgtccatggagaggttcttcacgccctcgccggtgaactccatgctcttatacagcgcgccgtccacgccgatcatgccgatgattgtgagaataacgtctttgccgctgcaattttccggcagcttaccggtcaggttaaatttgatcgcggacggaaccttaaaccacgccatgcccgttgccatgccggctgccatatccgtagagccaacgcctgtggagaacgcgcccagcgcaccgtaggtgcaggtgtggctgtccgcgccgatgatgcagtcgccggcggtcacaatgccctgttccggcaaaagcgcatgctcaatgcccatcttgcccacgtcatagaagtggctcacgcagtggctgcacgcaaactcgcggcacgtcttgctctgttccgccgccttaatatccttgttcggcacaaagtggtcgagtacgatcgtcactctgtccttatcgaaaacgtccgtaaagcccgctttcttaaactcatggatcgcgaccggcgtcgtgatgtcgttgccgagcacgatatccagctttgcattgatgagctgaccggcggtaacttcactgaggcccgcatgcgccgcaaggatcttctgcgtcatggtcattttcattttagtctccccctttaatcatattgttgtaagcgctcaacagcgcctttgtattcgcctttacaacgtcggtgtcggtgcctgcgccccagaacatcgaaccgtcttccttttcaaggccgatgtacgaagccgccacgctctgcgagccctgtccctgcatactgtgctgggtaaagacctgcaaggtgtactctgcaccggtgtacgcacgcagcgcgttgttgatcgcgttgagggaaccgttgccctccgcttccatctcggtctcttcgccgtccttcgcaaacgtgatgccgatcttcacgttgtccttgtcgcgcataaactcaaaatccgtcacggtaacaccgttcgtcagattgaggtagttctcttcaaagatattcagaacctcatccggcttcagttccttgtgctcgtggtcggaaatatccttacacagatagctgaagtgctcgcgcattttcggcggcaggttatagccgtacgtctgctccagcagataaccgatgccgcccttgccggactgggagttgacacggataacgtctgcgtcgtacgttctgccgatgtccttcgggtcgatcggaatgtacggtacgttccactgatgcagcttatttttcgctctgtatttcatgccctttgcaatcgcatcctggtggctgccggaaaacgccgcaaacaccagtgcgcccgcatacggggctctttcgtacacatgcatacgcgtgcatttttcatattcgtccacaaggtacggcatgtcggagaagtcgagcttcgggtcaacaccgtgggagtacatgttcatcgcaagcgtaatgatatccacgttgccggtacgttcaccgttgccgaatagcgtaccctctacgcggtctgcgccggcaaggagcgccaactcggtgtccgcaacgcccgtgccgcggtcgttgtgcgggtgcagagacaaagtcacgaattcacggtacttgaggttctcgctcatgtactcgacctgcgaagcgtacacgtgcggcatgctcatttccaccgtgaccggcagattgatgatgacgttgttcgtctcgctcggctccagaacgtcgagaaccgcattgcagacctcgagcgcgtattccggctcggtgcccgtaaaggactccggggaatactcaaagcggaagttgccttcgtattcggccgcaagctttttgacgagcttcgcgccgtctacggcgatcttcttgatctcctccttggacttcttaaacacctgctcgcgctgtgcaacgctgacggagttatagaagtggataatcgcgctcggtgcgcccttgcacgcgtcgaatgtcttacggatgatgtgctcgcggcactgggtgagcacctgcacggtaacgtcctcgggaatcatgttgttgtcaatcagcgtgcggaggaactcatattccgtctcgctcgccgccgggaaaccgacctcgatctccttaaagccgacctgcaaaagcactttgtagtattcaagcttttcttcaaggctcatcgggatgacaaggctctggttgccgtcgcgcatatccacgctgcaccagatcggcgccttttcaacgtggtctttttccacccacttgttatattctttcgataccgggaagtacccgaccttatatttgcttgcgtccatcattttgctttctcctctcaacccttggtggttctgaagcctgcttcacgcagggcgtttttgatcgttttcacatggttgttgtcgcgcgtctccatttcgatgcgcaggaagcagccgttaatgctttcggtgttgcccttttcatagtgcacgccggtcacgttgccgccgcagtccgcgataatcgaagagatctccttgagctgaccgggcttgtcgataagctcgatgaggaggctcgcggaacggccggagttcatcaggccgcggtcaatcacgcgggaaaggctcgtcacatcgatgttgccgccggagacgatgcacacaacgcgcttgccctttaaatcaaatttattgaacatcacggcggcaacggaagcagcgcccgcgccctccgcgatcattttctgcttttcgatgagtgccaagattgcgctcgaaacttcgtcctcgctcaccagcgcgatgtcatccacatattttttgacaatctcaaacgtgttgtcacccgggcgctttacggcgatgccgtccgccacggtctgcacggtgtcgagtgtctcgatcttgccgtcgtgaatggagttgtacatgctcggtgcgccggtcatctgtacgccgtacaccttcacgctcgggcggatgtgctttgcggtatacgcaatgccggagatgagtccgccgccgcccaccggcaccacaatggcatcgatgttgtcaaggtcgttcagaacctccagcgcgatggtgccttggcccgcgataacgtcttcgtcgtcaaacgggtgcacgaacgtatagccctctttttctttcaattcaatcgccttgttatacgcatcgtcgtaaacgccctccacaaggcaaacctctgcgccgtagccctttgtggcctccaccttggagatcggtgcggagtccggcagacagatgagcgatttgatgccgtttttcgttgccgccagcgccacgccctgtgcatggttgcccgcggaacaggcaataacgcctttcgctttctcttctgcggaaagctgggagatcttatacgcagagccgcgcaccttaaaagagccggtgatctgcaaattctcgggctttaggtacaggtcgcaatccggcgcgatgccgtaggtcttcacgacgtttgtttcgcggatgatgctctttagaacggtttgtgcatcaaatactttgtctaatgataacatgttcttctgcctttcctgctgtgttcggtttaaagccttatgaatttgaaagtttgtgctttcaaacttgcagcttgttgccttgttcttccgctttgaagtgtaaaaaaaccgcctcaaagccgtttatgctttgagacgggtgtaataactaaattatgcactcgcggtaccactcaaattgcggagaacctccgccactcttcgaagtccaataacttctatgcactgacgtagcaatcacgggataccctactgaattcgctgttcaggcatccggctcggaagggagaaatctctgcatctctgcaccggtttacacctgccaccggctctctgaaacagctctgcacagacagtcttcgtcatcgctttttgttatgaaattgaatagattataacacc

SEQ ID NO: 1447 - DNA, 4074 bp, Unknown
  16S sequences of unknown bacteria
cgtttctttttctctcgcaagagaaaaagaaatgtggggcgcagccgttcccccctctttcaagaggagaaaaacccccgccccgttgcggggcgcaaaggttctcccttcttccaagaaggacaaaaaccaccccgctgcgggacgcagctgtcatttcataaacatgcggatcagtttgttccccagctcgctgtaaggcgcatagcgcatcggcagatccatccaggtggatttgtccacaatgcttttctcatgggagaaagtgtcaaagctccgcttgccgtggtaggaccccatgccgctctggcccacgccgccaaagcccatagcgctggtggccaggtggatgatcgtgtcgttgatgcagccgccgccgaaggcgacgcgctgcaaaaagcgctccttaacggctttgttttctgtaaacagatacagcgccaggggatgggggcggtcgcggacgaaattctcggcttcgtcgatggtatcgaaggtcagcaccgggagcacgggaccgaagatttcttcctgcatcactgcatcgtccggcgtcacattatccagtaccgtgggctggattttcagggttgccgggtcgctgccgccgccgatgattaccttttgcgggtcgatcagaccgcacacgcgctcgaaatgcttctgattgaccattttcacatagccgtcgttgtccagagcattctcgccgtacattttggcgatccatttgcgcacatgggccaaaaaggcgtccttcaccgtccggtcgatgagcaggtagtccggggctacgcaggtttgtccgcagttgagaagtttgccgaacaccagccgttttgcggccagatccagtttggcgctgcgctccacgatgcaggggcttttgccgcccaattccagcgttaccggggtcaggttccgggccgctttttccatcacttctttgcccaccgtcacgccgccggtgaaaaagatgtagtcaaacacctgatccagcagggctttgttttccgcgcggccgccttccactacggtgacatattccggcgggaagcattcgctcacaatggtgcggatcacagcggatacggcgggggagtatgccgagggcttgacgacgcagcagttgcctgcagcgatggcgccgatcagcgggtccatggtcagcatgaaagggtaattccagggggacatgatcagcacgacgccgtaggggttggcgaccgtgaagcttttggcgtggaactgagccagcggtgtgggagcacgacgctttttcatccagtgggacaggtgcttctggatgtggctcagttcagagagcgtcatgccaatctcgcacatgtagctttcagagggagatttgttcaggtctgcgcgcagcgcagcgttgatgtcctcttcgtgggcgaggatcgacaggcgcagacgggccagcgcgtcccggcgataagcatagggcagggtttttcctgtgcggaaaaaggcccgttcccgggcgacggtttcttcaatggtcatggcgtgtcctccttcggcatcagcttgtaatacatcgtttccagttcctgtgcgtccatcagcttgggcacgggatagaggggattggactctttggcggcatgggcggccagcgcggggatatctgcggcgcggatctccgggatgcaggaaggaatttccatggcccggttcatctcccacacccaggcgataaaggccctggccgcaggttcgtctgcagaggtctcctctgcaatgccggctttgcgggccaggcgcgccagtgctttgtggcagcttggaccgtattcctccagaaaatagggaaggatcaccgcattggccagaccgtggggcacgccgtactgcccacccagagagtgggccacgccatggacatagcccacataggaacgggtgaaagcgatgccggcgtcataggcggcttggagcatctgggtgcgggcttcggcgtcctggccatcgcgataggcccggagaagatactttgcaatcagggttacggcttcctctgccatggcgcgggtcagcttggtggtggagcggccgatataagcttccaccgcgtgggtcagggcatccatgccggtggtggcggtgatctgcttcggcaggcccagcgtcacatggtaatccagcactgccgcgtccgggatcagcgcaaaatcgttgatggggtatttgtagtgggtagcaggatcggtgatcacagcggccagggtggtttcgctgcccgtgcccgcagtggtgggaacagcgatcagcagcggcgttttgcgcaggaccttcagcaggccgcccatggcctgcactgccttttgtgggcgggcgatgcgtgcgccggcggctttggcgcagtccatggggctgccgccgccgaaagcgatcatggcctgcgcgccgctctccagatacagtgcgcggcattgttccacgttgtccacagtggggttgggcactacgccgtcgtaaactgcacaggcgattcccgcttgagaaagggctttttccaattcttgtgtaaggcccaaggcgcgcagcggagcgtcggtgatgagcagtgcacggccgatgtgctcccgctgcagcagggaggggatatccgtcactgccgtcagcagttccggctgccggtatggcaggaggggcagcgccaggcggaagcagatctgatagccgcggcagaaaagccgggaaaaaggattcataaaaaaacacctccgacaaagaaacgagtattagaaattaaaaaaactatagcaccggggcggggagcttgtcaactgagtgcgggcgaaaaaagcagctccggcaatgctttgcgcactgccggagctgcttgtgaaaaaggagagatcagccgctgtagctttcaccgaaggggttgccgtaataatagtaaggaatggaagcgcctgaatcgctggagctttgggaggcatcctggctctgctggggctgggagccgaaagtgaagtccagcgtgacttcctcaccactgcggttgacggtcatctttgcgctgtcaccggccttatagctctttttggccgtcatcagatcggtcatggaggagatctccgtgtcgcccagcttgacaatgatgtcgccggcacgcagatcgctctgagctgccgcgccgtcctgctcgacgctgtatacgtacacgccgctggaagtgggcaggttatactgcatctgcatctgctgcgtcacggtgccgccggtgataccgagataggctttgtcggtgacatagccgttctgcataatgtcctgcaccatcgcgtacacatcattgatgggaatggcgaagcccagcccctccacagtggtgttggagtatgtggaatatttcgccgaaacgataccgatcacttcgccgtaggtgttgaacagggggccgccggagtttccgggattgatggcgcagtccacttgaatcatattgaagggagtgccgtccacagtgatggcgcgattggccgaggataccgaaccggaggacagtgagaaggtcagctcacccaggggattgccgatggcgatgacattgtcgcctacgttgaccttgtcggagtcaccgatggtaacgggggacaggccggttacgtccactttgatgacggcgatatcatagtcctgatcgccgccgatgtacactgcatcataggtgtcgccgctgtaggtagtcactttgatgctgtttgcattttccaccacatggtaattggtcaggatgtaaccatcctgggtcagcacaaaaccggaaccggaggaagcctgctctacggtttggccgaaaaagttggtttgtgtacccacgttgatactaaccacggaattgacgttggcggcgtaattctcagagttggtcatttccgttttgccgtccaccttcatttccttcacttcattcactgtgcggttgctgacctgcactgtggtggagggccgcaaaaagctgtttccggcggcgctgccagccacgccgcctaccaggccgccgcccagagcgcacaccagcgccagggctatgatcttgcc

SEQ ID NO: 1448 - DNA, 32759 bp, Unknown
  16S sequences of unknown bacteria
ttcaaatgaattatataaaaccgacggaacaatgccttcggctaaatcacggacaacgtcgtctgctgtacagggggaagtcagttcagccgagtcaaccatgccgtatgcttcgggagtggacacgccaagtccggacggagctatcagcacatggtatttcggcttgcataacgtgagctttgtgattttctcgcctattccgcggcagacacagcatcctccgacaatgcagaacggtatgtccgcaccaacctttacgccgatagaacaaagctcgtcctcggaaagattctgcccagtcatgtcgttcagcagcttcagcaccgccgcgccgtcagttgagcctcccgcaagtcccccgcttatcgggattcgcttttctatgtggatatgcacgtccagtcccgttattttcgtgaattcaaggaacttcgccgcgcatttgtgtgctatgtttttctcattcagcggaactcgggagtcgtttgaggaaagcgtgattctgttgcagccgagactattttcggttatacggacagacacttcgtcgcacagcgatatctcctgcatgactgtttcgatttcgtgatatccgtcctctctctttccgcagacgttgaggtaaagattgattttcgcgttcgcttttgcagttttttccatatcagtgtatcatttttatcagcggattctgctttgcgtcaactgctccgattggacataactccccacagcagtagcactttatgcagttttcacggtgaatatgtgcttttttcttctctatcgttatcgtgtggcgtgggcatgagcgggcgcatactccgcatccaacgcatttttccttgtttacatggggcttagtctcaaaaaaagccgcgaaccttccgtcgaaaaggtttggcaggtttttgaggaacttccctgcgtcggtgtcaggctttttgaagtcaagcgtcgggcattcactcattccgaagagtgggatatcgctaatgttacgcgagacaagtcccctttcagccgcggcgttaagatgcagcacgtttccgtcagagccgatgatgtgctctccaacaacgtcaagtgagaactgtgagcgcgaggcgagaataagtccggcttttttcggcgtaccgtatgacggaccgtttccttccattgccagaaccgcgtcgcatacggctatgaattccttttcgcgcagcaccatttcgctcagatccacaagcatctgtgaaaagtcctcgatacgcgggaagttggagtgcatttcaaatttttcaactccggggataagtccgaacaggttctttgtcgcgcagctcattccggtgagagtgtgtgttttgagcttgcatatgtcaacaacaacatcgcagtcgaaaaacggacttatgacgtgcaggtttttcagcttaattccgtccgtgtacatcgtcttgaatgagcagtcggtgttcagcttgaggtagtcaagaccaatctcgctcagtccgcaggttcggtacacgtttgagatagtcgcggaattgtacggacctccgggagaatccgccgctgttatggatgacgctccaagctcgtgcaggacgacggcgacagcttttatcacggcgggatgtgttgtggcggcatggtcgggaaccttcgcgaggacaagattcggctttatcagcaccttctttccgcttatcaagctctcgtcaactccgatggcggaaaaagcggcgcgtattatatcggtaagtcggttttcatcgtagtcgggacattcggttatgtaaacaggtgaattttcagtcattttttgcttccgtattgtgtaaatattagtaatatcaacggtattataacataatttcggacctatagcaataataaattacgcgcttaatgaggttaagacataaaaaatccctctaccaatgcactttcctgtcctccacatcgttagttttgggtctaacttttggggacgggaaagtgcagcagagggacaaatattattttgcttcgggatattcgttgcagaggagatacttcggttcaacatcctcttcgatttcggggaagcgtcccacggagtcaaagaagcgcaccttgtcggaagtgtcggcatcctttatcgcgccgagatatggcatacggtcgacaggctcatagaatcggttgtccttggagtcgtcgttgcactggctgacctcgcctacgagaacctttccgtgaccttcctcaccccagaacgcgtggtagagcttctttgtgttagtcatgctcatgccgggagtaagtctgataacgctgcctgcgggaaccttgtagtggcgtccgtcaacctgaatctcaacgtcgtctgcggagaattcgtcgttttcgtcagccgcgtatacctttatcataagatttccaccgccgcgattgattatgtcctcctgcttgtaccagtggtagtggtatggagtcgtctgattttcgtcgactatcatgattttttccgcgtaaaccttgtggtcgtcgggattgtgagcgtttccgttgcgcagtgtgaacaggaacaagccgcactttttgtagtctccgcttccgaagtccgttatgtcccaaccaaggcagttgcggcgtatttcgtcgtattcgtgattcttttctttccattcggcggctgtaaaataagcgaacggtggaagaagaaacttgtgctcaccgaggaattctgcagcttcttcaatgattttgttgatttctgatcttttcattgttctaccttcttttgtgttatcaataatctattacagccatagcatgacagttcagcttgtctacggtgtaagctaaaaccccgttttcatatgtgaacggtatgtcgcgcttttcgggagcaagataaactctcttcggcgtcttgtcggtgcgcagctttacggtaatgtcgctgagcggaatgatgtcttcaattacttcaattccgtttccgcgctttaccggggaggcgtaaagcaggtggtttacaagtctgtgctccgcagtctggtccatgagcgtaacgacgccctgagcggggagatttgtctcgattgtcttgtcctcgccgagaagcaggtttattatgtggtttgttatgagctttgcaataaggctgccctttgtcgcgtactcgctgaatatctttgtcgagatgtatgctccgtcatgtcctatcgtggctgcggggaaacgttcggatttgttgttcggcgtgtgctgatgtgagcagaatgagaatgtcgtgcggttgaagtacgggttctcgcgctcgacaactacttctccgtcggcttcaatgtcgtaggactttgagtagattacatacgcggtgttgccgagaactcccatgtcgaagcacgggcggaagtatatcggtgagaacgcgctctctcccttatagcggcatccgaggtcaagcatgaatttgtcgtcgtaacccacagcgctttctcctgttgcaagcacacgaccgccgcaggagacaaacttctttacggctttctccagtctctcgtcaaatcttacgctgtcggggaggatgagcagcttatacttttcgcattcgccagagaagagggagtcggtgtcgacaacgtcaaacaggaactttccttcaagcagcattcgtacaacacccgcgtcggaaccgttgtcgccactgtgggggaggtgattctgctcgcagtagtttgctacggcttcttcggaaagcacggcaatatcagcgacagatgtaactccatcaagccattcctcgcgctcttcaacctcggagtacgccgcgccgattaagtcgtatgtaacctcatccatgtgtccgtccgggtgcatctggtcgccgacagagcatttcgcaccgttcgccacgcagagagcttcctcgtatctgagtgcgttcgggtgcttgtatccgccgaattcgccccatgtcgtgtggaattttcccgtcattccgagaaagttcttgccgagagttcttgaatatgccgcagagagaggaaagtggtcgtatccccatccgcctgtcgggagagattcaagctcgaggtgggagtcaacgtccgcaaggtcacgtcttccgcgtctgatgtgtccgctgttgtggaatacgggcagtccgggctttatcctgtcaacggcttcacggacgcggcgggtgtagttttggtaaactctttcgccaagctcacgcgcattttcgtcgttgtacgggtcttttccttcgtcaaggagagttttcacgcagttctggcaccagcaggtacgaacgcctactatgtcgagaaaaataccgtcgcagtcatagttccgtacaacctcttcaatctgcgcgatgaggtagtcgaggtagggggagttcatgcaaagctcgtggaagccgggatattcccatccgattctgtcgtctttcggccgtctgagccattccggatgcttgtgcgcgattttctcgtcaaatccggctgagagatacacgggagtttttactccaatctcatgtgccgcctttatctccgcgtcaagcaaatcaaactttaatccgggatgcatttcgttagcttcgctcggatgatacgcccagccgtggtggcattttgaaaatacggttatcgagtttacgtgaccgcgtttgagtgcgtcctgaaactgttccttcgagaagcacgagccgataccgtcaattttttcgcttgtatgaaagtcaagatgtacctgtctgaaattcatttttcctccaaaaataaaccgagttcattacgaaaagattttatcataatgaactcggaaaatcaatagctgattgttattttgtgtgctggaatttcgtgaaaagtgtgaaataactacatttatgagatttttatctctgttccttttccgcatctatcgcgaggacaagcatgagaacgtgcagcgcgtttttgtcgtcctcaacgtcaatgcagtacgtgtcagtgaggttgagtatttcctttgaaatgtgagctatcaggctgccgttttcatcgtttacatcgtagtcccattcgagaatatcgccttttacgctccagttcatgtagtcaatgtcaaactggggagtgagaagtgaaaattcctttcgtatagtgccgatttcctctccgtcaacctcaatgtcaaaagtcggcagaatggtgaagaatctgcgtgtgagctttgccgcttcgtttccgtcgtggtcgagaaccgacaaggttttggtgagcgcgaattgtccttcgactgtgtagactatgttgtctccttcgtcatacacgtcgaacttgtcaaaaagtgtgaaaaactgctgcttgatgatgagcttcatggtgttatcctttctcagaaatatcgctcacgacgcatttcgcccagaagcacgacttcagcatgggaatacccgcaaacagctttatcgtctcgctgaactgcaccgcgaagtatatccagactatgctgatatcagtgaagcggcacatgaacagcgatatcattgcgggaactacccacgtgaatacggagtcgaacaggaaggtgatgatcgtctttccgccggagcgtattgtgaagtaaatattgtgtataagagcgtgaatcggaagggatgcgccggctatcatgaggaacgtagtcgagagagactgaacctccggctctaccttataaagaagcgggataaacggagctgaggcgataatgagaagtcctatcacgatatgcgcgactacggtaacgaaaaggagcttgttgtcaacgtctatcgcgccttcttcatctcccgcgccgagcttctgaccgacgaggattgatacggcagaacccatcgcgaacatgattatgcagaacaggttccacgccgtagttgttatgtttatcgccgccacaacagtaagaccgcggacggaatagttctgcgtgacaaatgtagatccgagagaccagagcacttcgttaacgagcaggggagttccggttatcgctatgcgtttgacgagctgcgcgggaacatgagggcttttgtaagcaccctcgatgaagcggaacctgtcgggatggcggtgagtagcgacgactactactataagctcgacaaaacgagacattaccgtagctatagccgctcctcttacgccgagagcagggaatccgcagagaccgaagatgaggagcaggttgaaaacgaagtttactgcaatagccgcgacgcttgcgatcatgggagccacggtttcgccggtttctctgagtgttcccgcatatgcctgaactatcgcgaacggtatcagtcccacaacggcaatgtcaaggtatgcgcaggcttcggagagggttttcgctatgtcctcggcggagtttgcttcacttttcagaaacagcatgatgagattttctccgaacactgtaaaaacaacgattgcgatgaccgatgtgactatggagaatatcattttgaagcggaatgtgtcgcgcattcctttgtagtcgccgcttccgaagaactgagttccgaatatggacgcgcccgagattccgccgaatatagcgaggttgaaaacgaaaacaagctgattggcaatggaaacggcgctcatgtggagtgttcccagtctgccgaccattaagttgtcaagaaggcttacgaagtttgtgataccctgctgtatgatgagcggaagcacgagtatccagaggattttataaaaatttctgtcgccgataaatttgcgcttgaaggattttagaaaattcatatcagagtattgctttctttagtgattaatatgataactcagtcgattttaaaaccgaagaagttctttgtgttgttgtagcagatgtcacatacgagggtagccagagcttcgggatcaaaggggtaaagtccgtcctctacccattctccgatgatgttgcagagtatgcgtctgaaatattcgtggcggggatatgaggtgaagctgcgcgagtcggtgagcattccgttgaatttgccgaaagcgctgacgtttgcgagctgtttcatctgggcttccatgccgtcgatagtgtcgttgaaccaccatgcagagccttgcattaccttgggatatccgtcctcggaggtctggaagcagccgagcattgacgaaatagcggcgttgcaggtggggtctaccgaataaactatggtgcgcggcaggccggagtgcttttccatgagtgcgagcagctctataatgccctgtacgttagtgtagccgatggtgtcaaagcctgtgtcgggaccgagcttcttcatcatgactgggttggcgtttctgcaaactccggcgtgaagctgcattacccatccgcgctttgcatactcacccgcaaggaatgagagcatttcgcatttgagcaggcacagcatctcgggagtaacttccttgccgtcggagttgagcgcggtttcgagagcacggtcggcggcgtattcgttgggctttacgtacatcgggaactcgtcaagtccgtggtcggcggtgcggcatcccattttgtcgaagaagtcaatgcggtttacgagagcttccttcagcgtagcaatgttctttatgtgaactccgcttgcctcgctgagcttttcgtagtacgcttcaagccccggcttgtttatgttgaagcacttgtcgggacggaacgcggggagaacctgagtgtcaaacgtgtcgtcttccgctagcatcttgtgccattcaagtgagtctatgggatcgtcagtcgtgcagatgaccttgacgcgggactttcttatgagattgcgcacgctcattgaagggtcttcaagcatcgcggaggtaagctcccagatttcgtcaacggtgtcgggaccgagaataagtccgcagccgaagaatctcttaagctccagatgtgtccagtggtaaagcggatttccgatgagatagggcatacactcggcataagccttgaacttttcgtagtcggaggcgtcgcccgttatgtacttctcgggaactccgcagcttctcatagctctccatttgtagtggtctccgccgagccaaagctccgttatgttggagtactgcttgtcctctgcaatttcgcgcggagaaacgtggcagtggtagtcgatgatcgggagatgttcagcgtacttgtggaaaagaacctgcgcggtttcgtttttcagaagaaagtttctgcccataaagtttttcattttacttgttctccttcgttacggtattatatttgtggttgaataattcgtcaagataacaaagagtgtcctctatcttcggtatgtcaagctcctcgccgaccattaccggggattcaagggtgagagtgccgctgtaattcatgtcgtaaagcagggacgcaacctcgtcaaagtctattactccgtctttcggatgtagaatgggtcggagcgcactgaaattcctgtatccgccgacaaaatcgctcacgtgaatgtgctctatcctctcgtctatgaccttgtccgtgagagtttcatttatctgttcgtgcagcttgccgaatcgcgtgtcgaaaatgaatccgccgtttccgaggtagggaagaaccttgtgccagtttgagagaggatcgtgcgcgcttgacgggatgttttcgatgagcaggcgcactccgttttcgtttgcaatggaggtaagctccggcagctttgatatattgtattcaacgttcctgtcggaggagaaaccgccccagagatgaagcaccattcgcgttatttcaagctctcgcgcgacgtcacagttcagccggaacagccgcacagcctcacggtacagttcttccgcttcatccggtttgccgtcggacataagcacacccgcgtcggagatttttgttccgatttccttttcgcagtgtatcgttacgggattcacgccgcttttttgcacttcagatacgatatcgccgagcttgtcgtaaaagaaagtcagcatcataagctcgcatccgacgcaaaaacctttgtcctgtagcttttttatctcatataacgcccttttgtagttaaatccgttgctgcgtcccaccattgtgccggttgagacaagtgtatttattgacatataagacctgatttcgcattattatttcagtataataatactatactgttttcgttttgtcaataagtacggagcgctttggcagattcagaagattttcagcttaacgcacgtacatgagagacaaaatctgcgtcaaaacggtatgtaaaattcgcggagatgattatcggcgtttgcctaaaataaaatcggcgtttgcctaaaattactgaggcggcaaaaaatccgagccgactttgcgcaatcagttcggatttatttgaaattatcatcttaaagtatctgacagatttctttcagctcttttgcaagctcaaaggcgaactgtcttatttcaaggagaggcgtgtcaacatcacgtctgaatttggctattttcgcggtaggcggatatgccatcggtatcatgtcgcagccttcgagcagatacgcggcgtactcacaagcttcaagcagcttttccttgtcgctcggacgatagtcaaagccgtcgcaggtgtattcggtaagcgcgtttttaatcatttcgaccgctctgtctgccgctccctctctgttcggaatgggaagcacaataccctctccgcggtttctgaagcatcccatcattgcggcgatagttgcgggatctcgcacagttccgtcgggatagaaaactccgtgctcgctgtcgcatcttccgtgaataatcagctcatacacgaaccatcccatgttgtacttctgacaagccgcgagagccatgtcgtacggatttgctcgtgcaaggcatcctgtttcggtctggagcacgggcttgccgtatttttttgaaaggctgtcggcgagggaatagtttgcgtcaatggagcgcgatgttccgttgtagtcgtggaatgagagcacgtccactgaatccgcggtgggttcaatgtcaatggcggtggtgtgtcctacggtgatggcgttcttgtggtcgagattcttcacaaaagcacagtatctgcggacgaatccccacattttctcgtactttgccttctgaatctcatggtctttctcgccgaatatccagtcgttgcaggaaggctcgttcattatgtcccacatcaaaagtcccggctcgtctttcagcgcgttcacgattgtccgggtgtattcgtctcccgcgggatagttttcctcgtctatcatgtgcgggtcgagcatatttccgttccagataataggcatgacgcgatatccgcactcgtagcactcccttgtgtatctgaccacgcgctcgatgtagcctgttttgtcagccgcatatgccctgtagtcgagccagaagcggacggagttcagattcacacgctttccgtagccgagctcttttttcagctgctcgccggaggacatatagtgattcactccgcgcacccacgaataatcatttaaaatctccatagttttaccctttcgttttgctttgtattgcagtatcattactttagcagaaaaatgaggtattgtcaattgcagtgaaacaaaaaatccgagccgactcgcctgaatcagttcggatttgctttattatttttaaaactctatcgtccgctcagaggtaaaatccttgctgtgataggaaacggtacgcccaaattcgttctgctctgtcagcctgcggaactgcgcgtaaccgagatgtacgggataacgcagcatatcagctttgccttgactgaacagcatctcgctgaacgagcctttctcaagcgttcccgtcatgacagctcttcctccgagggacagtacctgttctgctataacttgcgccgcactgcttctcagctgaggatcgctcacaaatacaatgccgtccttctctccgctgtactgtccgacagaagaagtgattttctcatccttataccagaatccgccggagttgagttcagtgaggttcttcataaacagctcgtcggcgtaatatttcactccgctcagattgtccgagaacagcttaaatatctcaatcccgcgcccgtatttcggtacagggaacaacagaatcgagcgctccgacaactgcttttcagtctccgaaacaagcttttcgcagtattcggaatacgcggcatcatcttttccgtatgcgcagtcaagcacggcgaggtcagctttgcgattacgaatcacgtcgcaagagtaaacctgcgtgtcctccgtgtagtctcccgagaagaatattgttttttcaccctcgctgagctgcaaccacacgctgcccgcgcaatgtccgcttctgccgtattctatcccgagactgttaaactttcccgtaccgtgtgggcagatttcgctcagagtgcggtgtttttccacattaaagggaagctgtcgcaaggtatcaacggacgcgatgactgttccgttaaatccgttttcgtaaagccacggaatcgcacctgtgtggtcggtgtgagagtgcgtgaggaatacggcgtcgaggctcttgatttgctctttcgtcaggcgtgggtacgggtcgaggggagtgtcagccatctttccgcagtccacaaggaagtttatactttccccattcacgagaaagcagtttcgaccgtgttcccctacgccgccggcaatatacagcttcatcttatgcccccttgcgctttcccgtgaagtgattgaatatcagcagcgccgtcgttgtgataagcacgcagagcacagccatagccataccgagcgagacgctgccttgttcaaattcgcggtttatgtaggtggagacgacaagggtgttcggcggcgcgataagacttgcggtgacaagctcacggaaagcgataatgaatatcatcatccatcctgcaaagataccgcgggagatcatcggcagagtgacgcggcggaatacatacgagggagtgccgccaaaggttcgtcccgcttcaagaaggctctcgtttatctgggtaaaagcggaagtgacgaactgcacggtgtaaggcaggtacagcaccacatatgcgagcaccataatgccgatagtgttgtacagcggaatgactttgtatatcgcgttccagaacagcattatgccgataacaagaacgatactcgggagcatctcaggcagaagacttacgccctcgagagtttttttgaaaaatccctttgactttctcacagctataacgaccgccgtgccgataatcgagcaaattgtagcggaggacacagcgagaaacaggcttttccatatggaagagagcgctttcggtgtagtcagcagctccttgtagtggtccagcgtaaagttgcccgcagccagaccgtatccgcgcagttttatgagtgaggttgatataatggagaagtacggcacgcctatagctacaatcacgacagccgcaatccaaagccacgcgagaacctgacccaaaacggaaagatgtgttctcgcgggacggcttccttttccgctgaccagtctgtagctgtttttgcttgtgatgtagttctgcatgagccacatgacaatacaaatgcacacgagaacggaggaaaggcttgcggagcgtccgaaatcaataggagcggtggtggagtagcggtggatgtcggttgtgaatacgtagaatcctatgcggcgaccgagggtgtaaggcgttccgtattccgagagggtcttgacgaacacaagcagtgcgccgatagcgtagtttcccgtgagaagtggagcgaatatcttgcgaagtctctgtgtaaatcccgcaccgaacaccgcgccgctttcctcaagacttgcaggtatgttcatcatggcgtttttgagcatagtcataaggaacgggaacacatgaaggctcatcacaagcacaagtccgccgaaacagaagaatccctccgaccatgagcctgtagaggggaacagctgctggaacagtcctctcttctgcatgaacaaaatccatcccattgaagcgatgtacggaggcgtcatgaagggtatcatgaatacgatgtcgagccagctgtgacgtgaaagctgagtccgcgcgagaagatacgctgtcggtacggcaatgactgtcgagcagagcaccacgcacacgccgagcagcattgagtttcggatagtctccaaattgtcggggtttgctatgttttcccacgcctgataaaggtcaaggcgaccatcattgacgatcgccttggcaaaaaccattatcagagggcataggatgagtacggcaagcagtattagcagcagcgccgacggcagattctttttaagatcttgtttcatacgccctcgccgttttatttacagagactgttcagcttagctgccgtgtcagacgctgcgtccatcatcttggtccagtctgtggtaatctgggggatggtaatctggggaatgtcggagaggtttgtacggctgtcgcactgaatatcgctgcgtccggggagaagataagcgtccgcaacgagcttctgcgcttcatcggagaagaggaagtcaacgaatgcctttgcgttatccatgttgggcgcggtctttaaaatcattgcggggcggggatttactacggtgcctgatgcgggatagtagatgttcagcggttcgccctttgccatcgaggagtaagcattgtagtcgacgccggcaatgagaatacccttttcgcctgtggtgacagcttcaagagcggctttgttagcttcgggaacagtcagaccgttggcagcccagctttcgataacagcttcaccgttgtcggtacctgtaacgaatcctgcgagaaagtccttgcaagcgccggatttttcagggtcgggaatagctatcatatccttgtactgcgcgtcggcaagctctgaccagtctgcgtccagctcgggtactacggttgtattgtatatcacaccgactgctgatgcgcttgaaccgaagagcatattgtcggagtctatccatccctcgtttaccttgtcggcgtttgcggaagtgtagcttacaagctgaccgtctgctttcatgctgagtccgtccgaccatgacgcgagaattacaacgtcggctacgggatttgcctgctcagcttcaagacgcgcgagtatctcgcctgttgtgccctggaactgctctacctcaacgcctgtcttctcggtgaatgcggttgcgagcttatctgcaagacctgcgggactgggcatgtagaccgttaccttaccggagagctttgtttcggttgtgtcggcagctgtagtctccgtcgatgtgcctgagcttgtgtcctgagattttgtttcattctgagactgacttgttccgcaggaggttatgccgaagcaaaggcaaagtgcggtaagcagacataacatacgttttttcatgctgatagaacctctttcgtttcaaaagttatgatttgagttttatctatgtaaacggacagcatctcgccgggctttgctttctgcctgctgtggatagtccatgttacattttcgtagggaagtgttatctcgtagctgcttccgaggtactgaacgctttgtacgggaagctcaaagtgaagcgcgtccttctgcggcgaaagtgaagcggcttcgggtcggaacatctcactctcgctcagccagtttgacttgccgacaaatttcgccacaaactcagtcgagggggaatgataaacgttttccggcgcgtcgtactgctcgacatatccgccgctcagcaccgcaatactgtcgctcatgctcatagcctctgtctggtcgtgcgttacaaagacggatgttatgccaagcgcggaggtaagctcggtcagctcgtgtctcatttcctcacgaagaagagcgtcaagtgcggagagcggctcgtcgaacaatatgcatcccggctttaccgctatagctcgcgcaaaggctacacgctgctgctgaccgcccgagagctgatgaggatatctcttttcaaagtcctcgaggtgaacggtacgaagcgcgtcatgcaccctctcctttaggcccttcgtgtcctttcttgccctcagcccgaacgcgacgttttcaaataccgtcatgtgaggccacagcgcgaaatcctgaaacacgaagccgagattacgcttttccgggggaagatttatgccctgctcctttgagaaaacacaaatatcgtcaagccggatctcaccgtcgtcgggtgtctcgagaccggctatcatgcgcagaagtgttgttttgccgcatccggaaggaccgagcagtgtggtgaagctcccgtcgcggattttcagtgttgtcggataaattacctgccttttgtcaaagctctttgcaatctggttaagttgaatttccatagcgttcctcttttctgcgttcctacatattataatgtggctttgtaaattgcacgacccgagatgtgtaaagtgcgggtaaagtctcaaaaagcggaaaaattaaaaacattcgccttgcttttttatctgaaacgaaatataatagaatggatacggtatcatatcgggaaagttatggattttatactgggatatattttaaaattgacacggaacacaaaaattcgatactctgacaacgcgaaaggaaacacaacactcctatggggaaatataaagagcttgcgaaaaatacagtaataatcagcgtcggcacaatgctgtcgaagatagtctcgtttttgatgacgcggttttacacgggcgtgctgactccggcggaatacggtacgagcgatttgctgaactccacagtaagcctgctcatgccggtcatctctctcggaatagcggacggcgtttttcggtatctgccggaatatccgcgttcaaagaagagcgttttcagcataggaatatacatggtaacggcgggaacgctattgcttgcggtttttctgcctattctgcggcttgtggacggatttgacggatatctgcctttgcttgtgtttataacgctcgcagcctgctaccattccgtgtgtgagcagtatgttcgtgcaagcggagacacaatgctgttcgccaagcaggggcttatgaatactatgctcgtagtcacgctgaatatagtgcttttgaaggtgttcagcctcggcgtaacgggatatatgcttgccgtgggtctgtcggactgcatttgcactgcctaccttataataaaaaagcgcctgtgggggaacttgaccgtacatccgaacaagcatatgctgaaaaagatgctgcgctacagtattccgctcattccgacgacggtgttctggtggataacgagcgtttcagacagatacatgatagccgcaattctcggaagcgaagcgaatggtatctacaccgttgcgaacaagctgccgacaatgctgacgctgctttcgggagtgctgatgcaggcgtggcagtattcggcggtgagcgagtcgaaaagcagtctcgaggaacaggcggatttttacagcaacgtgtggataggacttctctcggcgatgttctttgcgtgcagcggaatgatagcttttgccaaggttgaggtaagcattctcgccgctcccgaatattacgaagcgtggagatgtgtgccgattctgtgcgccgcaatgctgttctgtgcgttcacttcatttatgggcagcgtctataccgtcacgcagaagagtacgctctcactctggacgtcccttctcggcgcggtgataaacgttataatgaacgcactgctgattccctctcctatgggaatatacggcgcggcatttgcaacatgggtaagctattttgtggtgttccttgtgcgctctgtcaatgctcgaaagtacatcccgttccggctgttcggaaaggtgttgtttataagtacggcgttgcttgcggtgcagattctgttcatatgctttgaatggacgggatggatagcggtgcaggcaggagttgtggtgcttatgttccttatcggcagaaaacagatcatggaaaagataaacgcgttccgcagaagagcaggcggcaaaaaggcttaaactaaatacataaaacaaacgcgcttgattggctttgatagctctatcggcgcgtttttgttatgtcttcggattcacacaaaacaaaaaagacccgcaaacctaagtaggtctgtgagccttataaaatgccggtgaccggggtcgaaccggtacggtatcgctaccacaggattttgagtccagcacgtctgccaattccatcacaccggcatatcggaataaatccgtcacgatgtcattatatcacaatcaaatcctttttgcaatacggtttttgaaatttgcttatgttctcgcgtgagcttttttcgcgcggagcatggggagccttactttaatctcacccgcgacagcaccgccgattatgagaagcgcgcctgcaacctggacgaaattcattgtttctccgaggaacaataccgagaagagcacagctgagaggggttcaaggtagccgcatatcgcgatagtctgtatgccgagcttaccgagagaagagaagtagcagtagcatgcaagaccggtattgaacaagccgaggacaagagtcgcgggaatgtcggagggctgaatctggaatgagaatccgcttttcgcaatatggtataccgcgcagaagaggaaagcgaatacaacctggagagcggggttttcaagtccctttatgccgttcgagagctttcctgccgttaccattatcgtgtagcctacagcagcaaggattccgcagattatgccgactatatcgtgagcctcgccgcttccgtttacaaggaatattccggcgataacaacggtgaagcacattacttttctgagtgagagcttttctttgaagatgaacggagcgagaaccattacgaatacgggacctgcgtagtagagaagcgtagtaacgccgactcctatgcgtgcgtagccttcgtaaagcgccgcccagctcaagcccaagccgagtccggagagagcaagaaagaagaagtcttttttatgcttcatgaaagtaaatttggaaccgctgagcaggaaaatagcgataaggcaaatcgagccgaaaagggaacgccagaacacagtctcgtgacttgagagagcgatatggcttgcgacgacgccgtttgttccaaatattaaaagagacgcgaagtatttgacgaaagatttattcatattttttcaattctcctcttgcttaagcagcctgattagtatatcatattatccggaataatgaaagcgaatgtttggcatgtttaggattacatttcgtcatgcaaaaccgctcttgctatcgggagtttcttctgaaatggataagaatattataaaataccttgcgtttgtcaaaacagtggaatacggcagcttcacaaaggcagctgagcttctccactacacccagtcgggaataagccgcatgataaacgagcttgaaaccgaatgcagcctgacactccttgagagaagccgtgcgggcgtcagacttacgggggacggaacacttctcctgccgtatgcaaaggctctgtgcgccgaatacgagcgtctggagaatcaggtgggcgagcttaacggacttcattccggcatcatcagaatcgggacgatatcgagcatagccacgcactggatacccaatataataaagcactaccaaagggactaccccggaatagactacgagctgctgcagggagactacggggaaattgaggagtggatagccgacggaagagttgactgcggatttctcatccttcccacaaggagcgagtttgacacgatattcctcggagacgacaagctgaaagtggttcttcccgagggacatccgtttgcgtcgcttgagaggtttccgatagacgagcttgagaaagagccgtttctgcttctcgagaaaagtgaacgaagcgaaatatcccagctgctaaaagcatacgacattcatccgaaggttcactttacaacatgggacgattatagtataatgtctatggtcgaatccggactgggcatagcggttcttcccgagcttattttgaaacggattccctataaaattataataaaagaccttgacgtgccggcttacagaaagattgccatcgcgctcaagaacgagaaaacttctaccctcgcggtaaagaggtttttggattacttaaaatacagaattacgaccccggagaacaataatggaacaaaataacgaccacgccaaaaataccgaaaaattcatacgaatgacgacgcagccggtggagaagctgatagcaaaactggctgtgccgacgattatatcaatgctcgtgacttcgttttacaacctcgcggacactttttttgtgcgtcagcttgaaaacgacagtatggttgccgcagtcggagtggttctcccgctcatgacactgattcaggcgttcggattcttctgcggacacggctcaggcaactacatctcccgcgcatacggaaaacaggactacaaggacgctgaaaccatggcggctacgggattctgctacgcggtgctgttcggacttatcatcggagtgctcggacttgtgttcatcgaccctctcgcgcttcttctcggagcaaaaaccgaggctacgatacgctcgactatcgactacatgaggtacatcctctacgccactccgtttatgacgggcgctatcgttatgaacaatcagctgaggatgcagggaaatgcgttcttcgccatgataggactgacttccggggcgatcgtaaatattgtgcttgaccccatcctcatctactcagcgggagacacactggcgggcggaagcgttacaatgccgtttggcgcaggtatgggagtcggaggagctgctcttgctaccgctgtcagccagatactcagctttttcattttattcataggcgtcacaaaaagcgacaatataaagatacatctgaaaaacttctctccgaggctttactacataaaaaatatagtgcgcggcggacttccctcacttggacgtcagggagtttcaagcatcgcggtagcctgtcttaaccatgcggtcggaatctacgtgcaggacagcattatgatagacgcggttcaggctgccatgacgggcgtttcaaagataatgaacttcctcacctccgctcttacgggattcggacagggatttcagccggtctgcggattcaactacggcgcgggaaaatacaagagagtcattcgtgcgtatacgttctgcgtgaaggtgtcgacggtcgtgcttgttgcaatcgcagctgtcggattcgcgttcgcagagcctatcacacaggctatagcgggaagctcggagcttgcgggggacatcgcggctgttgcattcagagcgcagctcgtagtgttcccgctcatgtcgtgggttataatgtgcaatatgatgctccagaacatcggaatgaccgcacgcgctacgatagttgcaatgtcacgtcagggtatcgcgtttattccggcggtgttcatccttcctctcatcacgggaaagctgttctcagaccctgttatcggacttcagctgtctcagtcggtggcggatttgttgtcgttcataatatccctcccgataggcgtttcggtgctgagagaaatggcggcgaaggaaaaataataaaactgcgggtgggctgtctcatccgcttttttgtcgcatgggagactttccgcatatactgtcatggtatcggtatttcggatatttttgaaataagaatcccctgtgcaactttttgtggcgtgaacatagttgaaatatatataatacagccgcaaaatacccgaaaaaatatccgaaatgacacaaaaatgcatgcagcaactcaaagtagcggaatgaaaataaaaaagttggttgaaacgggaacggagcggcgttataattaagaaaaaacaaaaagtataggcgaggcgtaaaaatgactataggaaagaaaataacatggctgagacagaaaaacggaatatctcaggaggaacttgccgatcgtcttgaggtatctcgtcagtctgtttcaaaatgggagatggacgcggcatatccacgcatagataagctcattcagatgtgtacggtcttcggagtaagcacggatgagcttttaaaggaagaaatttcatttgaagaaaaagaaaagccggcagtaaagcacacatcggagaaccactacttcggcacggacggattcagaggagaagcaaacattgacttaaccgccgagcaggcattcaaggtgggacgcttcctcggctggtactacgcaaatccactctccggctgccgcgacagaaactacagacctaagttcgttatcggaaaagacacgcgccgttcaagctatatgctcgagtattcgatagctgccggaatcacagcgtcaggcggagacacatatatgcttcacgtaacgaccactccgagcgtttcctacgtcaccagacaggacgatttcgactgcggcattatgatatccgcttcacataactcctacgaggacaacggtataaagctcgtaaaccgcttcggcgaaaagatggacgacgacacactgtatctcattgaagcatacctcgacggaaagatggacgttcttctggggggcggcgagagcgaccttccgcttgcgaaaaaggaaagaatcggcgcgataatcgactatgtgtccggcagaaaccgctacatgggctaccttatctccatagtatcgcattcgttccgctcgctcagaatcggtcttgactgcgcaaacggctcttcatggatgatagctcccgcgatattcgaggctctcggcgcgacgacatacgttatcaacgcaagccccgacggacagaacatcaaccacaacgcaggctctacgcatatcgaaggacttgtgaagctggttcgcgagcagcatcttgacgtaggctttgcgttcgacggagacgctgaccgttgtcttgcggttgacgaaaacggaaatgtagtaaacggcgaccacatcctctacatcctcgcaaatcagctcaagaggaagggcatactaaaccacgacactattgtagcgactgtcatgtcaaacggcggtcttacaaaggctctgcgcgaggtcggaataaatacggtaaaaacagctgtcggcgacagatatgtttacgaagccatgatgaaggacggatatcttctcggcggagagcagtcgggacacataatcctacagaagtacgcgactacgggagacggaatcctcaccgcgctcatgctcatggaagaaatacttgacagaaagtccactctcggcaagctggcgtcccctgtgaagatattcccgcagtctctcataaacatcaaggtgccggataaggacgctgtgatgaacgacgagcatgtcaagagcatcgttcacgagatagaagaagagcttggcgaaaacggaagaatacttctcagaaagagcggaacggaaaacgtaatccgtgttatggtcgaatgcgaaaacgaggagcagtgcaattcctgcgcagaaaaagccgccgcttacatcagagaaaggtacggtaaataatggagaacatcgttttttctgaaatacttgactactcagcctctcttgcgggagaagtacttgcgggactggagaagccgtgggatatactcgacaccctcaccgaatatataagacagctcggaaaacagctcgagaaagaaggctggcgcgagattctgcctgaggtatgggtgggagagaacgtgactatcgctccgacagctgagatacacggaccgtgcattataggagagggcagtgagatacgccactgtgcctttatcagaggaagcgcgctcatcggaaagggctgcgtagtcggaaactcaaccgagctgaaaaactgcatactgttcgacaaaactcaggttccgcactacaactatgtcggggactccattctcggaaaaggctcgcatctcggcgcgtcgtctgttatctcaaatctcaagagcgacggcaaggatgtgtgcgtgaacattgacggcgagagagtatcgacacaccgcagaaagttcggcgctatcctcggagacggagctgacataggatgcggtacggttctgaaccccggaagcatcataggaaagggaagccgcatatatccacacagcacaataagaggaaccgttccgtcgggatgcatatacaaaactgacggcgaaatcgtaaaaatagagaaataaggagcttttatgtgcggaataatcggatacacaggacgcgaaaacgcaacgccgtaccttgtcagtggacttgaagcgctcgaatacaggggatatgattcggtcggaatagcggaggaatgcggcggggactacatcattgtcaaaaccaagggaaagatagaacggctgaaaaagctgcttgaaaataccagggcggaaaaatcggtctgcggtatcggtcacacaagatgggctacaaacggcgaacccagcgaagcaaacgctcatccgcacagaaaaggcgacacagtcatagtccacaacggaattatcgaaaacgacagaaaacttataaagtccctcggagagtacgagtttgaatccgagacagacacggaggttgcggcggctctcatcgacaagagaataaaagaacgctgttgtgttggagacggaattttcgcggcggtaagggaaatgacgggctcgtacgcgttcgtagtcatgcacaagtcgcaccccggtgagctttacgccatacgcaaaaaaagcccgctcattgctgctaaaacaaagtacggacttgtgtttgcttccgatgttaccgcagtcatgagcgagtgtgacgaattctaccgcattcccgaggacactcttgcagtggcgggagaggacggactgaaatttttcgacgagagcggggaagaggtgctattgaagcctgagaagatactctggtcaagggacgccgccgagaaaaacggattcccccactatatgctcaaagaaataaacgaagagcctgaggtcatagagaaaactgccgcgagattcataaaagacggaattcccgatttctccgaagcattccccgaggacaccgccggaattcatatagtggcttgcggttctgccatgcacgcgggaattgtcggaaagtacgtcatagaaaagctcgcgcgtataacggtcagcgtggagactgcaagcgaattcagataccgtgagccggctgtcgcgaaaaacaccgttctcatactcatttcccagtcgggagaaacggcggacactctcgcggcactgagatacgcaaaggagaggggagttaagacttcttccatagtcaatgtacccggctcaagccttgcgaatgaatccgatacggttctatataccgaagcaggaccggagatagccgtagccacaacaaaagcgtacatgacacagtgtgaggtgctgtaccttgcggctgtttatcttgcgtaccgcggaggaagaatatcacgcgatgaatgcgaaagacttacctcggtcatgcgtgaacaggtggcgaaagccgtagccgctgtcatagccgacaacaactcgaaagaaatagccgagaaaatagcgggagcggagcatctcttctacatcggtcgcggaattgactctgccgtatgcattgaagcctcgctgaagctgaaggagatatcatacctccacagtgaagactacgccgcaggggagcttaagcacggtactatatcgctcgtcgaaaacggaactcctgtcatcgcggttataaccgacagcaaactcgccgacaaaaccatgatgaatctcgctgaggtcaaggcaagaggagaggcggcttatgttttctcttccgttgacggagtgaagtctgacgcaaagctgccgcacgtgtcggataaagaggacattttcgatgttttcccgatgctgacgtacttgcagctcctcgcgtaccatacttctctcacgcgcggttgtgatgtggatcagccgagaaacctcgcaaaatccgtaacggtggagtaattcagaataactcagccgatatacgtcatcaggcacatttctcccgcgatgtgagctttcgtctcgtaatatgtttcggtaagctcgaatccggagttaagatagcattttatggcgcgcttgttgaacgggcgaacctttaaaactatgctctctcccgggtacgcttttttcgcttcatccacggcaagcagaacaaaatcatgacctaagtgtcgtccgcagaattcaggcttcattccaagtccgagttcaacgcggtcggctcttttcattatgttgatgaatccgaaaagcttgtttccgatgcataccgcgcggtagttcttctgacgtctcttctcgtccgctatgccaaagttttttgccagacattcttcccacttcggcatgttgtagaccgcgtattccccatcgtatttccagaggcatatttctttagcatcgtcttcggtgagcgtgcgtactgtgtattcgttcattttgttctcctgttctttttcttcggtatttcggtcagtctttcaagtatcgggataacttcgtcaagcagttcactgtcttcgatgtcgaggatgtatctttccttcactccgtcatacggaataccgcgctccgcttccgacattattccgtcaagctccggaaattctttaatatatacggtgttgtcgcacactaggagtatcggcttttcattaagatatgccatgtattcgccgaacattttgcggtaagtgactgcaccgtagcggtaaatctgctcgcagacaaattctatatattcttttgatgttgccatatttttctccaaaatgaatacagccgttcttccatatttcagggaacgactgtgtttttttatacttttgcctggtttacgctgcacattccgcagtatatcccgccttttttcataagctcgtcgtgagtgccttcctccgctatctttccgtcgcgcagaactataatgtcgtcggctttcattatggtcgtgagacggtgggcgataacgatgagagtgtggctgccggagaggttttcaattgctttctgtatctgcgcctcggtctcgttgtcgacagctgatgtagcctcgtcaagcacgagtatcggagtttttcgcagcactgcacgtgcgatggcaatacgctgcttctgtccgcccgacagccttactccgcgctctcctatctttgtcatgtaaccctcaggcatttcgcggatgaattcgtcggcacaggcggttttcgcggcggcatagacttcttcctcggttgcgttctccgctccgtacgctatgttttcgtataccgttccgttgaagaggaatacatcctgcaagactattgaaatgttctttctgagtgaggacagcgtagcgtggcgtatgtcgtgaccgtctatcgttatctttcccgactgtgggtcgtagaatctctcgagaagcgaaactatcgtcgtctttcccacacccgtagctccgacaagcgcaagcatctttcccggctttacgtcaaacgatattccgtcgagaaccttgctgtcgccgctgtagccgaaaaccacgttgtcaaagcgcacgtctcccgagcaggtgggaatatccttcgcgtcgtcgtcttcctttatctcgctttcggtgtcgagcagctcaagcacacggtttccgcaagctcttgatacctgaatatcctccgcaagacgcgcaagagccgagagaggactgtagaacagcgacaggtacatgaagaatccgacgatatcggctgtagacattcttccgcgcatgacaaaatatccgcccgcgcccatgactatgacagtaccgatggacgtgataaactcaaccgccggatggtacattgcgttgtagaagttcgcgcggatgtttacgaatgaataatggcggcagtagtccttcattccgagggattctcttccttccttgccaaacgcctgaatctccttcattcccgagaggttgtcctgcgtgtgaccgttcagtccggcaagcacctcctggttaatcttgaacagcggcgcaacctttgtggtgaacaggcgcgacagaagaagtatgaacggcacggggatgagggtgtacagtgcgagcagaggattgatacggaaaatcatgactgccactcccgccactacaatgacgtttgtagccatatcggggagggaatgggcgatgagcacctcaagctggcgtgtgtcgtttatcatgcgcgacataatctctcccgtctgcttgtcggagtaataccgcatcgagagggactggagcttgtcgtagcacagggaagtgagatatccgacaaaattccatgccgcgacgtgagcctgccacattgaaagaaatctgcaaagcgcgcggagaaggtaagcccccacgagaatgccgcagtatttcaggataagcgcggttgttgcgtctcccggagttccgagcagtgcggtcagctttcgtatagcctcgggagttacaagggagagaagcgaagccgcgagaagcgaaattacggtaagaataagctcaccccaccaaggcttagccattttgagcattcgttttatcataaaaaaatcctgcctttatcaaatgctgtgaaatcacgtcagattgtatcacattatttaataaatagcaaggattttttgaatattatctgtatgttttcgccagtccgccctctgctgtttcacgatagcgtgagttcaagtcctttcccgtctcgtacatcgtgcgaacaaccatgtcgaaggagatttttcttgtctccgagaggaagtttgcaaggctgagcgcgtttattgctctcattgcggctacagcgtttctctcgatgcacggtatctgaacaagtccgcatatcgggtcgcaggtaagtccgaggtgatgttcgagcgcaacctccgcggcgtactctatctgaccgattcccatttcgtgcatttcgcagagagcagcagcagccatcgagcaggcagttccgacctccgcctgacatccgcattccgcgccggatattgaagcgttggttttgacgaggtttccgataagtccggctacagcaagagcacgaatcgtctgctcgtctccgaagcctttctgctcacgcatatatctcagcaccgagggaagcacggcacaggctccgcaggtaggcgcagttactatcgttccgcagtccgcgttctgttcgcttgccgcaaatgcatatgagcatacgatacggttttctcttgtgctggaggactcgtctatgtgccgctgattgtacaggtactgcgcttttctctcgacattaagcccgccgggaagtattccgcgcttcgataagccttcgtcaatggattgcatcatcacaagccatacctttgagagatagtcgcgtatgccgtctccctcatgctcaaaaacgtagtccgacagtcttatgttgcggttcaggcagtattccgcaatctcattgaaggtggactcggtgtaaatgtcctccgacgcgtctttttttctgccttcgattacaatatccccgccgccgaccgacatgaccctctcgcgagcagtctcgttgccgtccttgtcgtatgcgaagatgtccattgtgttctcgtgcggcagtttcaacttgtggtctgtgttccatacgatttcgcacggggagggttcaaagccttcaatgacagctctgtcggtgcagtgaccttttccggtttcagcgagcgagccgtaaaggattaccttatatgaagcggcgtcgggatgctcggatttgaacagcttgactgccttttcgggacccattgtgtgcgagcttgaaggaccgcgtcctatcttgaaaacttctcttatggatttcatatgttttcttcctttatatattatagtcggctacagcttcagccgataatcgttataacgcaataacagggcaacaaaaactgctaccctgtttaatctttagttttcgtaaccttccttgcggagacgctcgtgaagctctttgtcctttttctttcttctcattgcaggaccgaaaatacccgccgcaactccgagagcaagcacgccgagcaggatatagtctacccaaccgggaacgctgtcgccgaaaatcgcgctgttgcggtgtctcggagcggtggacttagccgagaatgacgcttcaccgttgtagtcggagcttaaatatttcatggagagatttttcgatgagagcgcggtggacgaggtcgttacgtcaatgttcagtccttccacaacaagctcgtgagacgtgactacgggagcattcgcggtaaacgagcctccgagaaggttgacgcatctgccgcttattgccggagcatcgggagaggtcatgtttatcttcatcgagctgccgacaaaggaaaagtccgacgcgtcgctgtagataccgtattcgcccgcggtgatttcatattttccctcaaggagacgaatcttctgcgtgttgtcctgagaaataaggtagaagcctatctctccggcttcgattgtgagagaacctgttcccttgaatataacggttccagcgcaggaaataccgtatttcgcggctttgatgtagttcttgccttcgagaatcacggtgcagtttttcggcagacggagaccgtagtcgtcctcggtgtcgatattcagtccgcttagggtaagagtatcgtatctgttctgccagttgtagcctgcaccgacctggtttttgttggcggtggcaatatttacagtagacgtcagcgtatccgccgcggctgattttatcggggtaacgaatatgcagagcgataacgtcaggcaaaacacgagtgccgacgaaacgagcctgcgccatgatatcttcattggacatactcctctgtctgagtgatgatagttaaatacgatttatattttatcacatattaccatgaaaatcaatagataaacaaaaatatcggtgattttcagactgtacatggtaaaacgtcacattttcttcacaatagaagaggagaggactgctgagcggtattcgacggcgtagagtgcgcggaaaacgagagcctgtcccagtgtcataaggcgtatgtatacgtcgcagggaacggtgctgtttttcacgataaccgaataaaatccgccgaggatgagcatgaaagccggagcgaacacagacgccgcctgacgtatagcatagctgaaacctgtccgcagctttttgtcagcccacgagaggaacgcggggatgaacacggcaagaatgagcacggcgaacacgggaatgtcaatggaatagaacaccttcgccatgtctccgagccactccgcaaacgttccgttagccgaggaaagggcagagtgcataagcaggtacgagacaaggcacaaaactccgccgcagagcgcaagggaagagtcgacaacgcagagcagttttaacttttcatttttcctctttcggatgaaggcaaacgagacaaaagcggcgcacagaaggactgagataaaaatataagccgtcattctacgataagttcctctgcagagcgtttcggaacaaaatgaagtcctgccgtgtcgcggaaatatgcggtgtctcccgttttcggaatgtcgcagatgaatacggtctcatccggcactccgagggcgagaagaagcacgggtttcaactttttcggtatgagcagagtttttgaaagctcatttcggtcaaacgcgcctatcatgcatccgccgaagccaagctcgcacgcctgaagcataatggtctgcgccgtgattccgacgtccacgcttgccgattccggattttcgcatatggaagtgtcgcacagaatcgcaatgaacgcggtgggatggtgtccctcgggcggtagctttacatccttcaaaagtcctgcccaatgcgtcagcgcgagaacctcttcaacctcgtcgtgctcgtagacaagcctgaatttcagaggctgtctgtttactgcgctggggcagagtctcgcagtctcgataaggtcggtgaggtcttcctttccgatttttttcgattcgtcgaagctgcggtagctccgtgaatcggatacgatatctctaagcataatttattcctttactatctcaatgccgtctggagcagttattttcgcaccgctcgcgtcggcttcaatttcaatgcttccaaacggagtcggaactgcgccgcgcatccattcaagaccgctgagcttaggtgacactctcgctttcttgaatccgggcgtcaaaggagttactccgagtacgttttctgcgatgtacggtgcgggaccggaagcccagccgtggcataagctgtgacgtagtccggtgtagcagaacgcgccgaagtcaccgtgaatgtctcgcttgccctcgggtacaacttcatcaatgcgcgcggagttgtacatccagtcgatattgaagtcttcccagaatgtagtcgcgcccatctcaagcattccgccccagtattcgcgcatgatgtcgagagcgggagcgtattctccggcttttgctgctgccgtgagcgtgtagtagccgaggaatgtggaaagaccgcgcgctccgcctactgaaatgcactttgagaatgcggttttcgggtcaagcagaccgctcatcaccataagagcggcaggctgtttccacggaccgggattcggaatgtgcttcatcattctgtcggctgtgtcgtagcagtaccatgccgtttccgcttctccgagagtttttaaaatgtctcccgctgcggtgagtgcgtatctcataagtccctgaactccgcagtgcttggcttcttcaaagtcgtttgtcggccagtcaaagaagcgtctgccggggaggttttcgcgtccttcctcgtcgataaatccgatgtagcgcgggataagctcctttatgtattccttttgagtggagagatattcgtagtcgcccgtacccttgtaccattcatgctgacagaggagccaccacatactgtactcgggaataccgttcatgtattcgttcggaggagtgatgtttctgacaaagtcgagggatttcggaacgacttcatttgcaccgaatactgcgagaatagccgcaacctcggtgttcatgtctcccgcccatacaagcctgtctctcttaattccgtcccagaggtatctctgcatattgaggtgtaccgtataagcggcggtgtcgtagatttttgtcacaagcgggtcgctgcactcaaaatatcccttgtattcgatgtcgcggaacacaagaacggcgcagacagagcgtatctcggcaaatacatcgggagtgagcagttctacataagcaaaacggaatccgctctcgtttgtttcgtttgagctccacggaccggatgtcattatcatgtcgcgctgagcatggtcgtttgtcgcgttctttactccgatgtcggacatagcttcggaaacactctctccgagtcttatcttaaactgagctgagggcgcgttcatgctccatatcga

SEQ ID NO: 1449 - DNA, 6790 bp, Unknown
  16S sequences of unknown bacteria
caaagctcgcggcaaccgggatccggaaaaacggaaatacgtacggtccctatctcctgacctgtatctgtatgattatgatgagctatctgatgcggtatctcggcgccaatccggtcattgcagggattaagggcggcagaagcgtgcaggaaatgctcgggatgggaaatggtgtatttatcattttttctctgatctttctgttctacacaaattcgttcctgattcgcagaagaaagcgcgagttcgggctttacaatattcttggcatggggaaatggaatctcgcgcacattctcgtatgggagtgtattctgacgacggcggtctctttgcttggcggacttctgcttggcatcctcttttccaaggcaggtgagatgctgctgatccatatgctgggcgggcagatcacgcttgcattctcggtggatggtctggcagcttttcggacaacggtgctgtttcttgtgatttttgccctgattttgctgaacaatctgcgccagatccggatgtccaatccgatcgggctgctgcatggcgcggcagagggtgaaaagccgccaaaagggaatctgctgctggcgatcctgggagtggtgcttctgaccggcgcgtactacattgcggtgacgatcgagaatccggtgtctgcactgatgtattttttcgcagcagtgctgatggtcattcttgggacctacctgatctttatttccggctccgttgtgctgtgcagatggctgaaaaaatggaagtgctactattataagccaaaccactttatttccgtttcctccatgctgtaccggatgaagcgcaacggtgcaggtctggcatcgatctgcattctttctacgatggtgcttgtcatgatttcttcttccggttgtctgtatatcggcaaagaaaacattctgcgcagacagtatccgagggatatgcagctggctgtatgggatggagaggaggaacatctggatctgctgcagagcatttcagaagaatatatgcagcgacatggatttacgatgaaagatgcatggcgctaccgttatctttctgttgcggcgcttgcagacggcgaccggcttgcatttgagcgggcaggagtatcggcgagcagcctgagtgatgtttcggatctgagaaatcttctggtgatccctctttccgactataactgtgtgaccggcaagggcgagacgctttcagaaggagagatcctgatcggcgtcaatcgcgggcaggaatatccgtatgagaccatgaagatcggaaatctggatacgtggaaggtgaagaagacagtgccgcagccttttgacaataaggtggcatcctatgagatcaacacgacttattttttgattgtgccggatatggattctgtgtatcaggtcgaaaaggaggaaaagaaggtctacggtgactatgcatcagacgtctgtggatattttggattcaatgtcgactgcagcgatgaacagcagatcaagatcgaggaaggaatttcgctggcgatcagcaaaaaatggatggatatggatatcgcatattcgacggaatgcattgcggatgaccgcagctacttttttggtacgttcagcggattgttcgcgctcggtatcatcctgggcagcgtctttattctggcgatgatcctgatcatgtattacaagcagatcacagaaggatatgaggatcagtcccggttcgaggtcatgcagaaggtcggaatgacgaaacgggagatccggcgcagcatcaattcccagatgctcacggtatttattctcccaccggcgatggcgggacttcaccttacatttgcatttccgtttctgagtaagatcctgatgctgtttggattaagcgatcagagctttctgatccggatcgcggttggatgcttcggcgtgtttaccgtattttatattctggtatatctgtttacctcacgtgcatactatcgcatcgtgagcggaaactaaacggcaggcggccgtactcaacgacgagtacagtcgcctctttgtgttttcttaagaatttgtcagtggtattttcagataaagtagggtaatatttgtatggtgatgatgctagggtcaaaaggccatgcatgaaatgcgaagcaattcgtgtatcataggggacaaaataccttttgtccataacatcatttgtatattgtatataagaattcaggaggcgactatgtacatatcaaaattcagaaaaagaaatgctgtgatgttgtctgcccttgtgtttacaaccctgttcgcaggcagtgtggcacaggcagaagaagcagaagaggcgcaggtctatggactggaggccggtgtcgcatacgatctggatctggacggggacgggacgacagagcagttcgtctggcagacgaccgaaaaggagcttgatgatacagaaacaaccagacaggcggtactggatctttatgtgaatgacagccagccgtccagctttattgatgattatgcatatatgtggcgaatggataagggaacgctggcagatggccgtacccttttatttgcgatgagcatttcagataatgattacagcgaacaggtgcttgcgctcacggaaaaggaggcggggctgccgtttcagtctaccgatctggtaaagctgagccggacagaaggagaagtgcccaatcatattttgagtggatgggcacgtggcgtgacttttgtaagatcggagggagatacgtttaccgtccggtggaatgatacgctttcctgcgcagggattgtatcggtcgatctggactatcagatcgatgaagcgacgatcacgcaggtggatcaaccggggattctggatgagacaaagacatggacggcctggcagagcttttccgtgaagacggatgtggagagcggccaggaagcgtttacggtcgcaccgggagatacggtatcgttgcttcaggttgtgctcaaaaatggcatgcgctggattttatgccggaacgcggatggtgcggaaggctggtttgcagacccggattcggcagtctgggaagaatcaagtgacgggatgcactggggatattttgatgaggcgcattttgcagggtgatgatgtagaattgcgggagctgcttcgcagcggagcaattcgtaggcatcagttggaggcaaaagattaaaaagccttatcatgcttgcatgataaggctgaacatataagtattatcagaaaaaatagaggagaaagaaaaaatgggttacacaacatatgaactgctctggctgttctttgcatattcggtgctcggctgggcgcttggcgtggccatggagagcctgaagcgaaaaacatttatcaatgcgggtgtcatgagccttccgctctgtccggtatatggtgtcggggcagtggtcaatgcgatctttttaaaggaactgaaaggtacgcctgtgtttctgttcatcggtggtatgttgcttctggcatttctgaccattgtgaccggcgtagtgctggagcatatttttcaccggaaatggcgggactacagtgagcagcggtttggattcggcggatttattacggcacagcttcttttgctgtacggagcaggtgctgtgattgagctttattttggaaatgggctgatcttaagtctggtgcatcttattccacattttattggaaaaatcatcctgatcgttgtgggcgttttatttgcggcagatctttctgggacactggctgttgtctggaaatggcgacggcatgtgaaccgaatggcagcgtggacggatggcatgcagcagatgaccgatacgttcggcaatgcgatcacgcggatgatccggaagagactggaaaagacttatccgaatatccgcacggaagagctggttgcggcaaagcaaaaagaagaggcgccggaggcggcctgcttcgctgccggatgcagcctgtataagctgatctggctctttctgatcggcgcgttcctcggagatatcgtagagacgattttctgccggatcacgatgggctactggatgagccgcagcagcgtcgtctatggcccgttcagtgtcgtctggggactggcgtgtgcgcttctgacagcgtttctctataagtataaagataaaagcgaccgctatatatttgcatacggcacgatcgtcggcggagcctatgagtatctgtgcagtgtttttacggcgcttttatttggcacgaccttctgggactacagtgacatcccgttcaaccttggcggaagaatcaacctgctctactgctttttttgggggatcgcagcggttgtatggctgaagggaatttacccgctgttctccggctggatcgaaaagataccaaagaaaatcggtccggtgctgacgtggatcgcagttgttttgatgatcgcaaatatgacgctctccgccctggccctggcccgctactctgcccgccagaccggagcggctccgacgaatgcgattgagcagcagctcgatgaacattttccggatagccggatgcagcggatctaccccaaagccaaatttgtataaccagtttcgagcaacagcaaacgataaagacaggcactggcaaagaaattgccagggactgtatttaccgtttgtgatgggcggaccgcccatcagccagggacaggagctgcgtagcagcgagtagcttgcatagcaagcgtgtcactggcctgtgctcgaaacgatgaaagaaagcaacagcaaacgataaagacaggaactggcaaagaaatcgccagggactgagctcgaaacgaagaaggaaagagaaaggagtttctatgaccaagcgtaacctgaacgccgacctgattcggtgtgtcgccgtattcagtgtcatttcagtgcacttcctgctgaacggcggcttttacaagcaggaggtgtgtggcataccgatgctcgtgatgtgcatgtaccggtctttttttatgacctgtgtgccgctttttctgattctgaccggctacctgatggggcagaagaagctgtcgaaggggtattataaaggactgtggaagacgatcgagatctatctgctggcgagcattgcctgcctgctgtttaagaaatttgtgcaaggggaagatatcaccttttactccggtctgctctccatcctggcttttaaaggtgcaaattacgcgtggtacatcgagatgtacatcgggctgttctgtctgattccgtttctgaacctgatctggcaggggcttgaggatcagcggcagaggaagctgctggtgctgacgatgatcggcctgacgatgctgccgaagatgctgaacaatttcaatcttgtggagcctggctggtggctgcatccgatggtatcggatgaatacaataagctcgtgccgtcgtttttcacggcgatgtacccgatcacctactactttgtcggaaggtacctgcgggaatacgactggcagatcagccgcaaaaagaatctggcgctgcttgtgctcgcgataacagcctttggggcatacaattactaccgcagctacggcggatcctttatttggggctccaacagtacgtggggaggggagaacctgatcacagcgaccctgtggtttaatctgatgctccatctgcatccggatcgctggccgcacttcctgcaggagggcatgatttacctctcaaaaatatctctcggtgtctatctgatttcatggatctttgacaagattgtctaccaggtctacctcattccatatgtctcggatatcacggcgcgcttcaaattttacccgctcgtcgcaggcgcggtttttctggcgtcagtcggggcagcgtcggtgctgtatctgatccgggatggcgtgcatgctggggtgcgacgaatacggggatagcagtcattaatttttgaattacgaaagatatttccccaatatctgttttacacaatctgcaatttggttcataattcttttacattccgctttttccattccagcggaaacgccgactgccagaatttctttttctcctggattacgcccatttccatcaaccgtggttgtgtgttctccataataagtattactgtaagtaaggtcatatgctggacttaatcgccagcaatcctttccctcatagtataaatacatgaaatttttagaatgatcatcgcggttatgggcgtaaacattaaaacacatgcggcggaacatatttctgagatcttccgagttatctcttgtcaaaattttcgtcagtttcattaaactgtgataatccagacttggttgttcgaaatccaattccagaagagccgcggcggtcagcatgtggattcgttttttaccggttttatccacaattcggtcaaatcgttttgttccaaaatatccttcacatttattcgatggaaacagtctggtctcactcatggtaatgccacattgtctggcacagcaggaatagtcatattccatctttcctgcattttttccatctatatgggcaggaaatttaacataatatatagcaagaattctccttcctctacaggtgggagatgaattgcaaaaaacaaaagaacacttgttctgcaatgcgattcatggtataatagaatcagtcgataagatgattgtacttaaatgaaaaactgaattccggttttggaccaaatgcaagagtaaattccatataggtcgaagttacttttgcacacatatttgccatattgtctttgataatca

SEQ ID NO: 1450 - DNA, 30908 bp, Unknown
  16S sequences of unknown bacteria
ccccaccgatccttcggacccctcttctcacaactgaccactccattcagaaaaccaaaagcccgccgatcttccatcggcgggcttttcttatgttcaacaagtcaaatcagacatccagatggccccatgtgcggagatattcttccttggtcatgggagctttgaagttcttcttcacggacaagcccttttcggcgccgttggccaacaggtcgatggccgagcacagcagcatcttggtggccttgatgtaagcagaatccttgtcccggatctcgtagtgggagctgtgggcaatgccttccgcgccgccgatggtgcagtgaaccaccgggatcagatgggccacatcgttggcttcggtggtataacccacaccgggcaccacattttccttgccatagatcagagccaggttgtcttccacaacggccttcatctccgggcactcatagggggtcatatagccggggatgtccacgatctccacttcggcccctacggcgtcggcaccggccttcaaagcacggttgaccttcatgctggcatcctcaatggcctccatgttgttagcccggcagaatgtttcgatgcgcacatcggccggcaccacattcaccaggtcgccgcccttggtgatgatgggatggacgcgcacattgtccttgtcccggaaggtctcacgctgggcgtcgatggccatcaggccgatcttggccgcctggagagcgttgaccccatcccagggagcgccgccggcatgagcttctttgcctttataataaaccagctttgccacatagcccatacccaccgggccgccagcggccactttgtcgctgccgtcggtgtgctgcatgagcatcatatcgatatcgtcgaatacacccagcttgatgaattcctgcttgccaccgataaaggacagcttgccctctttgatcaggccatggcggtattccagttccactccttcttcggccggcacgcccatcaggacaatgtcgccgtccagttcgctcataatgccgctttccttcagcgccatagcagcacccatgatggtggcgatctgcacatgatggccgcaggagtgggcggcaccggtcacagggtcggcgcaccgatggcccggcgccacgatagcatccagctcgcccatcagagccagacgaactttggaagaacggcccttcataggagcaatgacgccggtgatggctaccccatcctggtgttcgatgcccagctcatccagcattttgtgtactttctctgcggttttgaattccttgaatcccagctccggctctgcaaagaccgattctccgaaagcgatgattttatcggcatttttgtccacagcctcacaggcccggcgcttcagttctgcaatgtccatcttcgtccaacctttccttttccggcggccatgcgcctttttgctttttttattatatcgtcctttcttcccctttgcaacgcgcaaatgagaattgaccgtatcaaatcactttgctataatactaaatagcaagaaaggatggattttttttaccaatgaacgagatggaacgctattcggtcatcaccgaaaagaatccccgggagatcgtgcttctccggggcgcaggctgtgcctggaggcgctgccgcttctgtgattatcatctggactgttcgccggatcagaaggccaatttcgccctcaaccgtcgggtgctggcccgggtcaccggtgagtatcaccggctggaagtgatcaattccggcagctttgtggatctggatgaggaaaccatggaaaacatcgtggatctgtgcctggagcggcacatccataccctgcattttgagtgccactggatgcaccgcagccagatccccccgctgaaatcccgcctggccatgttgggcattgccctgaagatcaaaatcggcgtggagacttttgatcccctgtttcgggagtgctatctgtacaagggaatcgactgtgatgcttctcccctggatatctcccgcttttttgatgaagtctgccttctgcaaggccttcctggccaaacggccgcttccatgcggcgggacatcgaaaccggtctttcctattttgagcgggtgtgcgtcaacatcatggaggaaaactccacccccatcaaacccgacccgggtgtgattgaaattttccaaaaagatgtgatgcccctgttcatccacaatccccgggtggatattttgcttcacaatactgactttggtgtgggaggaatacaaaatgagaaatgagttactgcttcttttaagcctcgtggtgctgtacggcggcgtccttctgtggatgaagttgttcggcaaacaaggactctatggctggacggtcatcgccaccatcgcggccaacatcgaagtactgattctggtggatgccttcggcatggaacagaccctaggcaatgtgctcttcgcctccactttcctggtcaccgacattctcagcgaatgctatggcaaaaaggcggcccagcgggcggtaaacatcggcatcctcacttctctcagctttatcgtcatttcccagagctggatgctctatgtgccgtcccccaatgacttcatctctcccagcattgaagcggtgttccagaacaccccccggatgatgctggtcagccttttggtctatgccatcacccagcggttcgatgtgtggctctatcacgcctggtgggatttcaccaacaagcgctggggcgatccccatcgtttcctgtggctgcgcaacaacggctccactctggtttcccagctgctcaacactttgctgttcaccctgggcgccttctggggcatgtatgatttctctaccatgatctccatcatgctttccagttatgtgatcttcattttcaccagcctggccgatacccccttcgtctatctggcccggcgcatggtggaaaaaaagcaagtcaacgaataagcgccaaaaaagagccgcaagctgcggctctttttttattctgcattctatcgtcttgccaaaaatcccctggtgtgatagcatgaccaaaacaggaacagaatggatattttcaaaagagaggatcgaatacatcgatgaaaaagaatacacattggacccgaggtctattgtggctcatggccttttccttggcggccggattgatgggctgcacactggaagaagagggagaagaaaagcagccagccgtctctgtcacagaggaagaaaagtcctcctctacggaaaagagcctggaaaaagaagaaacaaaaacagatgaacaagaagaaaaggaagcaccagaggacaaagaggaggaagatcctctcttggagaaagataccactcagactccccccgttcctgctttggccgacgatacgaaaactgcatctgcaatcaagacggaaaacacatccccagccgagcttcagcaaagcccagatccggctccggccgaaaccccaccccaggaaccggcccccactcccctccatacgccatcggctcccgcgcctcaaaaccagggaaacaccaatctggtgtggattcctgccagcgggacaaaatatcacagcaactccggctgcagcaacatgaaaaatcccacacaggtgacccaggatgaagccgtcgccatgggttatgatgcctgcaagagatgccactgataaaacttcttccccaatcgaacagcaaacaatatcacaggaaagacaaaaagccgcggctaagccacggcttttttctttttctccttatccttcccgcacctggagggacagcacatcgggccgggcataatggccgcacacatcgtgctccattttgctggcggccgcctgctgcatatccagctgggcgtaaatgatttcttcccgatcccataccgtatcagaaatcacatggccataggggtccaccacacagctgccgccgcgacaggcgatatccggcagccggccgatctcttcttccccgctttgggtcttgggatagtctgcctttgtaaagtacatatcgcagttgatgaagaaacagtgtccttcgatggcgatatgacggacggtatcctgccattccgggttgtcattggtgttgggcgaaatatagatggtgatccccttttggtaaagggccacccgggccagaggcatatagctttcccagcagatcaaattgcccatgggtccccaaggggtgtccatcaccgggaaaaagtccttgttgccatctccccagaccactcgctcgctgccggtgggcttgagcttgcggtgattgagagcctctccctggggtgaaatcatcatattggagttatacagtgtcgccgtcacttcgtcccgctcggaatagccgatgcttacatagacgcccaactccttggcacagtcgatgatctgctgcatttccgtgcccttggccaggatggaattatcgtaataggctttccaatcttcccttccagcctggttccggcttcccacagtgaacccataggtcatgccataggggtagcccggaataaacaattcagggaatacgatgagctgcgccccatttgcagcgcattcctccatcagcttgagcactttttccacgcatttttcttttttggaacatcaccggggtggcctgtaccaccgccactttgcagacgctttccaaatctctcattgttgtgcctcctcttcgggccggacgaaatattttctctgccgtcctttgattttttgattgtaccacggcccaaaccaaaaggcaaaccggatatgatattttcgccccagagcagagacatagaaaaatccctggaaccttgcgattccagggatttttccattcatttggtccgagtgagaggagtcgaacctccggcctcttgaaccccattcaagcgcgctaccaaactgcgccacacccgggtgcaagaaagatattaccacagtgtcccccatttggcaagtgttttttcaatttttttaaaaaatttgattttaaccattttcttcctcttccgtttgtgtgcctgtaccctccagcagcttttccaccgaagtatgcaggccgccggcaatcttggccagagtggagatggtggggttgtttttatcgcttcccctttcgatgtttcccaaatgggcggcgcccatgcccgacagaaaggccagcttttcctgactgtatcccaacgcctcccgacgggctttgatattctgccccagacgctgctttgtccgttccagctcttcttcctgtcgtttcagcacttcggccagttccttggtctgtcccattctatcctttcctctctgtctctacgaaaattgcctgctgtgtatccaccattattataaaatgtcccccgttcctgcgccagaatatctctgaccggttaaaaacaacaggccttttttcgcctgtcacaaagtccggggaatattttcccattccatcggcacactaacacagggtgatctcacgatgttggttccttttttccgcaccattcttctttacatcttcatcattgcagcctttcggctgatgggcaaacggcaggtggccgaaatgcaggccaccgagtttgtcataaccattttgatctctgccgtggcctcggtgcccatgcaggatctgaacattcctctgctccacggcctggtgcccattctgaccctgattgccgccgagatcttcctgtcggtgctgtccatgcgcagtcagaaactgcggcggctgctcagcggacggccggtgcagatcatccgcaacggcgttccggaccagcaggccctgcgcaaagtgcgcatgaccctggacgatgtattcgagaccctacgtctcaaggatgtattcgatctgcgttccatccaatttgctcaggtggagacaaacggtcaagtgagcctgctgctctttcccggcgcacaggcggtgactctggacgctttgggcaaagctcccaaatcttccccgtccatggaactgatcgtctcggacggcgttctctgccgggaaaacctgcaggccatcggccgggatgaagtctggctggattccatcctgaaagccaatctgctctccggcctgaagcaggtgtttctcctgtgcgccgatcgcagcggcaacatccttcttttccgaaaggagggaaaatagccatggcccgcacctatattgccgcattcctgctgctggtcactctcaccggtgcttttttcgcccacagatacaccaggagcctctcttcctctttggcggaagaagtacccctgtgggccgaagaggcccgcagcggcgctctggacgccctggaaagccgataccagcgcctgtcccctctcctgtccaccttttatgtgcattcctccatcgaggaaatcggccgggtgctggaggaatgtcagggctgcctggaagtggagaaagatcaggaataccatcaaaaggcccggctgcttcggtatctgctgctgcgcctgccctccagtgacgaccccacctgggaaaacatcctgtgacccatgtcagcaaaaagccgcccaaacaccatgttgtgtcaggcggcttttttgttgtcattgaggcttggtatggatcagcttgctcagctcctccataaaggtgccgatgtccttgaactgccggtacaccgaagcaaagcgcacataggccacttcgtccacctgcttcagctgttccatcaccagttcaccgatctgttcggatttgatctccctctccagggaattggagagcttctgctcgatctcatcgcagatttcttccaaagcggacatggtcaccggccgtttctcgcaggccttcaccagaccgctgagcattttgctgcggctgaaagcctgacgggaaccgtctttcttgatgaccaccagcggtacgctctccaccgtttcataggtggtgaaccgccggccacaggacaaacactcccgcctgcggcggatgcagctgccctcatcggtgggccgggaatccaccactttactctccaaatatccgcaatacgggcacttcatgccatttcctcccccgcagttttccttccagttcgttcggttgcgattattataccatagctgcaagtccaggcagacttgcacgccgccaatgaggcgtaaaatcagctttgctgatttttgctatggtgtaacatcaacagcagtcgttttgcaggcaaaacgactgaatgcgcagcatcctgccgcatatgtgcggcaactgttgatattgtaccataaagaaaccagggggagcaagagtttcccggctgccgcccggcgccggggatcttttctcctttttcattgtcccacagtttttcgacaaattaaacccctttttcgtcgcaactttcgacaccattcgacaaaatatgaaatttctggaatatacaaccataaagatccccgtcttgtgaaaagacggggatctgaaacaggcttatttcgcttttttctgatgcttcttcagcagggcacacagaggagcagccacgaagatggaagaataagcgccgctgacaatgccaacggtgatgggaatggcgaaattcaccagagaggaaacaccggtaaagatgatgagcacgatgggaaacagcgtggtcagtgtggtgttgatgttccgggtaaagctctggcgcacactcttgtccacaatggcgtcatagctttcccgacgggacagcttctggttttcccggatacggtcaaaggtgatgatactggcgttgatggaatagccgaagatggtaagggctgcggcgatgaagttcatattcaccggcagctggaagatcacataggcgctgatcatcaccagcacatcgtgaatcaggcagaccacagcggcaaaaccggacttgaagtcaaagcggatggtgatatacagcagcatcagaagagcagccaccagagaggacttgacggcggcggcctgcatatccttgcccacagccgggctgacattctgtacatcctgccgggcatcgtcttccagagagaaggcagatttcatggcctcgtggagcttttcccgatcctcggaagaaaggctcttggttttgatgagcacctgggtgccgtcaccggtaggcacagcagaaacattcttgcctgccacctcggccacagcgtcctccaccttgtcgatcacatcgggagtaacctcttctcccagctgataggtaaaggaggtaccaccggcaaagtcaatgtccagattgaacagattgacgccaaagggagccgccagcaacgccacaagacctgcggcaacgagcagcaccgaaaggatggcgcaatatttgaagttttttgtagcactgaatgtcttcagcattacgcatccctcccttcacgagcaccgtacagccggatgttggtcactttcatccccaccaggctgttgagcagcatccgtgtcacagtcagagccgtgaacatggacagaataatgcccaggcccagggtgatggcaaagcccacgatggtgcctttgccgaagaaatagagcacggctgcggcaatgaaggtggtgatgttactgtccaaaatagcggagaaggcccgatggaacccggagtcaatggccgaacgcagggtcttgcccgcccgcagttcttccttgattctctcgaagatgaccacattggcgtctacggccataccgatggacaggatgataccggcgataccgggcagagacaggttgaccttaaagatcaccagcaccagtccctccagcacgcagtagaacagcagggccacacaggagacgatgccaggcagacgatacaccgcgaccataaagatcatcacaagcagcacgccgatggcgccggccttgatgctgctggtcagagcggtcatacccagctgagcgcccacgctgcgcatctccacctgctccaggccaaagggcagctggcccagggcgatgttattggccaggaggcctgcttcttctgcggtgaagccgccggtgatcatcacttccttgctggtgatgccggtttctgcatactggctgctcacagcagggctgctgatggtctggccgtccatgacgatattgatgtggttcttgccttccgactcagccgcggccgctttctttgtggcctcggtgaagatctccagaccttcgtcggtgagctccagagagacataattctgcttgacaccggtgctgtcgatggcgccgtattcggcggtggcatcggccacctggtttccttccaggatcacattgccgtcgtcatccaggaactgcagctgagcggtggagcccagagtctgtacagcttcttcgggatcgctgatggaggggatctccactgtgacccgccggtcaccggcctggtatacctgagcttcggtgaggccctggaagtccagacgctgacgaagcatatccacaacgatttccatgttgcggctcagctcctcggccggcatatcctcgtcggccatgccctcaaaggtgatgatggaaccgcccaccagatccaggcccagccgcacgccgttttcggtgtcggtgatgctggggatctgtgtgaaacccagatccaccccgtgccatactgtaaagccaagcagtgctatgactaacagtgagcaaacgaaagtgagaatgctctttttcattgtcctgttgtttcctcctttatgaaaagcgtgacgctttttgaaaagcaacgattattatactccacccctgggattccgtcaacaaaaagaggctttttcgtaaattttcccctcttttctgtacaaattattcaaagatcccctttttacaccggctttcccgatgcaaaaagagaacatttgcctcccagacgcggctgtgggcagaggacatatcctctgcccacagcgaaacctccctttgcgggagctttattcttttttgattttctgcttactgagccagcagtttttccgcggcagccttcttggcgcagacgcagaacacttccatggccagctgcagctcctcaatgggaggataggaaggagcaatacgcagattgctgtcccccggatccttgccatagggataggtggcgccggctccggtcatgacgatgcccgcttccttgcacagctgctgggtgcgcttggcacagccctccatggcgtcgaagctgacaaaatagccgcccttgggcacagtccagctgccggctccggtgccggccaggttcttttccagggtgttgatcacggcgtcaaacttgggccgcaacatcttcttgtggatctccatgtgatccttcagaccggcggcatccttgaagaagagcacatggcgcagctggttgatcttgtccggaccgatctgctgggccttcatgtactttttctgccaggcgatgttggccgggcttgcggcaaaggcgcagacgccggcgccggggaaggagatcttggaggtggagcagaactcaaacaccatatcggccttgcccgccttggcgcactcctcgatgatgttggggatctggatatcctcgtcggtgatgccgtggatgatgtaagcattgtcccagaaaatacggaaatcccgtgccttgggctggagggcggcaaaacggcgcaccacttcatcgctgtacacaacgcccgaggggttggcaaacttgggaacgcaccagatgcccttgatgctctcgtcctcagccaccagcttttccaccatgtccatatcggggccgttgtcatccatggggatgttgatcatctcaatgccgaactgctcgcagatggcaaagtgacggtcatagccaggcaccgggcaaaggaacttcactttgtcctttttcagccaaggctcgtccacaccggcggcgccgaagaccatcaaacggtccacggtgtcatacataaaggtcaggctggagttgcctccggccagcacctgctccaccggcacttccagcagatcagcgaacatctggcggcaggcgggaatgccttccagggtgccgtagttgcgggtgtccaggccctgatacacggtgtcctcactggtcttgaccaccgtcagcatcccttcgcaggcattcagctgatcggcgccgggcttgccccgggacatatccagcttcaggccctgagcctgatagccttcgtactcttcattgagctttttcagttcttcttccagctcagcgcgtgtggcttttgtcagatccatacgattacctccaattttatatgcttctatgcttccattatcctttcaaacccttaccgcccggccagggccgcccccagggcggtggcaaagtcggcgttgtcgggtatgatgaaccgtgcgtcgtagagcttttcaaaatcggaaaacacttttctggccataggcaccatggccaggttgccggtgagcactacatcccgcataccggcgccccgggcagagaaggccgccagggtccccactgtctggaacaccagattgcatacgcccaaggccaggtcctccggcgcagccatatcgctgaccttgccgaagttggaggcggtagtctctttgtccatgttggaaatagccgccttggaaatatccccaatggtcaggtccacattggaaaggcttcctttttccgccagatggagaatgtgttccactccccgcacacccagcatcttgtcgcacagccccaccagggtgccgccgcctacgccggtgccgccgatatggcagattgttttcccttccactttgacaaaggccgtgccggtgcccatgctcacaatgatggcgtccccgcagccggagaggaaccgtcctcccaggccgatggcccggaactcgtccaccttccgggtggggatgccgtaaatatccccctgaatgaaggaggagcccacaccggtgcacaacacctcggcgatctctcccagctccagtccattgtccgccaggaatttaccgaaggctccataggccgaagtcaccgggtcgtccgcccgcacccggatggagcagatcatctgtccatcccgcatgcccacgattttggtggtgctgccgccgatgtcaataccgatggtcaaacccataggctcgcctcttaaaagtcggcgctgcccaccgtgcgggggaagggcagtacatcccggatgttgctgatgccggtgaggtacatgatcagccgctcaaagcccaggccgtaaccagcgtgcttggtgccgccgtacttccgcagatccatataccaccagtaaggagcctcttccattcccagctcgtccatgcgctttttcagcacatcaaagcgctcttcacgctggctgccaccgatcagctcgccaatgccgggaaccagcatatccatggcggccactgtcttgccgtcgtcgttgaggcgcatatagaaagccttgatctccttgggataatcggtcataaaggtgggctttttgaacactttttcggtgatgaaccgctcgtgctcactttgcaggtcgcagccccagtacacagggaactggaactcatccttgtgaggcagcagaatgtcaatggcatcggtgtaggtcacatgggcaaactcgtccacatccaccagcgcctgcagccgctccagcaggcccttgtccacaaacttgttgaagaattccatctcgtcggggcatctctccagcacccggcggatgataaactgcatcatatccttggccagcgtcatgttgtccttcagatcggcaaaggcgatttccggctcgatcatccagaactctgccgcatgacggctggtgttggagttttccgaacggaaggtgggaccaaaggtataggtgttcttaaaggccagtgcaaagacctcggcttccagctggccggacaccgtcaggttggttcccgaaccgaagaagtcctgggaatagtccactttcccctctttgtcccggggcaggttctccagatccaaagtggtcacacggaacatatccccggccccttctgcatcactggcggtgatgatgggggtatgggcatagacaaagccccgctgatggaaaaattcatggatggcaaaggccgcttcgctgcgcacacgaaaagcggcgttgaacaggttggtgcgggggcgcagatgggcgatggtgcggagatactccaccgaatgacgctttttctgcaagggataatcggaggggcactccccttccacccgcaggctttccacctggatttcaatgggctgattgccctgggactcggtgacagtgccttgggcttccaccgcagtgcccactgtcagagcccggcccatgtcataaaccggctggccgccggggcagaccaactggatgtttttcaccacagagccgtcgttgagttccacaaaggcgcaggccttcacatcccgcaccgtgcgcacccagccttggagatgcacctgtttccccagatgctcctggggatgatgcaatagttcttttaccgtcagctcacacattttgtttcatctcatttcttttgtcatttgataaagcggcttttagcttttctgcttgtaagccttgagcgcccgggcgatctggtcggggcaggaggtggtcttcaggccgcagggaacgccgtcaaagcgctcgatgacctcatccaccttcattcctttcagcagatgggtgatgcccagcagatttcccgggcagccccctgcgatctcgatattacggatggtatcattatcattatccaccgtgatggtataccgtttggcgcacacaccttggggttcataaacgaaagtttccattgtatcctccattgcatatagaatgaccggtattccccagtcctatctatcaatctatcacatttgcaaacttctgtccatatatctgccggtaaaatcccattttttgccctcttttgcttctcttttctctggcttcccattctctttggttgttttcaccaattttatgcttgcgcaagcggtgtttttgttttaaactatatgatatagaagcagtccaaatcaatccggtttgtgaaaggccggatccacaaggagtatgcatatgaaaaaagtcatcatcactctcagccgtgaatatggcagcggcggtctggccatcggccaacagctggccgaagcgctgggcattcctttctatgacaaaaggctcctcagccgtgcggcagaggaaagcggtttttccgaggagatgcttcgtcaggcagaatccaaagccaccaacagcctcctctattccctggccaccagcctgggcgtaggtgcttacggccctgacaccctctctctgtatgacaaactctatctggctcagtttgacatgatccgcaaagtggccgatgaaggctcctgcctgatcgtgggccggtgcgccgactatgtgctgcgggccgaagagaactgctatcacttcttcctccacgctcccctggaaaagagaatggagcgggcagtgaaggaatacggccaggagcaggacaacatcaagagcaccgtcctcaagcacgacaaggcccgggccaattattattaccactacaccaaccaaaaatggggcgacgccaagctctatgacatgaccctggacaccacccgcaccggtgtggaaggctctgtcaaaatgcttctccactatttggagaccgtccacgccatctaaacagacaaaccaaaaagccctttccgaaaaacggaaagggcttttttcattgcattattttttgtttttcagcgctttgcgggagcctaccacgcggaaatagggaagctcggtctccaactggtagatggcggcccgggtgtccaggctgtccaggcagccgtcgaaatccacatacagatggaactggtgcaactcgtcggcccagtcgcttttctccaggtggataaactccatgttctgcttgttgtcggccagcaccgacagcactccggccagagagccactttccgagggcatataaaatacggcgctgatcaatccctcctggccttgctggtgatacagcttgggagagatcactgcagccaggcggccatcctcggtttcttcggtgtggttcagataaagtttgcgcttgtccagctgatcgaacagctcgtcagttttataaacaccccgcagagaaaccacacagaagggatattctccccgctccacggcgctgagggcgtcttcctcattttccatgggatggagtgtgagccccaatgccttctgggccgcaggcaggaaagttccatcacagcagccctccccttccggccggccagacacgatgtccttctcatggctgaggcgcaaagcttcatccagctccagaaacacccggtactgccggttgcggctcatgcggagcagggacttccagagcatccgggctttcatctgcagttcgggagaaaggcccatggaaatgctgctgagcagctgttcctcccggcgggccgaatagaccggcaccccttcctggaatttggattgggcaatacggacggaagcctccatccggcgcaggaaaacatccttcaaagcctcgtcacagctggcgacgatctgccgaaacaattcgatctgatccataaaagagagacctccggtcttttaaactgaagggccaatgccctttccaaattgcggaatctgatagatttattttataatttccatggaaggatgtcaatggaaggaagggtacaaatgcttccccgccgtttacaaaatcccgggcctttggtatactttgtttgtctaaattgatcaggaaggccgggagccatcctgaggaaagaagggttttatgatgcgttacatcgatctgcgaagcgacacggtaacccagcccacggaggagatgcgccaggccatgctggaagctccggtgggagacgatgtgtacatggacgatcccacggtgaaccgtctggaagaagaaggcgcccgtatcctggggaaagaagcggccctctatctgtccagcggcacacagagcaatcaggtggcggtgatgacctggtgcaaacggggggacgagatcatcgtctccgacggctgccacatttatgagcacgaagtgggtgctgtggcggtgctggccggcgccaatatgcgcaccctccattttgaaggcggcatccccgatgcatccatgatcgaaaaagccatccgcggcgtggacatccacttcccagaaaccactctgatctgcatggaaaacgccctgtccaacggccgggtggtgcccctgtccgtgatgaaagaggtctatcagatggggcagcgccaccatatccccgtccatctggacggcgcccgggttttcaacgccgccgcttccctgggcgtggatgtaaaagagatcacacggtacgccgattcggtgtcctgctgcctgtccaaaggcctgtgcgcccccatcggcaccctgctggccggcagccgggaattcatccagcgggcccggaaaaaccgtaaaatgctgggcggcggtatgcgccaggccggcgtcatcgcggctcctgctctcatcgccctgaccaaaatgcccgcccgcctgaaagaggatcacgaaaatgcccggtatatggcgcagaagctcagcgccatggagggcatctgctgcgatccccagtcggtggagatcaacatggtcttcttcaccatcgaccggcctcagtccctgcgggacaatctcccccaggccatgctccagaagggcgtcaagatctgccccgaggatcagggacacttccgtttcgtcacaaacaacgacatttcccgggaggatatcgatcaggccctggccgcactccaggaatgcctgaactaaaacttctcttccttatataaagagcaagagagcgcaccgcaaatgcggcgcgctcttttgttttcaatgagtatattccaggatgcgcacatcctctcccacttccttttccaccagctcctgcattttcttatgaaaaggacagggatagccgatgggagttcccttctggatgcagctggcaaaggcgatggcatccgcccctcgtttcaccagctctctggcccgcagcaccgctttcttccccgggcagcctccgcagctggtgaaacccacgatttcgatctcctcttccacctgggcaaaagctcccatatggagccgggccgctttaaagtccgccgtacccggacaataatcttcggtctgcatgcatcgaatgattcccaatttcatggtgtttcctcctttgatctcctgtgttttcccgtgtttttatcatatcacatacccgtttcaaaaggaaagaacttttatcccttttctgctttctctgtcttttccaccgacacaatggacaagggcttgttttcctctagttttccccgataagtgatgcgtaccatgtcccccaaaccgagaaaatccaatttggtctccctggcccaaaaggtgtaggccttcccctcttccggctcccgggccaccaggctccagtcgctgatctgctccacccgcccggtaaaggtgccctggtttccggcgcagccgcccaaaatcaaaagaagccccagcaccagtgccagcagagctttttcccatgtatcatgtaaggtcctccttgtttccgttcttcctgttcttttgacggcggagaagggaaaaaggttgaccaaacggaaagaaagccccattccctttcaagaatgaggctttctgcacagtaaaataatcagtattgcagccgccgcttggcactgagtcccgcaggtgtgatggccagaccgccttcggcggtctcccgcacggcggagggcatattgatgccgatctgatacatggcatcgatgacctgatcggggggaataaaactttcgatcccggccagagccatatccgctgcggcgatggcaaaagtggcatagatgccgttgcgcttgacgcaaggcacttccaccagcccggccaccggatcgcaggccaggccaaggcagtttttcagagcgatggccgccgcatgggtgcactgcttggctgtaccgtccatcacttcggtgagagcggcagccgccatggccgcggccgaacccacttcggcctggcagccgcccgccgcgccggaaatggtggcccgggtggcaatgacggcgccgatacctccggcggtgatcagaccgttgacggcctcccgatcggtaaagccaaactcctcctgggccgcgatcatcactccaggcagaatgcccgaagagccgcaggtgggagctgccacaatcacgcccatggaggcgttatactccgatgtgcccagagaatagctcatggctttggcttccagagagcccatcaggtttttccggttgcggtaatggcggtagtatttggccgcatcgccgccggtgaggccgctgatgctcttgacctcagaggagatgccgcccatggcggcgtttttcatcacctgataggattcctccaggcgggcgcggatgtcttcttcgctcataccgctttcggcctgctcctccttgagcaccacctgccagatggccatgttgtttttggccgcttcatccagaatataatcaatgcttgggatgtccatagaccttcctcctgacggggaatacccccgctttcttcgtgagattttccgccgcctagaatttcggcatggagatcacccggagcacatcctgtacccccatcagatttttgatggtggcctcgtccactcgggcgtcgctttcgatgacggtgatcacatccccctcccgcttggtacgggccaggcggagattggcgatattataccccgccacattgagggtgatggcgatgttggccagcacgccgggggaatctttgttgaccaccaaaagggtatccatcaggcaggctgcctccatgggaaagccgttgagctcctggatgcggatctgtccgccgccgatggaagctccccgcagggagatggtggtgtttttgccgctggcctcgatggccagggtgttgggatggtaccggccttcttctccggtgaaaaattcatattgcattccccggaactgggccagctgcaggctttcccgaatcttcacattgtcggtgttgaagcccagcaggccgccgatcaccgctttgtcggtaccatggccccggtaggtgtcggcaaaggagccataaaaggtgattttcgcctttttcacttcttcacccaaaatggtgcggcaggccaagcccaaccgtaccgctcccgcggtgtgggagctggagggccctacggtgatgggccctaaaatatcgaacatactgatgctcattgcccttttcctcctgagcgcttacgggattatgggaaaatgccccggatcttcttggcccggcacacccgctccagggccagagcataggcgctttgacgcagggtgatgtgatcttcctgagccttggtccacacatcgtcaaaggccttgaggatgatctgccgcagcatccggctgacttcgtccccatcccacaccagggtctggatgttctgcacccattcaaaataggaaacgatcatgccgccggcgttggccaggatatcaggcaccacgaccacgcctttttcctttaaaacggcgtcggccttccaggtaaccgggcagttggctccttcaataatgatatgggccccgatctcctgcacatttttctcatggatctggcattccactgcggcaggcaccagaatatcacactccagacggagcagctcctcattggaaatgtgctgcacaccgtcctcctggtaattttccagcgtaccgccctgggcgatgtgttccagcaccccggggatatgcaggccgctgcggcaataaagggcgccggtgatatctcctactgccataatgcggatgccggcaatgtacatcagccgggccaccccggcgcccactttgcccagacccagcacggcggcagtggtaaggtccaccggttttttcagacgcttgagaacctctctggccacaaaggtcaggccctgagccggagcttcttccatcccctgggagccgcccagatccaaaggcttgccggtgacgataccctggacagcatgacccttcatcatgctgtatgtgtccatgatccagcccatgatctcttcatcggtgttcatatctggggccggaatatcctcgttgggaccgatgaaggggaggatcatggcggtataccgccgggtcaggcggcggcgctctgtgtgggaaatttcgttgatgtccacattgactccgccataagccccgccataggggatgttcaccagggcgcattgcagagtggtcagtccggccagagcctggacttcatcctcgcagacgctggtatggtagcggatgccgcctttgcaggggccccgcagggtggaatgctgcacacggtagccctcaaacaggcgcacggtgccatcatccatctccaccgggatggaaactttcagctgccgctccgggtatttcacaaattcatacgatacccggtccagacccatctgctgggcggcctcgtccacattgtgggtaaaattctcatagggattgcggtcagtgcccataggtatcccaccttttttgcataaattttatgtcccgtttttgtgcaatccgctgcttttatctttgtgcaagcaaaagcacaggaaactgtctttattataaacaatcccgaaccgatgtgcaagacagggcaatttgcttttttgcaccaaagaacaggcccctttttgtacatttcgtcctgtgtgcttttatctttattttttcctcaacaccggggaattaaccatctcgacaaaagctttctctttgtgataaactgataaaaaaagaaagaaggcgtgctgatggaaaacatggtataccaggcccgacttttggagccctctttttggagcattgaagaaaacggcgtccgctgctttctggtggagggagaaaaggaggccatgctggtggacaccggttttggcaccggtgatctgaaaacctttgtccagaccctcacttcccttcccgtctttgtggtcaacacccatgccgaccgggaccacatcggatgcaacggccagttctctccggcctggatgcatcctgccgacttcgaccggtgtgcccgctctccccaaggcaaagacctgtctctccagcctttgtgggaaggccaggtgctgaagctgggccagcgccgttttgaagtgattctcattcccggccacactcccggcagcattgtgctgtgggatgaggaacacaaaaccctcatcagcggcgacagcgtgcaggcaggaaatatctatctcttcggcccgggacgcaatcttcccgcctttattaccagcctggaaaaactgatcacccgctgcccgggcgtggagaccatcctcccttcccacggtcctctccctctgcccggctccactctgcccactcttttgcaggacgcacgggatctgcaaagcggcaaactcaccggcactgctcccgatcgggatgttcccggccacctgttccgcggaaaggctgccggtttctactacgacggccagactctataactcccccatttccggcggtttcttccgccggaaatttttttgcaaaaaatacttgcatatctgctcctcgtctgttatactgataaagctgacaccgttcagagaatctgccagttgacttggagaagtcgcgtagctggtcgagcgcgcacgattggaaatcgtgtaaccgtcaaaagcggttcgagggttcgaatccctccttctccgccagaaaaacagacgaacctttggttcgtctgtttttttattttctcattgatcaaccagcaagataaatattttcccttctattttatcattcatttcacccatttagaactgcaggacttgcttattttttatcaatgtagtacaataaatcaaacagaatacctttaccacctggatgccctttggaaaggaggggtcttatgttcatcgacaagaaaatgagcaaccgttcctttgtccccacaaacatcctctccctgctgcttttggggatcgtttctctggtcctgtgggaattcacccgttcttccagcctgatccgtccggtccacggcccttttctggcgctgctggtggttctgtccctcttttgcaccatttactgcctggtgagctttggattctatttttatgatcatgacttttcctctccccggaagaaatgggggctgtttgttttcctctgcctcctggccctgctctaccttgtcatttctttgtctgttattttcccggccttttcggaggcccgctgggacgaaggcgcaagccaggcggtcgaccgctattttgatttttccttcggaaaagaggaaaagtcctccgcccgcctcactccccatgacccggaggatgtgaagtggcattgggatatgctcctttgggccggcggtatcctcttcttctgtctgatctgcaatatgatctatctgcccatccgtctgcgggtggccaaggaaaagggctacgacaccgacagcatcggcaacctgctggccagtgtagccattctgctgctggtgatcctgggcctggccaaaccttctctttactggtggctgggcggcttgctcctggtgctgctggcggtgcgcatccccaagctggggctgcttcacgccttgctcttcaccttgttccaaccctttgccctgctggacagcggcctgagcaaagtcaagcttctctccacttcggtttccaccaccagcgccatttccgctgagatgaaagcccgctccgccggtctgcaccaaaccatccgcgatgaggtccgggaggaattccagcaggacatcgaccaaaacaccactgtacaaacccacaaagaaccaaaaacagaaaaaacagaccgcagcatctgatttgctgtgtctgcccatgaaaaaaggaagccgaaacggcttcctttttttcatgcagtttcaatattccgtggatctcagcggtaatccttgggggaagaaacgatgtttttcacaaatgattccatctcatcctctctgtaccagctgtacgaatagaccgtatacttttcatgtccatcccgctggaaggccgcatcgcttcgcaggaagaaggcattccggctcccactggtgtccgcccaagtcagatccacattgtaccagaccccatccagctgcaccttgttccactggtgtccttcgctatagtcttccgggtaggcgcacacatgaacgcagggaatcccggccatattcatcaggagctgaaacgcctcgctgtaaccgtcacacaccacatccacgccgttggcaaaccccatccagctatggcacagccagtattccggatctgcctccatgatctcccgttcctctgtgctgggattgttgacatcgatcccctggctttcaaatttcttgagcagcgagtaattgtattttgtattgtcgatcactgcatgatacaaggttttaacgatctcataatcgctcatgccttcggtcacatgttccttgtaaaaagcgatcatccagtccatggaatccagcagatattgtctgccattgtccggcgctaccttatacagttccaggaacccatcccactggtcgccggaaagatatcccttctctcgatagaagggcatattgatatattccggattgaacacatcccgataccggcaaacaactggccgctgacgccgccgatctgcttcggaacacctccgccgcttccagccaatcggttcaggccaccgccaaggtgctggacaccctcaccaatcaattttccgccctggagcagcttcatgccgttttggaacagatcaacgccgccatccaaaccaactccgcctctgctgaggaaagcgcagcggccagccagcagctgcacgcccagtcctccgctctggagcagcatgtgagtgttttcgccttgcattaaccccctttttcgcaatcaaaaaacaggagcccaggggctcctgtttttgacttcacttacatttccagcgccagctgcttgtcgggagaatcctcctctttcagcaaagcacccgccgcaggaagggttcgtgtgcggtagcgggccacattgacaatgcccgattccgccaacagaacggcttttttcacctttttgttctttttcaggctcatcaccaccacaccctgagaagaacgggtggctttggctgccacggcggccgtggacaccaccagtgcccgactgtcggtggaatagagcaccgcttccccttcttccggcaaatgcagtaccgaaaccaggggggatttatcgcaataggccccggtcagccttctccggttggatttggtatcaaagctcttcaccggaattttggccaccttgccgttttcatacacatacagcaagtgaccgctgtaatccccaggcaggaagcagaagatcacccgctctccatcgctcatctggagcttttgaggcagataatcccccagcaggctggccttgccatcgtcaaactcgtggaggcggcacttataggcctgcaccttatcggtgaggaagatgatctcactcttgttggtgcactccgtcgtcatggcaacggcatccccttccttcaccttctgctctccgctcattcgcagagactggggcgtgatctttttaaaatacccctcccgggtgaggaaaatatgcaccgggtagtcttcgatctgatcttcctcgtcgtactgctctacctgatcttcatagatgatggcggtgcgccggggtgttttgtactttttgttgatctcccgcagctcgccgatgatgatgtttttgatcttccgggagtcggccagaatgtcctccagctcctggatctcctgggccagctcgtcggtctcccgggtgcgcttcagaatatgctctttgttgatgttccgcagcttgatctcggccacatattctgcctgaagctcgtcgatgccgaaaccgatcatcagattgggcaccacttcgctgtcttcttcggtgtcccggatgatggcgatggcccggtcaatatccagcagaatcttccgcaatcccagcagcagatggagcttttccttctttttacccaggtcaaaatagaccctgcggcggatgcactccacccgccaggcgctccactcttccagcagctgtcccacgcccagcacccggggcgttccgccaatgagcacattgaaattacagccaaaggtgtccataagcggggtcatcttcatcagtttggccatcagcttctgggggtcagcgccccgcttcagatcaatggcgatcttgagaccctccagaccgctttcgtcccgcatatcggagatctcccgcaccttcccctggcggatcaggtcggtaaccttgtccataatggcttcaatggtggtggtataagggatctctgtgatctcaatgatgttttcctttttcagatagttccacttggcccgcacccggaaagagccccggccggtgcggtagatttcctccatctgcccctcgtccaggatcagttcgcctccggtggggaaatccggccctttcaatgtatccatcagccggcagccgggatttttcagataggcgatggccgtgtcacagacttcattcaaattgaagccgcagatggaagaggccatgcccacagcaatgcccaggttggcgctgaccagaatgttgggaaaacgggtgggcagcaaggtgggttctttcatggtgccatcgtagttgtccacaaaatccacggcatcgcagtcgatatcggcaaagatctccccacagaagggatccagcttcacctcggtataccgggaggcggcataggccatatcccgggaatagaccttgccgaagtttcctttgctgtccacaaaaggagtgagcagggattcgttgccccgggccagacgcaccatggtctcataaatagcagcatcgccatggggattgagccgcatggtctgtcctaccacattggccgatttggtgcgggccccctgcaaaagccccatcttgtacatggtgtacagcagtttgcggtgagagggcttgaagccgtcgatctccgggatggcccgggaaagaatgacgctcatggcatagggcatatagttttcttccagggtttttgtgatgggctggggaataaaacggtctttgggcaaaactcttttcctcctttagctcacatcggtgagatccagatattcgctgccgtgctgggcgatatagtccttgcggccctggaggttgtcccccagcagcagatcaaacacctggctggttttttcggcgtcctcgggcatcacccggatcagtctccgggtctccggattcatggtggtctgccacatcatttccggctcgttttcacccaatcccttggagcgctggatggagcatttcccctccagctttttgacgatgtcgtcccgctccttatcggtataggcaaaataggtcttaggagcctttttgctccccttgccccctttggtgttgatctcatacaaaggggtctcggcgatatagacatatcccttctcaatgagctgaggggtcaggcggtagagcatggtgagcaccagagtacggatctggaacccatccacatcgccatcggtgcagatgaccaccttgttccaccggagcatattcagatcaaaggaagaaagctccttgttgcgggtctggatctccaccccgcagcccagcactttgatcaggtcggtgatgatgtcgcttttgaggatcttattgtaatcggccttgaggcaattcaggatcttgccccggatgggcatgatggcctgaaattccgggtcacgcccctgcttgcaggaacccagggcggagtcgccctccacgatatagacctcccgcttgtccaggtccttgctgcggcaatccacgaacttctgcacccggttggtcacatccatggtgccggccagcttctttttgatattcagccgggtcttttccgcctgctcccggcttcgcttgttcaccagcacctgatcggcgatcttgtcggcctcctggcggttttcgatgaaatagatctccagagtggaccgaaggaactcggtcatcatctcctggatgaatttattggcaatggcctttttggtctgattttcataggaggtgtaggtggaaaagccattggtcaccagaatcaggctgtcggaaatatcggcaaaagagaccttgctttcgtttttctggtattttcccgtctgcttcagataggcatccaaggcagagacaaaggccgagcgggccgccttgtccggcgcgccgccgtgctccagccaggaggagttgtggtaatactccaacagagcccccacattggaaaaacagaaggcggcctggacctttaccttgtattccggcttgtccgaccggtctcttccccggcgctcggtctgattgaactgcaccgaagtcagggcattgtccccggccagctcctttacatagtccacaatgccgttttcgtagtaaaaatcctcttcctcaaacttgcccttctccacttcctggcggaaatggaaacgcagtccctgattgaccacggcctgctttttcagcacctgctgaaaatattctctggggatgcgggtatcggtgaacacatccaggtccagtttgaaacggtgggtggtacccgtctgttttggagaacagggctctttcagcaatttgtccggcccttcggtcacattctctccccggcggaaatggagggtatactgccagccatcccggcgggagatcacatccatatattccgaagaatactgggtggcgcaggcgcccagaccgttgagacccagggaatattcataattctccccttcggcgttgccgtattttccgccggcatagagctcgcaatagatcaactcccagttataacggccttcccgctcgttgtaatccaccggcacgccccggccgaagtcctgcacctcaatggacccgtccagaaaatgggtcacattgatcacatggccgaacccttcccgggcttcgtcaatggaattggagagaatctcaaaaaaggcgtgctcgcagccctcgatcccatcggagccgaaaatgaccccgggccgcttgcgcacccggtcggctcctttcagagccgagatgctctcattgccatattcctgcttcttctttcttgtcatataccctccgaaaaaagcccctctctccaaggcatcccttgaaaagccaaggcatacattgataccatatcgggccatcctgccaaaaatgcttttcccaaggcgcaaaagaacaaagccccgcaggacgcggcttaattcatatcataatcaaaaaaagccgctctgtcaaatggccctccgttccctctgtgtatatttgccggaaaagggaaaaaaatattcccatcctgctttcggaggtatttaccatgcgtgtattttctttcccctttggcaaaaagaaggttccctctcctctggagcttcgtcaggcccagctgctggaagatctgaccgaaacccggcggcagctggccgccgcccgctgcctcttccagcagaccagcgaccaggacctggtggctgcctcagtctatgagatcaacgccttgcaggcccgttactcctatctgctccaccaggccaaactccacgaagtgcggcgctcggcctgggcggcatcctaaaaataaaaaaggacggcacagccgtccttttttatttgtccgggaacaggggtgttttttcccatccctccaaaggctgacgctgcacagcgccgaaaatccgcccccgcaggccggggttttgcttttccagcgtattcagcagctgctttacttcttcccgcttggtgtttttgtcggccggacaagtgctctccaccaccggcagatgctcccggcggacaaaattgcggatctcccgctccgggatatagagcatgggacggatgcagtggatatctttccggctgaggtaggtcaccggagaaaagctgtgaaaacgcccttcataaaataaggagagcaaaacggtctccaccacatcgtcaaaatgatggcccagagccaccacccggcacccttcggccaaagcggcatcgttgagggcgccccggcgcatcttggcacagagggcacaggggttgctctctttgcggatgtcgaagatcacctgcttcatctgggtctggcggatcacatagggcacctcaatggcccggcagaaatcggcaataggggaaaaatccattccctcaaatcccatatccagtgtgatggccgtcagctcaaaaccgccgggataaaaccggcgcagctgagagagcagatacagcagggccagggagtccttgcctcccgagacccctaccgccacccggctgccgggaggcaccatattataatcctgcatgcagcgcctagccagcgccaaaagttctttcatttctgatcaccgctcttcattttaaaggaaaagggggctgtttggcaatggaaaaagacaaaaaattttgaaatagaatgtgagtaaatcgaagatatccggcgtaaaatggcaaaaacaaaaggatatcctcttgcaaatcacaatttcgaaaaataactgttgacaccggttttcccctatgatataactagtaaggtcaaaaaatcaaacatttatcacgataaacggaggattcaagatgtccacattcatggcaaatgctcagactattgagcgcaaatggtacatcatcgatgctgccggcaaatccatgggcagaaccgccgccaaggccgccgctatcctgcggggcaagcacaaggtggattttacccctcatgccgacaacggtgatttcgtcatcatcatcaacgccaaagacgccgttctcaccggcaaaaagctgacccagaaatactatcgcacccactccggttatgtgggcggcctgaaggagacccagtacaagactctgatggccacaaagcccgagctggccatgcgccttgctgtcaagggcatgatgcccaagaactccgtgggccgctggtctctggaccgtctgaaggtctatgccggccccgagcacaaacaccaggcccagaagcccgtggccctggacgctgaataatcaggaggattgcgaagatgtatacaccgaaaaaagcttatttctatggcaccggcagaagaaagagctctgtcgcccgcgtccgtctgattcccggcggcagcggccagatcaccatcaacaaccgggagtttgacaactactttggtctggacactctgaagaccatcgtcaagcagcccctggagctggtgggtgtcaccggccagtttgacctggatgtgaaggttcagggcggcggcttcaccggccaggccggcgctatccgctttggcgtggcccgcgctctgctgcaggccaacgaggagtaccgtcctctgctgaagaaggccggtttcctcacccgcgaccccagaatgaaggaacgcaagaagtacggcctcaaggctgcccgtcgcgctccgcagttcagcaagcgctaattttccctacttctcagtgcgtctcagggcgtcgatttgcaggaaaattcagtacttttggagctgtgcgttgtcctcggaagtgttctattttgcttcgtaaggagcaagtaaggagcacacaaggaacaagaatcacaagcgaaaacaaaagccttatgaagcaggagatcgttccgcaaggagcgtatct

SEQ ID NO: 1451 - DNA, 32759 bp, Unknown
  16S sequences of unknown bacteria
tcgaaaacttcaacgaagagaacatcatcacggggcttctctctgccatttgccgtacccgcacctattcctttgaagaagtaatacgggtcatgctgacggacggcgagcttgccgataacaagttcctgtccgaaatggagaaatacggtttgctggacgatttttggaagctctgcgagcagcatttcggttataccgatgtcaagccgacgctggaaaagctggtggtgaccatgttcgtcacctacaccgccaagtatgtaggaggcgagcttccgaagccatggaaggtgttcctctcctataagggcggaaatatcatcgcctttatggacaacctgatgaacaacatcctgtaccgggggcggtatgatgagctttccgctcatgtggcgtccggcttaaatgtccagaaagctttttccgattatccacccgagggtctggtgaactgcgatactttccttgccatcgaccagctcctcatcaagtgggttgtggagcggcttttggccgaggatgtgggcgcgaagctggatgatttgaccatcctacaaatctgcgagaagcggagcaaaatgcactttggggagaagactgggggctgctatcagatgctcagcagcgcataccagatcgttcaggtcggaaattaccgctgcccggacagtttcaaagacattctgcgccagtatcaggagaacgacttctggctggactgcgaatatcgccggttttattctgcctatgatcagatcgaggaagcagcagctttcgagccgctgcgcgatttggtggagaacatctacaccaacgagtatctggaaacgctgcttcccaagtggaatgctgctattcaggagccggacgcatttgtggcgctgcccttgcagcgggacttctatgcccgcaatttgagaaatgccaaggagcgcacggtggtcattatctcggatgccatgcgctatgaggtgggcaaggaactgttccgccggatgcaggatgacccaaaatgtacggcgaagctggaagtccagctcagtgttttgccgtcctatacccgtctcggcatggcagcgctgcttccgcacacggagcttacgatgacggacgatttcaaggtgctgatcgatggtatgccctgcgataaccttgccgagcgtgaagcagttttgcagaagtacagcaaggacagcacttgtgttcagtttgacagcattaagtcgctcaaggtcgccgaactgcgcagcattttcaccggcaaacaggtcgtgtatgtgtaccataatcagatcgatgcccgtggcgataagccaaatacagaagacgaagtttttgtcgcctgtcaggaggcgattgcggaaatcgtcgacctgatccgccgcatctctaccagtgcgaatacataccggtttatcgtcaccgctgatcatggctttatttacaagcgggataaagtcgctgagagtgataagattgaggggatcaagggcaagactttctttatcaaccggcgttttgtggtcgcacaggaaccggtttcaggagatggcatcgccagcatggagatgggcaaaatccttcgcaacgatgataccaaatgggtgtcctatcccatcagcgacgatgtgtttaaggcagctggcggcgggcagaactatgtgcatggcggctcatccccgcaggaaatgcttgtgcctgtccttgacctcaagatggaacgcggacacatggagacgcaaagtgcgggcattgcgctggtaagcatggtgcgcaaaatcaccaataagatcaccatactggatttcattcagtccgagccggtcagcgatgtagtcaaggtagcttcctatcgtttgttcttcgtctccgatgacaacgagcggatttccaacgagaatagctgcattgcggacagccgagaacaagatgctgccaaacgcatcttccgcatgaaatttcagttcaaagacaagaagtacgacaaggacaagcagtatttctttgtgatatacaatgatgcaacagggcttgaggtgttccggcatcctgtcatcatggatatggcatttgccgatgactatggcttcggcttttgagggaatacccgcgtgacaggaggcgattcaaatggttgacacgatagaaaatgaggataaaagaactgtcatcaaatcgaaattgcggcaaaatttcgacgggaagatcgtgcgcaaggatttgaccaagaaaatcaaggaaggcgcaaatgtgcctgtctatgtccttgagtttctgctgggacaatattgcagctctgatgacccggagattattgaagaaggcgtagagaatgtcaaacgcattcttgcggataactttgtccggcctgacgaggcgcagaagattctctctgtgcttcgtcagcacggcagctacaccgtgattgataaaattacagttaacttgaacatcaaacgagatttatatgaggcagagttctccaaccttgggctcaagaacatccccatagacgaagaatatcccgccaaatttgaccgcctgctttgcggcggcatctggtgcatcgtgcaactggactatgagtacatggaggaagatcggaacggaacgccgatcagcatccgaaagctcacgccgatccaaatgcctcatgtggacatggaagaactgaaacaggggcgaaaagcatttacgcaggatgaatggatggatgtgttgctgcgctctatcggcatggagccggacaccctgacttaccgtgaaaagtggctgctcctgatccgcatgatcccgcttgtggagaacaatatcaatctctgcgagctggggccgcgcagcaccggcaaatcccatctctacaaagagatttccccgaacagtattctcgtttccggcggtcagacaacggtagccaatctgttttataacatggggcgcaaaaccgttggtcttgtcggtctttgggactgcgttgcctttgacgaggttgccggtatcaggttcaaagataaggacggcatccagatcatgaaggactatatggcatccgggtccttcgctcgcggaaaagaggaaaaagccgcaagtgcgtcaatggtcttcgtgggcaatatcaatcagagcgtggatgtgcttctgaaaacatcaagcctctttgatcccttcccgcctgagatgggtaccgatacggctttccttgaccggattcactgctatctgcccggttgggaaatcccaaaattccgcccggagcatttcactgatgactatggcttcattacagattacttagcggagttcattcgggaactgcgcaaggagcagtacggcgatgcgctggacaagtatttccgcttgggtacaaacctcaaccagcgcgataccattgctgttcggaagatggtcggcgggcttttgaagcttgtttacccggatggagagttttccaaagaacaactggaagagattttgaagcttgcgcttgagatgcgccgccgcgtcaaggaacaactgaaaaagctgggcggcatggagttttatgatgtgaatttctcctacatcgacaaagacagctttgaggaatactatgtctccgttcctgagcagggcggcggtaagctgattcccgagggtatgtgtaaccccggtcaggtctatacggtctcgcagggaaaatccggcatgattggtgtgttccggctggaatctcagatgcttcccggaggcggcaagtttgagcgcacgggtattggctcggaacgcgaagcaagagaggccacaaacaccgccttcaacttcctcaaagcaaacgccggacacatcagcggaatgatcagcatcacgacaaaggactatattgtcaactatcaggatttgcagggtatcggcatgaccagtaagctcgcgctgccgactctgatcgcccttgcttccattgcgctgaacaaacccactgtcagcagtttggctgtgctgggagaaattagcatcgccggtacgatgattaaagtggatgagttggcaaacgccctgcaagtttgccttgacagcggggcaaagaaagtgttgctgcccattacatccgccgcagacctcggctctgttccttctgaattgattggttgcttcaacctcatcttctatcagagcgcagaggatgcagtgttcaaggcgctgggcgtagaataaaaggcaatagaaaagcctcggctgacacctacaagggcatcgaccgaggctcttctcttttgatagaaaatcaacctttatcccgatagattttggctttgtcccgaacgcttggaaaaataatgcggacaggcgatgataacggcacggaagctctgcttgcagggatgaatgcagcggcgacacaggtcattgtatttgcgccgaacgtcgctgctaaaaaagcagtgttcaatcttttctgtaaatgcgcaaagtggggcgcacaaaggatttccagagccataggtctcaatctgcgagcgaccgctaatgcagccaccgcgttagcggctcggcattggcaggttgccggggaaatgctaaaatggggaaccgacgggcgaccgatgaagattctgattcccgtcaccgtcggtgcaataagcatagcattttcccggcgttctgtcaaggctggcgtcgagcggacgctcagcctctggctccgggcggtcagtcgccgctcagcctgccaggatacataatagccagttccgcgtagacctgcccccaatttcgaacggtcagtgtccattttttcgtcagttcccagctcgccaggtagagcgccttagtgaggcccatggcgttggggaagaccgtgcgattgcggttcagccggcggaacccgctgttcaggctctctatggcattggtcgtatacatgaccctccgagcggtctgcgagaacttaaacatcgggctgatgcagtcccagttgtccgcccagcggttcatgcagcctggatacctggcatcccaagttgcccgaatctcttccaaacgcctcagagcggtttgctcgtccggtgcgtggtagattgtcttcaggtcattggcgaaacccttcttgtccttgtccgccacgtatttcagcgtattgcgcaccatatgcacgatgcatcgttggtattctgccagcggatacgccgccgctatggcttccttgattccgctcaggccatccgcgcagatcacgaaaatgtcctgtacgccgcggtttttcagctcattgagcacgctcagccagaattttgcgttctcgttctctccgatcgtgatgctcagcacttccttgcgcccttcctcgttgatgccgagaatcacatacgccgccgctttgcggatcacgttgttctcccgcatgttgaacaccatggcgtcaatgtatacgatgggatatagcgcgctcaacggccgcttctgccacgcctcgatctccggcagcagcttgttcgtaatcgccgtgaccatcccttcgctgacctcgaacccgtaaatgtccttgatttgctccgaaacctgcgctacgctcatcccgcgtgcatacattgcgatgatcttttcctcgatctcgctgatgtccttcttgtacttcagcaccacctgcggctcgaagtcgctatttcggtcctgcggtacctggatggggatttctcccatgctcgacttcagcgccttgggtttgtagccgttgcggctgtcgtgatattccggatcctcttcttcccggtcttccatctgctcttccaattccgtctccagcatgctttggatcgtcccgcccagcaggtctttcagcgcctcctggatgtccgctgccgtcttgatgtcgtacatctcgatgagctgtccgatgatgttccgcttctcttttacagaaaaagttgaacaggcttatcgaactgacctaagatataaaagcggaaggcttcctctgttttttcatccatttccgaaagttcatttctgtaagtcaccccggacttatagtggccggagcgccccttgtaccagcattcaggcgctcggtattttgccggattgatctcgcggtcaatcagataaaggataacatcgtcggtacggattttgtaccgacgtgttttttgccgctgtccttgtaggggactttcccgctttggagcaggaagagcgccgtcgctttgctgatatgggcgatgcgataaaactgatccttcgtgatgacctcggggtactcacgacgaatgggttcgtagtattcaagtttttcttttatgctgataaccaccttgttttttcttggcagaggtaggtgttatctgcatagcattcgctgttttcttctcgagttctccccattctcccgatagcgagccttttttcccaaaaaatcgggaaatactcgaactccttgtgccatcgagcttttcgggatttccgatgccgaagagcactgaaatccttgattttatgtaggcttttaagtttctatgatttctgtcataatctcttgttttctttcgaagccgggatagcaacgccgacttgaaatgcggttgtctgaaagggcacgtgggttcgaatcccaccttctccgccaatcgaccgctgacaaagtcttgtcagcggtcgaattgttgtaacgcaaaaccccctgcattcgctggaaatgcagggggctttgcgcgttaatgcattctgaaatccaggtgcgcgggcagaggctcgtccgtgtgcttgagttcctgcaagcggaaccagaggttggaaagggaaatttccccctcgcgcacgtcggtgagcacgatattgccgcgcaggatgcgttcggctgctgagagctttcccgtttccagcagcgctttggtgcgcagcactttcacgcggcccaggcggcggatgccggcgggcagactggcggccacgccttccactttgtcgtattgctccgcggcgacgagcgtttccagcgcctcaatggccaggttgcgctgcgcgcgcatggcgaccgcttccagcatgcgtccggcggcggaggcgagatcgcctgccatccgatccagtacggccaggcaacgcagcgcccagggcgatttctgctgctggagcgacatttcgaacgcgtggcgcgcctcgtcgcgctggttgcggtaagcgagcatcacgcccagttgataccaggcgtaccaatgcccattgccgttttcaatggatttgcgcaatagcgccatccattcatcggaaacttggtatccgcagggagaagcgagcggatcggggcagggaagcgcgccagtggtgagcagcgtcttccattcgcgctcggcggagcccaggcgcgccgcggggaagcgcaggccgtgcgcgtcgaacccgcccagaagctgttccaggtgcgcccaaccgtccgcctgatgcacaaaggcgccgtgcgagccatccgcgctgtggaaacgcgcgcgcatggtttccagcgtttcttcgctcaccagcgcgttgagctgttcttccacgcagcggttggccacgtcccagttttcgccctgcacgacgttcgcgtctgcctgcatggggccataggcttccacccattccacgctggctccggcggcgaagggtaggtgctctagctgcgtgtgcgccaggccgcattggatttccacataggcggtatccttatccgccaggaattcctgccagcggcggccgcccgcgcccatgccccacacgaacagcttgcggccgatcaattctggcgtggaggtctccaccagcccatagccgtccttgccgagcgcagcaatccagtggcggcggttttcgggaatatcaaagaagaaatccatggactggggaatctgcacggagcggctcgcgtcccaatcgggctgatagggatagggcaccttggtgagcgcgccgccatagccatagcggaaagcgcgctccgaaggcacgatcacgcgcacgtcctcgcgctcgtccacggcgatgttgctccaccagtagaccgccgtgtcctgttggcgggcgttgtcgatcttgatgcgcacatacagcctgtcgcccgcaagcgaagcttccacgcgatacaccaaatggcgcacgcgctcgtattgatacatgcgcagaatgggttcgccgtccgcttccacggtttccgcatagagggaagaaactgtaaaaggcgtatggccgatgatgcccaggttccattctacgccgcccgaaatccaggcgttgcgcaggccgaggttgcagggctggaacaccggattgcggcacaaaagctcgcgcccggtctttttatccaccagcgaccacagacgcccgcccaactctggcaaaaacgtggcgcgcaggcaatcgttttccagcacggcggccttccaggcgcgcggtttcttttcgcggttgtaattgtccaggatcgtatagggcaggatgccgtttacgcggccccagcccatgtactgggattcttccggcgagatggtttgcgcgtccacattgatgttggcgtgcgcatcctgattggctttcaaatccggcaggggattttcccgccccagggacgcgctgggtattaccagccgttccatcgaaagcgtgctcatgttgcttacaacccttccttttcatatctcggttcgatatacgatttattataatcgttgccgcccgggaaattcgcgctcttgagaacgccaggggtcttgccctttttcatcagttcttccaccaccacggtggtcacgctccacaggataaacgccgcggaaaggccgctcgccgcgcacaggcgcgcctcgatgccttccacttccatcatggcttccgccgcgggcgcgcagttgtcgagcaccacgtccgccagctcatagagctttttgcccgaggaatgcgggctttccacctgcgtggcatagctcatggaagtgacggcgatgatcttcagccccatcttgcgcgcttcataggccagatccacgatggagaacgtgcggccggaaacggagcccaggatcatcacatcgcccgggcgcgcgcccgaagctttcagcgcgtaggccgccagcccttccatcgaagtgtccaaatccgaacggtcgcgcttgcgcaccgggttgtccacgaccagattgtacttaaattttttgtacagaatcagcccgccgccgcggtaaatcagctcggaatcgatgatgtggccggaatcgcaaatgtgcacgcacgcgccctgatccacggcgtcggcaatcagcttgcctgcggcgatgatgttttcccgctgcgtggttttcacgcgggaatacaggtcgttgatggtgtcccaataccgatccagtagcatttttggcagcctccttcaatttgtttgcttggaaatttgcgtttatccccgggtatgccccatatagaagatgcggtcttggtattcggccagcatcttgcggttgtgctcgtccccctggtcgaggttggcggacataaagatgggcggaaccatgcccgattgcgcgattttctccacggcgcgcgccatcaccgcgttcacaatggccgcccccaccgccgtggacgtgggcgcgactttttccggcacgccttcgatttcaatggccgagtcgcccacgcagccgcaattgtcgatcaccagatccgccgcgtcgcacagccgcaggccggacgcgtgccgcgaagcctgcgcgcgcgaatagtccacgtttgtgagcgcgatcacgcgcacgcccttttccttggcacgcagcgccgcgtccaccgtgaccgcgttgcggccggaaaccgaatggatcaaaaatacgtcgcccgcccgcatgggctggttgtccacgatgatccggccataatccgccatgcgctccaattggctggtcatggtggctggatcgatgtccaggcacagccccggtgcgcgcaccggattgatcacggccaggccgcctgtgcggtaatacagttccagcgccaaaaggcccgcgtggctgcagccgaaggcaaagatacagtttccaccctttaccgcctcggcaaaccagtccgcggcctgctccatggcttccgcctgcgtgcgctccactttatccagcacttcgcgcaccgcgccaaaataccgaccaatcgcgtccatcgcaaatcgctcctttctgttgcgtcgcccgttcatggctccgctcaccactgactgatatgctctggcatccgctgcatcagcaatgcgcgcgcttcctcgcgcggcatgcgctccgccgccaggcgcaccgcgcccgccagggccggttcaaagcagggcttgcaaaccacgagttccgggttatactctatcagccgggcgcgaaacgcctcgaacatcagcgggtgcgttttccatgcgccgccgccgcaggcgatttcgcccctggctccttcgcgttccatcaggcaaatggtttgccgggccatcaattcgcccgcctcgcgcacgatggtttgcgccaccgcatcgccctttgcgcaggcttcgcccacaatccgcgtggcttgcgccactttggcaaagggggaaggggacttgtgaatggcctgcaccagatcgtaatcccgggcaaggctccagcgctcgcggatgaggtcgaagaggatcgtctttttgccccagccctccagcgcggccacggcggcgcgcaaggcctgctcgccaatccaggtgccgctgccctggtcgcccaggatgggcccccaggaaccgaccacgagcctgcgccccttgggcgccgcgggatcgatccaaaacacatccgaccccgtgcctgccagcgcaaaaattccgcagggttttagcaaagcggaccacaatccccccaccggctcgcccattatacaccaattgccaacggtgaaacgttcggagataacttccttcaaaatgtcgattgggccaacaattgtcacatacgcgcattccagcgccgctacgccactttgggccgccagcgcgccgatgcatgcttccatatttttccggctgatttcgggcgaattttgcgtggtattcacgccgcccgtctgcgccgaagcgagcagggtaaactcttcatcgaagagcactgccgcgcacttcgacccgcccgcatccaatgaaagatacgccttcattttctgcaacatcctttgccgccattttgcctgcgcacacgcatagcataccatatgcagccacaaaatacaatgcttaaactggcattgtattccacaaaatttttggcgcaagcggccggcggtttttggtgagattgctttattttcgtgtgatttgcgccgcggaagaaaacccgcggcgcaaagagcaatatgcaattgggggatccgcgccgcccgcacacggcggacagcgcgggaggtactgggtttattcggcggcggccgcatcgcgcgcggccatccactcgtcgatctggcgctgcacttcggccacgatcgtatccacgccattggccttgagctgctcgcggaattcattgacgtaggcttccacgtcctcctgcgaattcagcttgccggtggcaatgtcgctctgatactgcatcacgatgttcgtacaggctgcaacctcattcaccacgttctctgtgttgaaggagaagcccatgtgggtcggaatggcgcactccgcgttcaggcgggccatctcggtgagcagctcgttgttcgggccagtgaggtcggcgggcgcgttcacgatcagcaggttgccgagcggagccgcataccacatgtagtagccgcgggcagccggatcagagttgcgctcggtgaagaccattctgccattctcgtcgtaggtgtagtgtacgccttccacgccaaagcgcagcatggtggccacttcggggttggtgttcacttcgttgaggaccatcatggcgcgctcgggatccgcgcagttggcggaaatcgcggtgccagcggagaagtagttgttggtctccgtccagatggtatcgctcatgatcatcttggtctcaaattcctcgccgtacatgtgcggctccatgtaggtgtagccccagccaacccagccgaacacggcgccggtgtactgccagtcgctgcggtcggtgtagtcataggcctgtatgccgtccgccacccagcgctggcgcagcttggcgaactccatgtattcgggcgtgtcgtagaaattgaacacggtgttgctatcgtagccttccacatcgtcgatgccgtcgatgttgcacaccgcgaaataggcgtcgttgaagaaggtctcaaacgcgaagtagtacggatacgccaggttggtgtcccacaccacggggtagtccgcccattccggatgcgccgcgtcgcgcttttccttcacttcgtagaacacttcctcccaatcgtcgaaggagttgtattccacgctctccatatcgatgcccagctcctccgccatggtggcattgtagacgagcgagatgaagtagccattgtccttgagggagggaatgccatagatgttgccattgatgcgcatggcttcccagatttcctcatcgaacagggcgtaggtatccgccccgatggtggtgagcagatcgtccagcggatagtacgcgccgcgctgagactcggtcacgtagtccagcttggtctgtgaaccgaaaccgatgatgcccacatcctggccggaggagatcatcacgcgcatgttgtcccagtattcatcgccagaccagaagtgcaggttcacgttgcagttgaacttctccagcaggatttcgttgagcgcatcgttcacgatctgggagtctgtctgctccgtctggccaaaataccaatcgatcgtaacgaacgggagctcttcctccgccatggcgggcgctaggctgatgcacatggccaatagaacgaggatggcgagaagcttgcgtttcattggagtacctccttttatttctaccgcgcccatttgcgcggtaagatactttgtcattattctttgatgctgcccatggtgaggccctgcacaaagtagcgctggaagaatggatacgccgccaggatcggcaccacgatgatcactgtacaggccatgcgcaggctctgcgtgggcacggtgcgcaggtattgcaaaccatcgggggtactacccacgccggcgttgcgcttgaggaaatcaatgctcgattggatcttctgcaaaagcgtttgcagcgggatcaagctgtcgttggccgtgatgtagagcatgccggtgaaccaatcgttccagcggctgacgacgttgaacaggccgatggtggctaggcccgccttgaacagcggcagcacgatgctgataaacacccggaaatgccccgcgccatcgatgcgcgccgcctcaaacagcgaatcgggaatcgtgctcaggatgaacgtgcgcaggatgatcacgttgtaagcgctcgccaggctgggcagcaggaagatccacacggtgttgttcaggtgcagatagcgcgtgttgatgatgtacgagggcaccaggccgccggagaacagcatggtgaagaacatcatccaggtgaggaaacgccgcgccggaaagtgcttgagcgcgatcacgtacgagaacatggacatcaccgtcaggctcatcacggtgcccacgatggtgtagaaaatggtgatgatgtagctctgcgccacctggtcgcccattttcatcaggtgcccgtaaccgttgagggtccactcaatggggaagaagctgtagcccacctcggaaatggaggcctcgctggagaacgaaacgatgatcaccagcagcatgggcagcaacatcagcagggagacaagcgaaagaatgattgtgaatagccagttccagccgggcttgagccgattgaatttgagttccatatcttcgcctcccctttaaaacattgcgctgtccggatcgatcttggtcacgacccagttggcgaacaataccatgataaagccgacaaccgactgatacaggcccgccgccgtggacatgcccacgttggaaagctgcgtcaacccgcggtaaatgtaggtatcgataacgtccgtcacatcgtagatgcggccggaattcttggtgaccacgtagaacaggccgaaatcgccgcggaagatggaacccatggccatgatgatggaaatggccatgatcagccgcaggtgcggcacggtgatgtaccaggcctgctggaatttggaagcgccgtccagcacggcggcctcgtagtaatcctgcgaaatgccggagatgaccgccagatagagcaccgtttggtagcccacgtttttccaggcgttgatgaacaccaacagccccggccagatttcgctcaccgcgtaccagtccgtcattccgcgcgcgccggtcatgcggataaaggcgttcacaaggccgtaatcgcggtccaagaaagcgatcaggatgatggaaaccacggcccaggagaggaagtagggcagcatgtaaatcgtttgcagggtcttggcggttttgcggaaggtcagttcgcttagcaatagcgccagcagcacggcaaagaacatgttcacgcagatgaacaccacgttgtagcacactgtgttgcgcgtgatgacccacgcgtccgtcgtggcgaaaaggaattcgaaatttttgaaaccgacaaagggggaagccagaatgcccttggcaacgtttagattctggaacgccataatgagaccgaacatcggcgcgtaacagaaaatgagcaaaaacagaatggttggcagagccattaaccacaaagagatgtcttcccgccggaaaaagcgatgctttttgcgtagctgcacttgcgccatggcgttcactcctttactttttggggctcgcattcggcatttggcacattttatgggacgcattcgcgcatcgaatgccaattgcttatagataataatagtcacaaaacgcgcccttgtcaataggtttgtttctcaatcgttaaatttaacaatagcgccataaaataatatgcgcttcgggagaaatttattatatatgggcgaggcggtgcgcggtttttttcgacatagtcactttatttccgcattcgtcatggtagcgccatgtttcagacggcggcatggccaaaaggattccggtacttttgttttcagcgcatcggtatttcggcagaaaatgctcttatgagcggcaaatttgcaacaataaatcgagaaactttcggattttgatgaattgtgaagatttacaaaggatatatgaaggctgtgctctttcaaaaaccagtttgcgcatgccggcggaaccgttttccgcgagttttctgatactaaacaaatagatgcaaaatatcatacccaaacgccggaaactgcgcgaacggcaggacggctttctctcgggtgaaatggctgccctcaggcggattttgcccaaaaattcacaggaaatccggaaatttaacagataaataccgttgacaagcgggcaattgcgtggtttaatattgtcggtttcgcagtttagtgtttgtaaacgcagaagcggattcccacaaggaggcgcgcatatggaaatcggagcgaaaatcaagcggttgcggttgcaacgcgggctcacgcaggaggagctggccgaccggtgcgaactgtccaagggatttatctcgcaggtggagcgcgacctcacttcgccttccatcgcttcgcttacagacatattggaatgcctcggcacggatttgccttcgtttttttccgaccccagggaagaaaaaatcgttttcacggaagacgatatctatgtgaaagaggatccggatggcttgaagggctgcatcaagtggctggtgcccagcgcgcagaaaaatgtgatggaacccatcctggtggaattggggcccggcggcgcaaccgcggaagaaagtccccacgagggggaagaattcggctatgtgctttcgggcgcgctcaaaatcgccattggcgagcgcgttgtgcgcgccaaaaaagacgagagtttttattttttgcccacagggccgcacagcattaaaaatgccggcaaaaccacggcccggtttttgtggatatccacaccgcccagtttttagcgcccggcgttccgcgatgaacggacagccgcttgggcgcggggaatacgcgagattattctgtacggggggctgccgctatggtgcaggacatgcgcttgatcgaactgaaggggatttccaaatcgtttgatggcacggaggcgctttcggatgtgaacctgtacattcgaaagtgcgaatttatcaccctgctggggccgtctggctgcgggaaaacgacgatgctgcgcatcatcggcggctttgaattccccaccaccggccaggtgatgttcgagggcaaggacatcacgcgcgtgccgccgtaccgccggcgggtgaacacggtgtttcaaaaatacgcgctgttcccgcacatgaacgtgttcgacaacgtggcctttggccttacgcttaaggacgcgaatgaaattgtgcccgaaagccgcaaaccccgcaattttgtggacggctggctcttaaaaatgcgccaccgccacgcgctgaaaaaagaaatcgccgcccgcgtgaaccgcatgctgcgcctggtgaagatgaatggctatgaaaagcgcagcgtggattcgctttccggcgggcagcagcagcgcatcgccattgcgcgcgctttgatcaacgagcctgaggtactccttttggacgagccgctgggcgcgctggatctcaagttgcgccgcgaaatgcagctggaactcaaggctatgcagcaaaaactgggtattacctttatatatgtcacgcacgatcaggaagaggcgctcaccatgtcggatacggttgtggtgatgaacaatggccgcatccagcagattggcgaccccaagagcatttatgacgagccgaagaacgcctttgtggcggacttcatcggcgagagcaatattttcgacgcgcgcatgatcgaggactaccgggtttctttctgcgggcacgagttcgagtgcgtggatgcggggtttggcaacgatcagccggtggatgtggtcatccggccggaagattgggtgctgggcgaagctggcaagggcgcgctcgacggcgtggtggagagcgccatcttcaaaggcgtgcactatgagatgatgatccgcctagcaagcggcgagctgtgcaaggcgcattccacgctgatggagagcgcgggcagccgcgtttccctgtcggtggtgccgttcaacattcatattatgaagaaaatggcgcccgagccgccgcgcggggaggcggatgaagcatgaagcgcagttcttatgcctcgccttacgccatctggatggtgatgttcacgctggtgccgctgctgtttgtggtgtatttcgcctttaccgggcgcgacggcagcttcacgctgcgcaatttcgaaaagttcttccagcccatgtatttgagcgcgctggtgctgagcctgaaacttgcgttcttttgcacgctgatttgcctgctggtgggctatcccgcggccaagttcctggccagcagggatttttcgcggcggcaatcgttcgtggtgctgtttttgctccccatgtggatgaactgcctgctgcgcacatacgcgtgggtgtccatcctggaggatacgggcatcatcaacacggtgctcgaatggctgggcctgccgcgcgtgcagatggtgggcacggaaggcgcggtgctgctgggcatggtttacaatttcctgccctttatggtgctgcccatctacaccgtgctgaaaaagctcgaccaccgcgtgatagaggcggcggaagacctgggcgccaacccggtgcgcgtgtttttccgggtgacgctgccgctctccatgcccggcgtggtttcgggcgtgaccatggtattcatgccggcggctaccacgttcgccatttcgcgcctgctgggcagcggcatgttctggctgatgggcgatttgatcgattatcagttccgggagatcagcatggccagcggccagaacttcggctcggcgctgagcctgattatgatggtgctcatcatcatttccatcggccttttgcgccggtttgaccccaagggcgaaggaggcggggtgtggtgaaacagtatcctctttccgcgggaatggcaaaaggagggattggccgcatgaaaaagacgttcaaaagcgtgtacattgcgctcatcctgctgtttctatacgcgccgatagcggtgatgatcgcgctttccttcaatgccagcaaatcgcgcgcggtgtggggcggtttttcgctgacctggtatgcccagctcttcgacagcccggagatcatgcaggccttgcaggtgacgctcaccgtcgccgtgctggccacgctggtggccacagtgatcggttcgctgggcgcgatcggcatccatgcgatgaaaaccggccgcgcgaacgccttgatcaacctttcctacctgagcatgaccacgcccgacatcgccaccggcgtttcgctgatgctgatgttcgtgttcatgaagattccgctgggctggggcaccatgctgatggcgcacatcgcgtttgatacgccctatgtgctgttttccgtgctgcccaagctgcggcagatgaaccccagcacctatgaggccgcgctggatctgggctgcaagccgggcaaggcgctgcgcaaggtgattctgccgcaaatcatgcctggcattgtgaccggggcgctgctctcgttcaccatgtcgttggacgattttgtgatttcgtactttacgtccaacacggaccagaacctctccatgatcgtctattccgccgcccggcgcggcatcgagccgacgatctacgcgctttccacgctgatgttcctggcggttctggttctcctcgttgtcatcaacaagcgctcgtcgcttgaagatgtatcataaaaaaagtggaggtaccccaaatgaaaaagttgctttgtctcgtaatggtcctttgtgtgtccctcgtgctggttggctgcacgcaggaagccgctccggaagccacggaagcgcctacggtaaccgaagcgcccgctgaagcgactgacgccccggaagccactgacgctccggaagtgaccgaagagcccgctgctgaggcgactgacgccccggaagccactgacgctgtcgaagcgaccgatgcgccggaagcggcggatgacgctgctaccgagccgaccgacgcgccggaagcggcggatgacactgccaccgagccgaccgacgcgcccgccgcggagtaacggttcccgctgaaaaggccgccggaatcgctccgcgcgctttcggcggcctttttttcgcggcttgcccgccgcaaggggttcggcggctgattttctgggcaatgcgcgctttgcagcgcattcacattaagattgggaggactggattcgcgatgaaaaaggtactgtgcatggttctggccctgctgatgagcctgctggcggtgggaaccgcgagcgcagactcggccgacaagccctacgcgggcacggaaattgtggtgttcaactggtatgattatatcgatcccagcgtgatcgatatgttcaccgaagaaaccggcatcaccgtgaagtacgcgaacttcaccaacaacgaggaaatgtacaccaagctcacggccaaccccggcgcttacgacgtgatcgtgccctcggattacatcatcgagcggatgatcgccgacgacgcgctgctcaagctggatccggccctgatgcccaacatcgcgggcctgtgcgattgggtgaagacccccgcctacgatcccactggggaatactccgtgccgtatatgtggggcacgctgggcatcctgtacaacaccaccatggtggatgagcccatcacccactgggcgcagctgttcgacaccaagtatgccaacaacgtgatcatgatggattcctatcgcgacacgctgggcctggtgctgaagatgcagggctattccatgaacgagcgcagcgaggaagcgctgggcgaagcgcgcgatatcctcatcaagcaaaagcaggatggcatcgtgaaggcctatcagctggatgaaaccaaggataagatgatcgcgggcgaagccgccctggcggtggtgtattccggcgatgcgctctatgccatggagggcagcgaggacctggcctatgtggtgcccatggagggctccaacatctggctggacggcatgtgcatccccaaggagagcaagaaccccgaggccgccatggtgtttatcgactacatgtgccgcccggacattgcccgcatgaatatggactatatctggtattccacgcccatccaggccgtgatcgacggcatgagcgaggaagagagcagcaacgaaacgctcaatcccccgcaggatgtgatcgatcgctgcgagttctttaacgacgtgggcgaagatgtgtatctctacgaggaaatttggagcgaagtgcgcttggcgcgataagcggcggtagagcgcaaaacgctaacaaggggctgttgcaatttgcaacagtcccttgttgtttgtgcaaatatagaaatgagtaaagaatatattggtaagaaattcacaatatttccagaaactgctttacaatatacggggaatgctgtataatggtaaaaaataacaaaaggaaggtgcatgccgtgtcaagaggatcccgggcactgaaccacagaagctccatcaaatgggttttatccagcaatgttcctttgttgcttatgacgcttcccggcatcgcctgctttatctgctttaattatttgcccatgggcggcctggtgcttgcgttcaagaactttatcccgcggcgcggcatatttggcagcgattggattgcgttcaagaattttgaattcatgttccgcaatcccaccttctggctcacggtgaaaaacacgctcttgtacaacggcgtatttttggtcacgaacgtggtgttccccatgtccttggccctggccatcaacgaggtgcgcagcaagaagctggcgcgcgtcttccaaacgggaatgatcatgccgcatttcatttcttatgttgtggtatccgtcattctctttgccattatcagcgcggatagcggcatcgtgggccacttctataaaaaccgggggctcatgcccatcgctttttatagcgagcccaagtattggccgtttttcctgatcttcatctatgtatggaagggtacgggctattcttccatcatttacctgggcagcatcaccgggatctcggatgagtattacgaagcggcggtgatcgacggggcgacgaagtggcaacaaatcgtgcacatcacgctcccgttcctcaagcccatggccgtcgtgctcacgatcatgcgcgtgggttccatgttctccagcaatttcgatctgttctatcaggtacccatgaattccggccagctctattccgttacgaacaccattgatgtgttcgtttacaacacgctgaaggagagcaacaacgtgggcctctcttcggcggtgagctttgtgcaatctgtggctgggctcgtgctggtgctcgtcacgaaccagatcatccgctggatcgaccgcgatctggccatgttttaaaggaggcgctgacaatgacagaaatgcgcgcgccgcgccgccggtacagggggcccttggcgattggcaatgcggcgaatgccgtgattgtgatcatccttggcatttttacgctcagctgtgtgctgccgattcttttgatttatatttcgtccttcacggccgaacgcgccatcaccaaaaacggcttttccttcttcccggaggaatggagcgtcacggcgtatgaaatgctctttggccaaagcttgcggcagatcaccacctcgtatctgaacaccattgtgctcaccgtgctgggcaccgtgctttccctgttgatccttacgatgtatgcgttcgccatctcgcgcaaggatttcaagctgcggcagttcctcacgttttttgcgtatttcacgatgctgttcaatggcggcatggtttccagctatatcgtcaattccaatgtgttcggcatgcgcaatacgttctgggtgctgttgttgccgagcctgtgcggggcctataacatcatcgttttgcgcacgttcttttcttccgccggcacggaatcgctgattgaggccgccaagatcgacggggccagcgagttccgcatttacgggcagatcatcctgcccatcagcaaaccggcgctggccaccattggcctgttcaccgccatcgcttattttagcaagtggtttgaggtgttgatgtatatcgacgaccgcgaactatggacgatccagtacatgctccagcgcgtgatgaaggacattcaatacctgcgcgacaatcccgatatcgccatgagcgaggaaggcatcgccatgcttgccaacttgcccaatgaatccgccaagatggcgctcaccgtgatcacgatgacgccggtgcttgcgttctatcccttcttccagaagtatttcgtcaaggggttgacgctgggcgcgatcaagggctaagaagaaatttgggcggctcgccgcctgaaaaataaaaaggaggctctcaacatgaagaaactggcactgttccttgcgctcgcactgctaatggctacgattccaactgcagcgctggccgaagccacggagctcgaaccctacgagctggtgtggtacaccctgggaacgcccgctgacggcgacgccgccgtgatggagaagatcaacgaatacctcaccgaaaaattcaattgcacgctgcgcatgattgccagcggttccgcggagcacgacgagcgcctgaacctgctgatcaacggcatggagaagttcgacctgtgctttgtggcgcaggactacgcgagctatgtggcgatggaagcgttctatccgctcaccgacttgctcaacgaatatggccaggatatccttgcgcagtatccgcagagcttgtgggattcggtgaccatccgcggcgaaatctatgccgtgcccacgcataagtattcttgctcgcattactactatatgttcaacaagggcgcggcggacgccgcgggcgtggatctgagctggatcaacggcgatggcacgaagatggaaaagtgggaagcctttaaggaaaccctttacgcgctgaaagaagcggacgcctcgcccaatggctatatcaccaacctgggcaccggccccttcaacgcgctgtatcccaccgaatgcctcaccggcaacgacaatgaacccggcgtggtgatcattggcgatgatagctttgaaggccaggaaccgggcgtggtgttcaaccagtatgacacccccgagtttgaagcctatgtgcgcgacgcgtacgcgatggcgcaggcgggcatcctgccgctggatccggaaaccaccgtcggcctggcggaaggcgatatcgccgtgcagaatcaggattctatgggcaagcgcctgccgggctatgaagagcagtatggcattgaactggaagcctatttcatcaactacgcgttcaccaacaccaacaagatctatggctccatgaacgccatctccgccacgtccgaggacccggcccgcgccatgatgttcctcaacgagatgattgccaacacggaattcgccaacctggtgttctacggcattgagggcgtgaactggaaccgcaacgaggatggccagatcgaaatgaccaaccccaagacctacaacatgaccacctgggcgctgccgggcttcctcactgcggaacccgatgtgtccctgcccatcgatatggtcgatcgctacaatgcgttctccgaaaccctggtctacgccgataacatgggctttgctctcgataaatcgcccatcaccgtggaaatggccgccattagcaatgtaatggcagaatatcttgatccgctatgcaacggcctttccgacccggatgagaacctgccgaagttccgcgaggcactgaaggcggcgggcgtggataccgttatcgccgagatccagtcgcagctggatgcctggcgcgcggaacgcgatatgtaaaccacaatcgcaattttataggataacaatgggcggccccttgctcctgcacggagcaaggggccgccccagtttggtgagggtttggcgggttattccgcagaggcgctttcagcgtcggccatttcgatgggcaacagatagatggtttcgttcgcgcccgcgttttccgtcgcgtcgggcaggggcgtccggtttgcgtcggcgtaggcttcatagccttcgggcaccgtgtagcgcaatagcgcttcggcggcgatggtgtattccgtgctcacatcgttgtacaccagcgtgaccgtgcgggtggattccggattggccagcgaattcacgaactccggcggcgtgagcgcgtcggcggaataggtgaagaacacggagctcatcgtcacttgcgttccgtccgccaccacgctcgccgtgcactgggaaatttccagcgtttcggggtcaagcgtgtagacaaaggagagcgcgctgacgttttccagccccagcgccgtttcgtagctggcggcggcggtttcgtccagagcgatctgggtggtcacaaggccctcttccgcgctggaagacacgatgctctccgcctcgttataggtgatcatgcgctggtaggaagttttgtaggacgccagttccgcctcgtccaggaacacgcgtacggagaactggttggtattcgggtcgaagacataggcgcgatccgcgccagcgaaatattcgctgtagccattggaattttcaaaaaggatttcgccattttgtccatagccaaagtattgggaatccgtttctgtgccgtcggcggcataattgatgatgttcacgcctacgagcgcgtattttgcggtaagggttgcgaaagaattcgcctcgcagatggcctgcatggttatggcgtcatccgcagtcgcctcctcttccgcaaagcctgcgccacacagcaaaagcgtcaggcacagcagcatgccaatggtttttttcatagttgttttccctcccatcttgggttgaaagattcgccgttttgcggcgtggttatagtatcgcacaaacggcgcgggaaagcaagggcgaaaaaaggaggattgccgtgccaatttgcggcaatccccgggcaaaaaaatgcatgttacttttccggagcgggcgtctccccgttgagcggaggctttctgagataatacggggcgaacacgagcagcgtcaaaagcgtgagcgccgcgcaaaaccagaagacgttcccttcgcccatgcgcatggccgctagcccgcccaggaaattgcccgccacgcgcgcaatgccaaagccggtgacggccagcagcatctgtccgctggagcgcaattcggcgggcacggtcaaagatatgtactttgccgtactcaccgtgatgacgataaagccgcccccgtgcagcgcctggctgaccatgttgatgggcacgctatcggtggcggccagcagcacccagcgcagggtgagcagcgccgccgaggccagcatgaggcggcccgcgccaaatttgcggaagagcttgtccgaaaacagcaaaaagggcgtttcgctcagggcggaaatcagatagcaccagcccagcagcgattccgagccacccggcagggaagtgaagtgcgtagaaaaaaagccgtaaaaatagcccatggtgagctgcaaaggcatcgtgagcgcgatgagcagcatcaattctcggtttttcagcagggtgagcatggaaagcttgctgcccgctttctgcgcgccgccggtttgcggcagcgtccaggtggaaaggcaggtggcggccaacaggcccgcggtgaaccacagaatccagcgttcgcggccgccgccatccaccaggtagccaaacagcatggaagccacggcaaagctcacgcagccgcaccagcgaatgggcccgaagggctgatcgcgctcttgcaaagattccaggatcacggaatcgcccatgggctggatggacgtgtaaaaggcggaaaacgcgcaggtgaaggctagcaggatcccaaattggctccccgccagcggaaacagcagcaccgaaacagcggcccccaggcattgcagccggatggtgcgggcgcgggacttggagcggtcgcccaccgtgccccaaaagggctgggcgaacacggacaccagcgagacggccgcgatcagcgcgcctcgctgggcctcgttcatgcccgcgtgcttaaaatacagggtgatatagccctggtacaccgcgtttgtgatatagtacgcggccataaacagcccgtaccgcaggggataccccatggctttacgcctccgaaagcagcttgtcgatttcctccgcgccctctttgcccgcgcccatggccaggatgacggtggccgcgccggtcaccgcgtcgccgcccgcgtacacgcgcggcacgctggtcttcagcgaaccttcttccaccacgatgccgccccacttctgggtggcgagcgcgggcgtggtttgcggaatgagcgggttgggcgaattgccgatggccacgatcacggtatccaccggcagcgtgaattcgctgcccggcttggcgatgggccgcctgcggccggacgcgtccggctcgcccaactccatttccacacaggtcatggcgcgcacatagccgtcctcgccgccgaggatctctgtgggattggtgaggaagcggaactggatgccctcttccttggcgtggtggatttcctccgcgcgggcgggcaattccacctcgccccggcggtatacgatggtgacttcttccgcgcccatgcgcagcgcgcagcgcgcggcgtccatggccacgttgcccccgccgatcacggcggcgcgcttgcccacgcgcacgggcgtgagatggttggggaaatcgtaagccttcatcaaattgatgcgggtcaagaattcgttggccgaatacacgccgcccaggttttcgcccgggatgccctggaagcgcggcaggcccgcgccgctgccgatgaaggccgcgtcgtaggtagcgagcaattcgtccagcgtggcgaagcggcccaccacgcggttcacgaggatgttcacgcccatggcgcgcagggaatcgatttccttttccaccagcgccttgggcaggcggaattccggaatgccgtacaccagcacgccgccgggcgtgtgcagcgcctcgaacacgtccaccgcgtagcccttttgccgcaacgcgcccgcgcaggaaagcccggcggggccggagccgatcacggccacgcgcttgccattttcctgaatggcggggggcgcgacttgcgcgcgcatgccctcgtccgccgcgaagcgttccagccggccaatggccacgctctcgcctttgacgccgcgcacgcagtgcttttcgcactggttttcctgcgggcatacgcggccgcaaatggcgggcagagaattggtttcgcggattacgctataggctttggcgaattcgcccttttttatgcaatcaataaacgagggaattttcacgcctacggggcagccggaaacgcagggcatatttttgcaatttaagcagcggttggcctcgttcacggccatttcagcggtgtatcccagcgccacttcctgaaaattgtgtccgcgcgcgatgggatcctgctccggcatgggggttttttgcatttgcatgtttggcatattagcgtttccctcccgtcaagcggcatatgtgttcgctggcctgcgcctcttcggccttgtataggttcaggcgcttcatggcggaatcaaaatccacctggtgtccatcgaagtccgggccgtccacgcaggcgaatttcgtttccccgcccacgatcaggcggcagccgccgcacatgcccgtgccgtcgatcatgatggagttcatggaaacgatggtgcggatgccgtagggccgcgtgaggttggcggcggcgcgcatcatgggcagcgggccgatggcgatcaccgcgtcgtaggtttcgcccgcttccagcttttcgcgcagcgcgtccgtcacaaagcccttgcggccattggagccatcgtccgtcacgatgttcagttccgtgcaggcggcgcgcagttctttttctaggatgatcaaatcgcggttgcggaagcccacaaacaaatccaccttcgcgcccgcctggtggagcgccttggcctgcggataggcgatggccacgcccaggccgccgcccagcaccgcggcgcgctggatgccctcggtttgcgtgggcttgcccagcgggcccacgaaatccagcaggctgtcgcccacctcgagcgcgtccagcaaacgcgtggtcgcacccactttttggaaaatgatggtcacgcccccggtttcccggttggcatccgcaatcgtcagcggcacgcgctcgcccgcctcgtcaatgcgaaaaatgataaattggcccggcagcgccttgttcgctacgtgcggcgcgtggatttccatcagcgtcgtcgtatcgttcaggcgctctttgcgcagaattttgtacaacgcagtcgcccctctcgctttttcccccattgtacacgacgaagcgctccgcgtcaacccaaagaatgtatacatgtggttgaaaaaatattccgctatgggcatagcgcgcgccggcccggccatacttaacgggcggaacctttttgcttccgcgcgcatataccggcaaagagggttaggaggcggatatttatgcaaacatgctctttttgcggccgccgggcgcgccgcatgctgaaggtaggctcgctttcgctgtgcgaatcctgcgaggcgagtttgctgcgcgtttctgcgggttgcgcggcttacgattggtttgtgcgggctgtgcgccgcgcgcttgtcgcgcaatgtggcggtgcgtcgcggcgggaatatacaaatgattaacttgtgtgaacaataaaaatggcatataattttttgtaagaggttgccgcttgggaaatgcgatgcatcctggtttacactaccttcggaggctgcggtgagggatgaagattcagtttgggcgcgcgatggccagtcacacgctgtggcggtattttctttcgtattttttggttgtatgtatattgttgttatgctttgtgctaatcgcctatagcctactttccagcgctgtatccgatcgccttcatgcgcaaacggagcagcgcttagattatgtggttgaacggttggaagaggaattgcaagccgtatttgggttgaacaaaacgttgtcggaaaatattgatattattcttgctagatacaacgataattcctatgctcagctgcaagctggccaaaggattaatgattatgctggaatcaatccacttgtcgatactgtcgtatattatgaccgggtgaacgaccgggtattttcctctcgacgttatgtgcgctatgaggatgatatattttctgtctataatcaggacaagcacttagacttttctttacgggaatatcaagatgcgcaatttcatcaaatgctatatttggaaaatgcggatacttcttatttgatttattgccctgctactacggaagaagctggttatgatatattttatattcttaatcagttggaactagagaacctgctcacaggcgtgctttcggaagatgtgacctatgcggcaatcttggatgggcagaatcgagtggtggcggagagcgggcaggtggaaggtgtgcaagaagcaggtgggacggttgcttgcagcttttccgttttaaatccatttacgatcatcgctcagatttctagcgcaagtatgctggcgcagatcaatggcgtattccagcgtacgtattatacgttgcttcttttgagcggcgtaggtatgctgctcgtgctattagccatgaaaagcacatatatgcccttgcgcaaactcacgcaaaaatttgtgaaggagcccgagccggagcaagggtacatcgaacaattggaccgcgtgttttcccataccatgtcggagaaccgttcgctgcaaagcaagatcaaccaataccggctctccatgcaaaaatccgtgctggacgcgctcatcagcggcggcacagagggcggcgcgcgcgattttgatgatatcgagccatttttcaccatggagccggacaaccgcatctttgtggtgtgcatgcgctgcaaaggggaggcatttcccgccaaagaaacggcggaaatcatccgcacatcgcttcccgagggggatgcgtgcgccattttggaagagcgggaagatggcgcggcctttgtgttcaactattccgggccggaacagcccaaggaagcggttatccagcagcttttaatggatatgtaccaggaaaaaggctatctggcggcgctgagcaatggttccgcctcgccgctggacgttccggcactgtatgaaaacgcccagcgcgccagccagttctgggcgcaggagccggtggtgctgtacgatgctgtgcgggaaagcctccccagccgggcggcagtggcgtatccgcatgagcgcatcaacgccttggctgcacggctgggggaaaacgattttgccgccgcgcgcgtggaaatccagctcattttccgcttgctggatgaagcggtgtacgaccggcctgagatgcgcagcttctttgtgcgcagtatattgatcgatattctttcgaccgtcgtgagcgctatgaaccaagcgcacatcaagtttaagagctataatgatttgtacttcgaaacactgtatttttgccgcagcttcccttatgagcaaaagaaggcggaaattcaggagcatgtcgggcagttgctggatgtgttcgaggaaggcgtggctaacaagtgcatcaccgctgtgcagattcagcgcgtggtgcaggagaactgcttttcgccggacttttccattgcgctgctggcggaccatttccaggtgagcatcgcttacatgagcctgcaattcaaaaaggaaatgggcgaaaattttctggattatgtgtggaaactccgcctggaaaaggcaaagcggcttttgcaggagagcgatctgtccatcgacgaaatcagcgttgccgtggggtatgtgaatacctccagctttcgccgtaagtttaaacaggagacgggtttatcgccttctcaactacgcaatggcactgaaatgctatagcgtacaattttttagagggaaactaaaaaaattgcaggtagattgctgcggctgccatgcgaaagccgcagctttttgaacgcaaaacacatgttttgcagcatatgtgcaaaaactgtatgttgacgaatcatggcaggttggttataattttttcagattcataaaaagcgctttgttatgatctgcttctcatggaactacaggacgacaaattgtaatactttgacagggggttatgcgataatgaagaagaagctaattttgtggctggcggtattgatgattgttgcctctgtgagcatcacggctgctgcggaggaaaccgcgcctaccgagtatactgcgcttgcgatactcaatggtggatatgccctagatgaaacgcttgctttgcagacctgggaagaaatgttcaatattcattttgaaattgaatctgtacttggcgcggacttaacggagaagcgcaatcttgtgctggcttctggtgaatatccggatatcttcattaaagccaatttgagtatgacggatctgaatcgctatggctcgcaaggcatctttcagccgctggaagatttaatccatgaatatatgccaaaccttaccgcagttttggatgagcgcgatgcgtgggaatatatggtatcttcggatggtcacatttattccttgccgcaggttgatactatgggcgctgcgatggaatcttattggatcaataaggcgtggatggatactttggatcttgccgagccaacgagtttcgatgaactgtatgaggtactgaaagctttcaagacaggtgatcccaatggcaatggtgaagccgatgaaatccctctgttttgcatagacaaccacgatcaactgcttgcttatgcagactatgcatatgatcccaacactaagacggctgtgattgacgatgtattgacctacattcctacgactgagcatttcaaggagttcattgcctaccttaccaaactctattctgaaggcttgcttgacgccaatagctttacgcaaacaagtgagcaacaagcggccattggccagtctggcgatgtattgggttctttcttcggtgcaggctcgttcctcaccgtgggccgcgataacgatgatgattatatcatcctcacgcctttccaagaaggcacctatccgttgatcaccgggatatcggttggcagcttggtagtaactgattactgtgagaacgtcgaaactttgcttgcagctctggactatttctactctgaagagggtggtatcctggcttggatgggtgtggaaggcgaaacctatgaaatttacgaagatggtacttggggatggattctcaataatgg

SEQ ID NO: 1452 - DNA, 32759 bp, Unknown
  16S sequences of unknown bacteria
taaaatcaggcgacaatcaatggatactgacggtcaaaacaaaggttttgacccataaaatcgagattttaactcgattttatataattgcatttgccaatgcaattattcagtagacattatatagattttaattttccgattaaattaagtctgtaacaacccctccgaggcggattcccgccccaccgtctcggctgccgcctcggtcggtgcttctgcttcgcagaggtgtccaccggacacccgcgcccccaaacaccgtggaggcagcggtctgtacaaacaaaaaagccgcaatcatattcatgtcggtgaatggcgggttttatttattatattatagcggtgccgggagggaaacgctgtgaaagaaaatgacaggttactttataaaaccatgaagtcgctgcttaatgaaaggctgtcggacgcggaggcagagtcgcttaaagacgaggggttcgacattaaaaacccgacaagaaaaaccgcggttatgatagcgctttacaagaaggcggcaggtggggatctttcggctataaaggagcttcgttcaatcatcagcgaaaaagagaccgaaaagaaggaaagcggcagagcggtggtgataatcgacgacatcggagattaaattatctgaaattatcggcggcgggtatgacgaatactggagctgcgagaagcgctacagggtattaaagggcggcaagggttcaaaaaaatcagccacaacggctctgaattttatttacaggcttatgaaatatcccgaaagcaatcttcttgtggtgcgccagataatgaacactcacagagattcgaccttcgcgcagcttaaatgggcgcaggagcggctcggggtctcgcacttatggcgcaacaccgtatccccaatggaaatggtttttttgcctacgggacagaagatcatcttcagaggctttgacgatgttttaaagctggcgtcggctaccgtaccgagcgggtttttaaactttgtctggatagaggaggcgtttgaaatcgcaagcgaagccgatttcgacaagcttgatttatctgttccgcgcggagtgataaagcctccgctttacaagcagaccacgcttacctttaacccgtggagcgatacgcactggctgaaaaagcggtttttcgacattgacagccccgatgtctcctgtttttcgacaaactaccttataaacgaatttctggacgataccgacagaagcgtttttgaacgtatgaagaaaaccaatcgcaggaaatacgaggtggcgggactcggaaactggggaatttcggaggggctggtttacgaaaactggtcggtagggaaaaagaaaattcccgatgatgagcgctatcgctggaaaaactttttcgggcttgactacgggtattcaaatgatcctaccggctttgtgggctttgcggcaaatcccgtggataaagagctttacattttttgcgagttttgcagaacaagaatgctcaactgcgatattgccgaggaaattaaaaggctgggctacgcaaaggagcggatacgcgccgactgtgcggagcctaaatccaacgatgatttaaggcggctgggaatcacgcggataatgccgtccgtcaagggacgggacagcattttgaacggtattgcggcaataagcgaatatcggataacggtgcatccggattgcgtaaatatgattcgtgagctttcttcatatgtgtatgacgaccgtgtaaacgaaaacggtaaaaaaatgccgagggacagcgacaatcatctatgcgacgccatgcgctatgcgtttgaggatgtaaagcgttttcacccacgacgggagcaaaagcctatttacagagataccgagattggcggagccgatttgaacggaggatgggatatatgacagtattcattgcatttttggcggtgttggctgcgtttgcgggcggatttttatcaggtctcagtgccgtcccgccgcaaaggcagaaagctgcggcaagaaaaagagaggatgaggagcttttaaggctcaggcgggagtatgcgaattttctttcctatgatggcaccgagcaggaagaaaacgatacccgccgataaaaaagaaaggaagaattaatttggaaatcgttgatttggaggctgcggctcaacctgaagccgcagagcaagaaaaggcgtcggctgaaacggaaaacataccggaggccgaaaacgaagtgttcattcctgtaaaattcaacaaggaaatcaaaaatttgggacttaaggaggcggcggcgcttgcgcagaaggggcttaagtttgaagcgatagccgatgatttcgcggcactgaaaagccttgccgcaaaggcaggtcacagcgtttccgaatatatagcggagctttcaaggcaaaatgatgaaaaccgcaggcaggagcttacagaggaatgcggcggaaatgaaaaaatggcggattatgttatgcagcttgagaaaagcggagaggaatccgatgatttcgcggagctgacagcggaattccccgaaataaagagcatttccgatctgcctgattcggtggttcaaaaatccgaattgcgcggcacaaaattgcttgacgaataccttcgctaccggcttacagaggaaagggaagcggcatccgctgccatcaaacaaaaaaacgccgagaatttgagtctcggctcgcttaccgaccgaaagggcggaatcaacccggagaccgcggaatttttaaagggtctttggagataaaaaaggagaaaaaatattatgtcattcaattcaatagaaaacgcaaccagatattcaaccgagcttgataagctcttcgcacagaaaagcgctaccggtttttttgccgacaacgcgcttgcggcaaaattcgtgggcgctaaaaccgtaatcatacccgacgttgattttcagggtcttgccgattacgaccgcgacacgggctttacaaaaggcgctatcacggttgccaatacatcctataccatgtctatggatcgcgcgcgttcgctgcagattgaccgcgaggatatgagcgaaaccggcattgcgaaccttgcgggcaaaattctcggcgaatatgttcgcacaaaggttgtgcccgaatgcgacgcatatgttatttcaaagctggcagggcttgccgctacgcgctctaaccttgtaaacggcgacaaaacaaagccctacgaagcactctgcaagctgataaacgaggttcagtcggttgtgggctatgacgaggaattagtagcctttgttgacagctatatgtacgccgctctgcagaattccaacgaaatttcgcgcatgataaccgtttccgactttaagcagggggatattacccttaaggtgaaatccataaacggcgttgcgattataccggtggtatcagaaaggatgaagaccgcctacacctttaacgcggcaaatgcgggcggatttaccccgcaggcaaacgcacgcgaggtatatatgcttgtatgtcccaagagcggcgcgcaccttgtaaagaaaaccgaaaaaatgagaatattcacacccgagcagaacatcgacgccgacgcctacaagtttgattacagaatctactacgatgtattcgtaaacaagagcgggcttgacgcggtttgggcatggctttcgcctgcaattacaataagctcggatcttacagataagagcgttaccgcaggcagcataagcggctcgctttcggttactgcgacaagcagcgccacgcttacctatcagtggtattcctgcaaggatgagaacaagacatcagccgttaaaatagcgaatgcaaccacaagctcctttactatacccaccacgcttacaaagggcacatactattactttgtaagaattattgccgacggaatcgcgggagttgactcgaaggtagcgaaggttacggttggttaagctaaaataatcagcggtacgagggaggggcaaccctccctttacttaaaaaaggaggtcaatttatgaataaaccctttgaaatatttgaagaataccgcaaggccgccgattttaaatcggcgctcgggaaacgcgggctttacgaacagagccgcataaacgagcgcttttacatcggcgaccagtggtacggcgccaaatgcggaaacgaccgcccgcttgttcggcacaacataataaagcgaataggcgattataaaatgtcgcagatattaaattcgccgctgtcggtgacattttccgccgagggcattccgaattccggcagtgcacaggacgagaggataagggagataaacaccgcaatgtcggcgctcggcaattattacagcgtcacggcagagcgggtagggcttacatccctttatgcttcggcgctcagaaacgcctacatcagcggcacgggaattttatacacctattggaacggtgacattaagaccgggctttatgcagacagagaatcccgaataccgataaacggagatatttcctgcgaggtcttgagcgttgaaaatgtctatttcggcgacccgtatatttcggatattcagcagcagccctatattattattgcaagctgccgtgaaacagaggcggtgctcagggaggccagacgacacggggcggatatttccgagctgcgtgccatagaggacgattccgacgacggcaaggttacggttttcacaaagctttttaaggaatataaagcgggcggcggctatacaattaaaagtgtaaaggtcaccgaaaacgcaacggtaagaaaggaattcgggacgggactttcgctttatccgcttgcggttttctcctgggagaaaagaggggaactggcttacggtgaaagcgagataacctatttaataccgaatcagatagccattaaccgcatgataaccgcgagcgtatggtctgccatgacgaccggcatgccgatgatggtgataaacggcgataccgtacccgacggcattaccaacgaaccggggcaaataattaaggtctacggcagcagcgaggaggtaaacggcgcggttaaatatgttgcgccgcccgatttcagccgtaatttcgagcaaagcctgcaagcgctgatagagaacacgcttacgcagagcggtgcaaatgaggtggcgctcggcgacagccgcgcggataacgcaaccgcgcttataaccatgcagaacgccgcgattatgccgctgcagatagttaaaaaccgtttttattcatttgcggaggatatttcgagaatatgggcggatttctggatagcctgctacggaaagcgcggaataaagataaaggattcggacggagtgaaatactttgcttttgattccgaaaggcttcgcgggcttattataaacgccaaaatcgaagttggaacgggtactgtttacagcgagcgcgagtgtgtaagcacgctgcttaatctttttgaaaagggtattatcaacaaaacgcagtttttagagcgtctgcccgacggtatcgtacctgacagacagggcttactaagggaagaaagcgaggagaaacgggatgaaagcgtttgacatatacaaaagagcgatgcggctgctcggttacggcgatattttaaacgacgaggcgctgcggcagcggtttgaggagcagagcgcagagctgatatcacagatagcggcggatctgcacatacgggaaatttcctctttatcagatgagcttgaagccgacgcacagcagcttgaagcgcttacctacggcactgcaatgcttatatccttaatagagggggacagctcaaaaaaccgcatttttaccgcgctttacaatgccaagcgcgcatcatctcttaaagctaaagcgataattgcggatgtaatgccgcagacgggggtggacgggcagtaatgaaatttacttcactcggcgaaaggcgtgagaaatgctgccgtataaaaagccttgacggcggcgtgaatttctcggctgcgccgcacaatattgccgataacgagctttcctctgcggaaaatgtagaatttgcggacggcgttttaaaaacaagggctggactttcggcagatgagtatgatataatcaaaaacgaaaccgattcctatgcggaggatatcgggtataccgttacaggggcaactgcgtttattaacggcaggaataaacgcattgcctatgagcagacatatgacggcaattcaaattatgtttattcggtgcttttactggacgcagacggctctgcctcagccgccgggcagataaacttcagccgtgtgagcgacgacacattttacacgccttacagtattctgttttacggcggcgcaccgataaagggcggcggaattttcgctcttgttacggcaaggaacgaatataatcattccgaatacagctataaggtttacgaagtaaacaaggcgatgaccgcctggctgcaggtcacggatttttatgagcctgtggtcatgataaacggaagaggaaacaattacgaaaccgcaaagtcgaccaatttggcatacaccgcgcctccgaagcttttggaagcgagaaacatcctcacaacgcgttttaaggcgtattttacatcggacggatgctcaacctcctttcggctgccgtacagcgggcttgcgaatgaatcggtgacctgccgaatatacacaagccttaccgattataccgagtgggtgataatgcccgatgccgtcagtgatacgcagacattttatacggcggaaataacaatgcgtgttgatcgcagcaagggaataatttattttacaggagcggataacaaggattatcccgtaccggcaatgtctatgtaccatgaaaataacatatgcgtccgtgcggggaaaagcgccgcgaatgaagagcttcgggagatatgcacccttacctgttacgccgtatacgattcaaagcttattttttcgggcggctccgaaaatgggaagatctattcggtcgcatattcaaaaccgttatatttctccgagaaaaacacttcaattataggggagaccggcagcggaataaatgcacttctgccgactaaaaacggaatcctcgtgtttaaggaaaatgccctatacaaggtgaagctgaaaagcggaaacgccttgaatacaggctcgctgctcgcggatgacgattccgtcttctatgacagcgataccttttcgcaggcaaagcaggcggatataggctgcgttaacagccgagtctgcgttctgtgcggaagctatcccgtctggctttcgggagacagaaaaatctataccgtgaattcggctacaggtaaggttaccgaattatcgaaacaggcggaaaagcttcttgacagtatcggttcttccgaaataaagacagcggccgcattcggcgaaagcggcaaatattggcttatgctcggcggcagggtgttgataatgcattttaattccgaaaaggggagtcggcaatattatatccgcaaatatgaaaagtgccgcccgatagatatgattgcttcgggggcgaatcgccgttatatatgcgtcggaagtgatggcagggtgctttattatgcagccgacggggctttaaacgccgataccgatattacgggcggagcctcagggacggtaataagcagcgttccgtattcatcccgctttacagccaaaagctttgatttcggcacgctgacgcataaaaagcatattgaaagcatatctcttaccgccgcttgcggcggacggcttaaaataaggctcagcggcggaggcgaagaagagatatcggtagatctgaccgacagcagctactgtgccgcagagcttaatgtcctccgaattataccgcatataggggcggtaagagcactcggtctggaatttgaggcagactgcggtatggaaataggggaaatatcaatcaattacagagaggcataatatgaaaaggttttttatctgtttgatttgcattcttacactggcagggtgtgcgctgccgcgcaattcttcgagcaatagggaagagcgctcggaaaatatcggtgtttcatcgggcggggtgtggatttcgtacagcgaggttaactcaatgctcaaaagcgaaaacggctttagggcggaatttgacagggtgattcaaagctgcagagaagcgggactcggcgaaatttatttacatatccgctcgcactgtgattcgctctttaaatccgatttttttccgcagaataaatttgcgaaagagcttgactatgacccgttcgaatatgccgtggataaatgccgaagcaacggaataaaaattcatgcctggataaatccctacagggtaaatgccgcctcagacgatataaccgcgcttgataaggacagtcccgcatataaatggcttaacgatgataatactgaaaacgatgtaaatgtggtgcgcttcggcgggatatatttaaaccccgccgaaagcgcagtgcgggagcttataataaacggtataagggagcttttgtcaaaatatacggtggacggagtgcattttgacgattatttttatcccacgaccgacgccgcctttgataaagcaagctatgaaaaatattgcgccgacgctaaaaatccgatagctcttgacgactggcggagagcgaatgtaaacacgctgcttgcgggctgccgcgccgcaataaaatcaataggcggcgaaagggtggatttttcaatcagtccggcggcgtcaattgagaaaaattattcggaatattatgcagatgtcaaattatgggtgaaagacggtattgttgatacaataattccgcagctgtatttcggatttgaatatccgacccgggaattttgcttcgataaccttatggacagttgggcagagcttgccgccgaaaacaaggcggtaaagcttgccgtcggcttggcgccgtataagctcggtacagacagcgatcccgattcgtccgaatggaaaaacggcacagatattgtggcgcggcaaatcaaggcgtgtcttgacagtgaagcggtaacaggttatgtattgttttcgtatacatcggttttttcggattccgaacaggcgcatgagcagcttgataaaattaaggaagcaacagccgcaacaaattcacagcagcagcaatccgtgcaatagaattaaatccgtatcgaaacaacagtatgggaatttcgatacggatttttatattttcgttgttttattttattgtacgatttcggtgggaaacagaggtactcatgaaaaagatacctctataaaaaaatatataattgcgtgaaataaaagtttcacgcaattggggggaagggattctcaatttttttcttatctcccgtgagttagatttatcggggaaaactgtgctgatgataaatactgtttgctgcagagagcatttcatctctccctcagtttacagtttcaataatatttaattgcttttcatatcaataattctgaagatttaagtcccatttgggattatagataccaattctatcataatagttgccataattataatcatcgctaacatctgctttacgcaccagctttaatgttgaaatttttgacgtgttatgatttatttcatcttttaaataatattcaaaatacaataaaaattcagaatctgcagtagttatatcaaagtaagccaaagccgttttagtttgtttcccattatcaaacaaatctcgaatatgagtgccggaatctataatattttcacatttaccactatagcaattgaaaatatattccaatcccaaatcgaaatcttgggtttgaatggctttatccgtaaaacggtttttaaattcttctcgattattattttctatcatattaataatagaaattgccacttcctcagttttttctttttctaattgaatcttatctttagagttacaactacaaaagaagttcataagtaaaattgcctctgatattaaaataattttgaatactgttgttttcatataatcaccatagcttttctaactcacgggagaataaaaattatctaccgtgaattttaaacatgcaattaaactttaattgtttaatacagtctcttcaaagcgcttaataacatctatctccgaataatctttaaaaatgttatcgtctcgtatcaatttcgaattatagattaaaatatatttcatcaatattattttttttaccgtaataataattctgccaataaatcagagaaaccaacaaccatattccgcccattaatagaaaagctattgttaaaataagcgattcactgattttgttaaacaaaattttcgaaatgggcaaaatcaaaaaaacaacaggaataacaaagctacaacgattgcttttatatttctttttcttattggatttaaactcaatgctgcgatataccaatgcggataaaataatcatcaatgaaattaatacggcaataatataccacattgaaaagcttgatttttttgaaataatatacagcagaaataaaacataaaataacaaagccgaaattgcagttacaaccgcattatacagtatagaatatgttatgtgttttttgatacccttggctatgataaaatatattacatataagacgagaacgaataatgtaaaggcaataggaatgcatataaatcttttttcatttaaaaaattcagcagaaagccgatatccataaatactacggtaaacgaaataagcaagcccaaccaagttttcattaatcttttttcgtcattctctgattttaaagataagaaatcatatatataattattttccatatcaacacctatgaacggttaatttgttttttatgtaccgtgcagtttaaaaataaaactgcacggcacacattttaataaatactactgtaatatattattatcgcgtaaaatctttagaaaagagtctttaattaagtatccttctccttcatctgcaaatctaatataatacaatccgttcttttcaaaaatatctggatagtttttaagtgcgggatgtgcggcaggatgccaggtaaatttggatgtctcttcttcaaaaaaatcaaaatattcaaccgattcatccgaaaaaacatcggcgaacaccgtcttaatatcggtattgtctatttcaaatatctcctgctcataatcatacccgtccctcagccagacagtgatgccgcgactgcaaaaaataaaatccggagagtctgtattatcggaataaaacataaatacgcctaatggcgggatataccaagtccagccgatttcggacagctttccgcgatcacagacccatgaaacctgttctgtatgaatatattttgtattgttatacattatatcatcggtatcctcgtattgcgtgaccttattatatttacaggaggttaaggataataacgatattacgatggctgcagatgttaaaaaattaaataattttcttcgcattttatacctccaaagcgctcgttaaagaacgaattgcctgtatagatttatctgtccgtgaattgcgggccagcgcgaggaatttttaagggttacaactatgtattcgttttcggtggtattattttttccgaaggacgcaatacagaagcccgattcgttaacaaagcctgttttgccgcctacaatggttgcggtttcgggttcggtgccgtacatataattaaacagtgtggcgctcatcggcagcccgtcggggtgcttattggtcggggtgcttttatactgatatgtggaaagaattttacggcaaagcggatctctgattgcggcttcaagtattattgccatatcgtaagccgtggtgtaatgattcttatcaaacagcccggtcacatttgtgaaatgagtatttttaagtcccaattccttaacctttttattcatcagctcgacaaactgcgcctcactgcctgaaattttgattgcgagagcgatcgccgcgtcagcgcccgacggtaaaatcgtgccgtagaacaaatcggtcattttaatgacctcgccgctcgaaaagcccgctacggtggcctcggcaacatataacggatctgtaatatcggtggtcattgtaaaggtatcatcgtagctttttatattttcctgcgcgactaaaacggtcataattttagtggttgaagcgggataaaggcgctcctcggcattgcgcgcggctgtgaccttgtgggtgcttaaattgacaattattgccccgcaagcatcatttgacgcgggaatctccgcagtatccgcgctgaattcatagcttatgggaggctcggactgctcatccggctttgtagaaagtgccgtcgaggtgccgctgttttcgtccgacacctcattacggattgtccttcgcgtaacaaccgacaccgttacagcaataattgccataaccgcaactacggcaattattgccgcgggacggatttttatgacccggtaaagcgggcttttatgcgtttttttatgagtcggtttatatgcggaagcgtgtttttcttcgtgaatattctcatcagaggtattatttgacagctttttttcaagcgctttcatatattcgctgtaatcgctttgagccataataacaccccctgaaaattaaattaaattcaacttaaaaattcgtttttgcggcgacatgtgcggcggaaaagcttaaaagcctctgccggcaccgcctcctccgaacgaaccgcctccgccggaaaatccgccgccgctgctgtgaccgccgaacgaaccgcccgaaaagccaccgccgaatccgccgggtccgccgaaccagaaaaatctgcggcggcgaccgaatataagtaaatacagtaaaacgaccgcgataagcgcggcccaagaaacagctacctttttggaatagccgtcctcctcggaatcgtcaatcggcgtgtagccctcctcgggttcttcgccgtactcaatataaatctcgtttattacggctttggtgatttgcaaaataccctcggaaaaattatcggcttttaaatattcaagcccgtaattatctataattcgacctgttttactgtcgggcagcgcgccctcaagcccgtagccgacggcaatataaatctgcctttcttcaagggcgaaaagaattacaacgccgttgttctttttcttatcccctactccccactgtctgccgagccctaaggcatactcggcaggctcttccccaccgagattttttacggctgctacgacagcctgagctcctgttttttcatacagcgccgccgcgcgggaataaatttcatcctcggcggatgaatctatcacaccggcataatcgtttatgaaaaaacggtcggtaggctcggggtatttctttgccgctgccgcaaagatacctgtaagcaccagcaaaacggcggcgacggcaatacttaaaattcttttcataagcttaatcaaagcttacctgcggaacgctttcgctgcctgcctgcgcctcaaaatattccaccttttcaaagccgaacatacccgcgataatatttttcgggaagcgccttacgcttgaattatatgcctttgcagcgtcattataatccttgcgggcggtagctatgcggttttcggagcctgcaagctcatcctgcagcgccttgtaattctcgtttgctttaagctcggggtaagcctcggttacggcgtttacccaaaccgaaattgcgctgtcaagctgctcggctgcctttgtctgctcgcctgcggttttagcgcccgcaacggcgtttctcgcctcggttacggcggtgtaggttttctgctcgtaatcggagtagccctttacggtgttaacaaagttcggaataaggtcggctctgcgctggagctgaacggaaattacggactgtttgttttcaacctcttcctgctgattaacaagcccgttatagttgccggaaattataccgattataataccgataaccgccaaaacagctataagaattgctataccttttttcataataaattctcctttgaattattttgaatattcaacctctatttttatatccggtgcggcggtgcagttaagcgattttatgctgccctcgccgttatcgacgataatatctacaagcttattctcaatttcgcggcgaattgtatttctgagctcccttgccccgcgcttgccgttgccgcatttatcggcaagataggcacaaacgctgttatcaaatttaaaatcaataagccgttctgaaagcgaggttttaagctctgtaagcataagctctgcgattttagcaagggattcaggggttaagggtgaaaataccactatctcatccacacgcgctataaactcggggcgtaaaaagccctcgagcgcttttagcgccttttcttttgacgcgtccgcctgcgtttttccgaagccgagcagattttcgctgcggtcgctgcccgcgtttgaggtcataacgattatggtgttttcaaagttcacggttctgccctgcgcgtcggtaattctgccgtcgtcaagaatttgcaaaagcacgttcagcacatcggggtgagctttttcgatttcatcaaacagcaccaccgaatacggctttctgcgcaccttttcggtgagctgacctgcctcgtcatacccgacatatccgggcggcgcgcctattatgcgggataccgagtgcttctccataaattccgacatgtcaaggcgtataagcgtttcgggcgtatcaaaaagctgctctgacagcacctttacaagctcggttttaccaacacccgtgggtcctacgaaaataaaggaggcggggcggtgcagattatttgtgtgaatacgcgagcgcttaacggcggcggcgacaaggcgtgttgcctccccctgccctattatacgcttattaagcgcgtcttcaagtcccgccagctttttaaggtcgctttcctgcacctttgaggcgggaatacccgtccatagctcaataacctttgcaatatcagcatcggttacggtgcaatcggacgcgggctcgtaaagccccgccgctatatttttgtatttttctatttccacccttaccattgcctgtttttcatagtcggggtgttcaacgtcgctttcaagctcttccaattggtcgttatactcggcaagctttttgtttgcgttgtaaagctcgtctaccgccttgtttgcaaggctcgcgcaggcgcacgcctcgtccaaaaggtctattgccttatcgggcaggtatctgtcggtaacgtagcgctcggataaaagcacggcttttttgataatttcatcgggtattttaacgccgtggaagccctcgtaatagcctttaacgcccataagcaccttttcggtttcggcgacagacggttcttcgaccgttacgggctgaaaacggcgctcgagcgctgcgtccttttcgatatacttgcggtactccttaaaggtggttgcgcctataacctgaatttcaccgcgggaaagcgcgggctttagaatattggcggcgttcattgagccctcggcggagtctcccgcacccaccagattatgaatttcatcaataaacaggataatatttcccgcgtcctttatttcgtccaccaagcccttaacgcggctttcaaactgacccctgaactgggtgccggctacaagtcccgttaaatcaagcagataaatttccttatccaaaagtcttgcgggggcgctgccctcggcaattttgattgcaaggccctcggcaatggcggtttttcccacgcccggctcgcctattaagcaggggttgtttttagtgcggcgggataaaatctgaattgtgcggtaaagctccttatctctgccgatgattctgtcgagctttccttcacgcgcgcgttcggtaagattggtgcagtattgctcggtaaagcggcggcgctttttcttcggtttcttatcgtttccgtccttaacgccggcacccttatcctccgcctttttatcctctccgcccgaaaagccgaatatcttattcataagcggaattgcgggggctgtgcccaaatcgaaggtatcgtcgttgagtgactcatcatcgatatcaccgccgtcgggcgacattaaatccataaactggtcgctcataagctcgatgtcttcatcggttatattcatttttttcagcatgtcgtcaattggctttatgccgagctcctttgcgcaaaccaggcaaagtccgtccggttcggaatgggtgtccgccgcgtttgcgacaaatacgaccgccggacgttttttacatcttgaacaaagcttcatgttttatctccgtttcgttattcggtgtaatagtgcctacaccggcaaattaaaggaaaaatgcgtaaaaaaccacgatttttccattgcctcggttttaaaaatcagaaatccgtcgggggtgagcgatactatcagcgaaataatcatgcagaaaagcattgcgattattattcccttcggaatgcctgcaataccgccgagtattcggtttagctttccgataatgctgaacgaaaaaataccgttcaggaatttggcaagcagctttaccaaaacaataagtattatcatgatcagcagcgcataaataagagtcagcaagcgggaaacaatcggctttacaacgccctgcgaggcggcttttgccgcgcttacggcaccgttccccatattctcgttaatgcttttatttatgctttcctttgaaaagccggcgttttcggaatattttcttataaattccggcaaagcgttccaggtattgtctgtaatctgtgtaacgctgtcccctgtcgccttgcttaccgaggaaacaataggcggctctattattttatcatatgtaaggcttgccaatggtgtacttattgttaacgttatgaagattgcggcaataaatcccgccgattctatcacaacgcgcacaaagccgcgccttgccgaaatcaaagccaccgcggcgatgattgcgattacgataagatcgagtaaatagttcatgctgtttgcctcctgtttattttattcaaatttaattttatcgatacggttgtcggtaattaccgccgcatgggttctgccgagcggcgctatcttcacgccgccgaagccgcattcggcttttcgcaggagctttccgtcgctgccgtaaagaaaaacctcggtatcactgatacaataaatatgcccgcccgataccgcaatatcaccgacggtacccttaaattcaaattcctttttcagctgaccgtttgttccgaaaagcactattcggttatcggcccggtcgttttcacggttaaaaacggcaaccgtgccgcccgtacccgcagaaagcctcgataaggtgtaatcgtttttatattcggtattgtttttccccgaccaattgataaaataaagcttgttttcggtcgcggcgataaatcccgtgcggtgaaaggagttaagagttattacaggcccgccctcaacatctattgaggaaatcggatttgccgaatcgaaattcaaaatgccgatctttgatacgaattttccgtttgttgagttgaatgtggaaactgcgatttttttaccgttcggcgctacagcgacattgttaaccgtatctgccgatgaataccaggtgtatatctttttgcctctttttgagtaaacggtcacgaccgaggcataggattcagagcgggtaaccacagcgtatactcccgaatcggacactgcggcgtttattatttccgcatcactgtttatgctgcttttcagctcgtgcagattataaatatacgcctcattcccgccctgatcgaaaaccagcgccctggtggacgaggtcttcattacggggttttcaaagccgtgagaatgcgaatatatctcttttccgccgtttgcaaaggcgtttaggcgtgtgtctgttaaaacataataatacgagccgcgggatacggcgctttgcgtttcggtgctttcaaggcttataggatacgagcccttgccgataagcgaaatcagattttccgtattttcggtgattcctgccggtaaaacaagctgaaatacagtcagaataagtgcgataatcagcgcaacgaaaaaaaacatcccggtttttcttcgcctttcgagcttcttgccgtttaccacacgcagcggcatttccggcgttttttcgggcttctccgattttttgcggcgtttatccgccggggtcattttaatatcttcatctgtcggaagcgcccttttgcggcgcggcgccggcttaaagcgatttatgcgtttctttttataatcaggcattttcatcccccggatatatgactttttcgagaaacagaccctgcggcggtgcggtttcgcccgcgagcgtgcgctttttttcttcaaatatgtgattttccgacggtaacagacatcgcccgtcggatattgcagccgccgttccgacaattattctcaccatattgtaaagaaagccgttcgcggtgattttaagaattatcatatccccctgccgctccgccctgcaaaggctgacgcgccgcacggtatcctcgaccgatctgcccgaggaagaaaaggcataaaaatcatgctcgccggtaatctgttcgcaaaagcggtttatcttctctaaatcaagcggtctttcgatctgccaggaatagcgcgataaaaacggatccctgaaacggctgtttgaaatataataagcataggtcttaccgcatgcattataacgcgcgtggaaatcgtttgcaactttttttacgcccttgaccgcaatatcgggcggcaaaagagaatcaagtcctcttaaaaaggcactttcgggaaatttttcctcgcagtcgaagtggcagcaaaactcccgcgcgtgtacgcccgcgtcggtgcggctgcagcccgtgaccgccgggcgtgtgccgagcagccgttcaagcgcgttctgcagcgtttcctgcacggttatgccgttgggctgcacctgccagccgtgaaacgcggtgccgtcatatgcaattgtaagcagcatccgtttcacaagcagcgtccccctttaaaaaagtatgttaagcgcgattaccccgccgcacattgcggcggacacaagcgatacccaaagatcgcgggctttaaggtgcatttgcttcatgcgggttctgccctcgccgccgctgtagcagcggcattccatagcctccgcaagctcgtaagccctgcgcaccgccgatattaaaagcggtattaaaataggtataagcgcctttaccctgtccttgaggcttccgttttcaaggtccgccccccttgccttttgcgcgttcattatcttttccgcctcttctataagcgtgggtataaatcttaaggcgatggtcatcatcattgcaagcgtatgcaccgcatttttaagacctataaatttaaggggcgacagcaggctttcgatagcgtcggtcagatcgttcggcgttgtggtgtaggtcagcgcgccgcttatgaatataagcattatgattcgcgccgccataaacagcgcgcggtaaacgccgccgctggtaatcgtaagcttccaaaggcgtatgagcgtttcgccctcgccgtagaaaacattgataattgccgtgaaaataagcacgggtaaaattgccttaatatttttaaggtaaagccgcagcggtacgcgggaaataagcataaccgcaagcacagatacccccgcaaagatgagcgcaaaggtattttttgccaaaaatacaaatactataaacagtatcataaggataattttaacgcgcgggtcggtcttgtgaataaccgagcgcccctcataatactgaccgaaggtaatatccttaagcattgcgcgccctcgctttcatatcagtcagcacccttacggcgcgctccaccgtgaaaacatcatcgggaacgcaaagccccgcagccttaagctcgtaaaaaacgcgggtaacgatcggaacattcaagcctatttcgcgcagcttatcgccgtttttaaagacattttccgtagtatcaaacataaaaaggctgcccttgttcataaccagcagcttatcagccagcaccgccatatcctccatgctgtgggatattacaataacggtggcagatgtagcggcacggtaatcgaatattattttcataacgtcctcgcgccctttagggtcaagcccggctgtaggctcgtcaaacacgattatttcggggcgcattgccataacgcccgcaatagccacgcgccgcttttccccgcccgataaatcgaatggggatttttcaagatattcgtcgcggatacccacaaggcggcaggtatcgagcactctggtgttcagctcatcccccgaaagccccatatttgagggtccgaaagctacgtccttaaacacggtctcttcaaaaagctgatattcggggtactggaatacaagccctacctttgaacggattttgcgtatttcctttggattttcccaaatacttttattatcaaccagtatctcgcccgaagttggtttaagcagtccgttaaggtgctgcacaagggttgatttgcccgaccccgtatgaccgataatacctattatttcgcccttttcggcggcaaacgatacgccctttaccgcatcgtttacaaacggtgtatttccgtcataggtgtgggtaagattttttacctctaaaactgacaaactacttttcctccgaatgaagcgccgatattatttgctcggctgcttctttaatagaaagcgcgtgggtatcaacgacaaagccgtttttctttaaattatacaaaagctcggcggtctgcggaacatcgagtcccactttttttaagcgctcgacatccgaaaaaataaccttcggcttatcgtcagcaataatctcgccgtcgttcatcactataacgcggtcggcgttttccgcctcctccatatagtgggttataagcaccactgttatccccttgtcccggttcaaacggtggagagttgatattatctccgccctgcccttggggtctagcattgcggtaggctcgtcgagcaccaggcactctggctgcattgcaattattcccgcaatggcgattcgctgcttttgcccgcccgataaatggtggggggtggattttctgaactcccacatatcaacggctttaagagcgtcctctacccttttttcgatttccttaggcggaataccgaggttttcggggccgaaagccacgtcctcctcaacaattgaggcgattatctgattatcggggttttgaaataccattcccaccttgcgctttacctcaatttcggtctcctcatcctttgtgttaatgccgtctgcaaaaacatcgcccgaggtcggcttatttaagccgttgagcattttcgcaagggtggattttcccgagccgttgtgtcccaaaattaccgtaaagctgccgcgctctatattaagcgataaatttttaaccgcggcaaaggttttttcctcatcggtatattcataggtaacatttttaacttctaatatattatccattttctcttatccaaacagtagtatttccggcaggcagactgatttttttatcggttacgtaaagccctatctcatcggttgcaaccccgcccgggcggttttttattacatagcggcttaccatgtaattgagtattgagggtgaaagcccgcccgtgtaggaattaaggaagaagaactccgcgttatcggataacagcttgccggtctcggttaaaagctcctcaagctgctgctccagcttccaaacctcgccgtcgggtcctctgccgtaggagggagggtccattataaccgcgtcgtacttattgccgcggcgcacctcgcgctttacaaatttaaggcaatcgtccacaagccagcgcacagggttatcggaaagtccgcttgccgccgcattttcctttgcccactgcaccataccctttgaagcgtccacatgggtaactttcgcccccgccttaaggcaggctgcggttgctccccctgtgtatgcaaaaaggtttaagacagacagctgacggtcggcgtttttaatgagctcagccgctaaatcccagtttaccgcctgctcggggaaaagccccgtgtgcttaaagcccataggctttaatcggaaagtgagctccttatatttaatactccagacatcgggcacttttttcagcgtttcccaatatccgccgccgctttttgagcggtgatatattgcgtccgcacttttccagcgcttatccgaacgatttcccgaccatattatctgcggatcggggcggataagaataatatcgccccagcgttcaaggcgttcgcccgcgtccgcgtcaataagctcgtaatcgtcaaatcccgagacagttctcatttattcttttccctcaattactttcgcaacctgttttgcaaggcgcttaatttccacaatatcatcgccctcaagcattacgcggataagcggctcggtgcccgaagcgcgcacgagtattctgccgcgcttgccgagggtcttttttacctcgtcgatggcatcgatgatatccttatccgtattaagctttgccttaagctcgggtgacgcggtaatatttacaagggtctgcggcagcaccgtcataaccgacgctatttcggaagccgacttgcccgaggatgaaatgattgacgcgagcattgcgcccgataactgaccgtcgcccgtggttgcgaagtttttgaatatgatgtgtcccgattgctcaccgcccatcttgtaatcgtgcttcagcatttcttcaagcacatagcggtcgcccaccttggtttcgagaacggtaatgccgtttgcctcggcaaagcgcttaaagcccatattcgtcataaccgttacaacggcggtatcgtcctttaaaatgcccttgtttttcatatcaagcgcaaaaacggctatcatgcggtcgccgtctatcagctttccgttttcgtccaccgccaagcagcggtcagagtcgccgtcaaaagccaaccctaaatcaacgctgtgaccgttcacatagtctataagatcctccatatgggttgagccgcagcgggcgtttatgttaacgccgttggggttatcgtgcatcatatgcacttctgcacccagctttttaaagaatttttcggcggtgtaggaggcgcagccgttagcgcagtcaatggctatcttcatgcccgtgaggtcggctcttacagaccttaccagatggtcgatatataaatcaacataatcgtagcgcgcaaaaacgctgcccacatctccgcctacggggaactcaacagggctcatatcgtcaagcacgagcgcctcaatttcttcttcgagggcgtcgggcaatttgaagccgttgcagtcgaatatttttattccgttgtattcgcagggattgtgcgaagcggatatcataattcccgcgtcagcctccctatcctttacaaggtaggcgattgcgggggtcggcacaaagcccacaagcacaacatccgccccgacagagcaaagacccgccgccagtgccatttcaagcatatttgaagaaacgcgggtgtccttacctattaaaaccttaggcttttcggtggttttctcggtaaggacgtaagccgccgctctgcctatgttcatggcaagctcgcagtcaagctccttattcgcaatgcctcttgctccgtctgttccgaataatcttcccattgataaatctccttaaaaaattgattgctgcgcggcgttttcgctccgccgtattcctaaatggtcatatgccaaggcggtaacgcacctgccgcgcgccgtgcgcgttaaaaagcctatctgcattaaataaggctcgtaaacatcttcaatggttactgcctcttcccccaccgcggcggcaagggtatcaagccctacgggtccgcccgagtaattggttattatggttgtgagcattttgcggtcgaaatcgtcaagacccagctcgtcaatttcaaaccttgcaagcgccgcacgcgccacttcttcggtaatatcgccgcggaattccacctgcgcaatatcccgcacgcgcttaagcaggcggtttgcgatacgcggcgttccgcgcgagcgcgatgctatttcgagcgcgccgtctttttctatttcaattcccaaaattcccgccgagcgggtgattatctgcgccaattcctcgggtgtgtaaagctctaagcgcaacagcaccccgaaacggtcgcgcaagggggcggtaagctgccccgaacgggtagtagcgcccaccaaggtgaaatgcggcacatcaagccttatagaccgcgccgagggacctttaccgagaataatatcgagcgagaaatcctccattgcggggtaaagtatttcttcaacatttcgcggcaggcggtggatttcatctataaaaagcacgtcgccctcgttaagggatgtcagtatagctaccaagtctccctgcttttctattgcgggacccgatgttacgcgcaggtttacgcccatttcctttgcaataatgcccgagagggtggttttaccgagtcccggagggccgtaaagcagcacatgatcgagcgattcgtgcctgccgagcgccgctttaatgtatatgctcaaattttccttggcctttttctgccctatatattcgttaagagttttagggcgcagggatagctccgcctcgtcctctttataatcgtactcgggggctacaatgcggttttcaaaatccatttcctgttctatcaagggttatatcctccttgcaagggatttaagcgcctgctttataagctcttcggcggacaaggtttggtcgagcctgcccacggcaagggatgcctcaccctgcgaatacccgagcgacacaagcgccgccaccgcctccgatgagtttgtgtgcgccgtggcgttgcctatcgcctttatatcctcgccgtcttcggcaatggcgcccaccttatcctttaattcgagcacaattcgctgcgccaattttatgccgacgcccgatgccgcggtaagcgcctttgcgtcgccgcttgcaatgtaaacggtgagcctgtcagcctcaaattccgagagaatggcaatgcccagctttgcgcccaccccgtttaccgaggttatcagcttaaaggcgttaagctccgcttcgctctcaaacccataaaggtcgagcgaatcctcgcgcaccgccaaatgcgtgtataaaaatacctcgctgcccttttgcggcagacggtaaagcgtgtttttggtaacgctgcagcgaagacccacgccgccgcactctaccaccgccgaggcattatcggtatatatcagctttcctcttaaagacgcaatcatctgcccgcctccttatataatcgtgaataatcggtacccgaataatttgcgtggcaaaccgcgagtgccagcgcgtcggcggtgtcgtcgggtttcggtaccttttcaaggtttaaaaagctctttatcatttccattacctgccgtttttccgccctgccgtagccggttatagcctgctttacctgcaggggggtgtactccgatatattaagcccgttttgcgcggcggaaagcactattactccccttgcctgcgctacgtcaattgccgtggtggtgttggtgttgaaataaagcttttctatcgacatatcgtcgggcttgtatttttctattaccgtattcatatcgtcatatatatcgcgaagccttgtttcaaacggcagacccgcctttgtgattatcgccccgaagcctgcgaccgaaaatctgccgtgagaataatctataattccgtagcctattgtggcatagccggggtctattcccaaaatacgcactgtccgcccacctttactattccataatatagtattatatcatattcttcttaatacttcaagaatttattggcggcggcgcgcggtaaaaaatataggtgcaatagctcttgacttcggcggcggtatgtggtattataacttcaaacaagatctttaagcagggtgctgtgacgccggcaagattgtaaaccgtaaaagctccgatgaatgtatcggtctgttttgctgcgcttacgacctgcttgaaaaagcgggtcttttttgttgcggcttaggctctctctgatgagggaggcaagtacaccgcaaaaattcaaataaaaccgggagcaaattatgatactgaacaacgcttttgtttaccgaaacggtaggatggaacagcaaaattacgaattaaaggtcggcggcgtcggctttctttccgattttaataagctttgcattttcccggcattctgtgatgtgcatgtgcatttcagagagccgggattttcttataaggagacaataaggaccggctcgcttgcggcggcgcgcggcggatataccgatgtctgcacaatgccgaacctgaaccccgtacccgacagcgcagaaaacataaaagagcagataaaaataatcgaaagagacgcggcggtgcgcgttcacccatatgcggcgataaccgtaggcgaaaagggcgaggtgctaaccgatatggcagcccttgctccctactgcgcagccttttcggacgacggcaggggcgtgcaaagcgaggatatgatgcgcgaagcaatgataaaagcgaaggctctcggaaaaataatagccgcccactgtgaggataattcgctgctttgcggcggatatatccataagggcgaatatgcccgcctgcacgggcataagggcatatgtgcggagagcgagtggaaacccattgaaagagatttaaggcttgcaaaggaaacgggctgcaagtaccacgtctgccacatttcctgcaaggaaagcgtggagctgatacgccgcgctaaggcagagggggtagacgtaacaagcgagaccgcgccgcactacttaatatttaacgatatggatttaaaagaaagcggcagctttaaaatgaacccgccgattagaagcgaagaagacaggcaggctttaataaagggcttgcaggacggcacaattgatatgatagccaccgaccacgcgccgcacggttatgatgaaaaatcgcgggggcttaaaaacagccttatgggcattgtggggcttgaaaccgccttcccggtgatgtatacttatcttgtgaagaaaggcataataactcttgaaaggcttattgagcttatggcgataaatccgcgaaggcggttcggattagaggaaaccgatgatatttgcgtttacgatttgcaaagcgaatataaaattgatcccagcgaatttaaaagcaagggcaaaagcacgccgtttgacggcatgacagtatcgggcaaaaatctacttacaatatgcggaggtaaagcagtatggaatataacagaaaattagtcatggaggacggcgccgaatattacggcacgggcttcggatacacgggcgacgcggtatgcgaaatagttttcaatacctctatggtggggtatcaggaaataatatccgacccctcctacacctatcaggcagtggttatgacctacccgctcataggcaattacggcacggcagatgaggactacgaaaccaaaatacccacaataggcgggctgatagttagggagtataacgacctgccctctaacttccgctataccaagaccctttcggaagtaatggaagaatataaaataccggggcttgcgggaattgatacaaggaaactgacccgcagcatacgcgatttaggctcgcgccgcggaattataacaaacgccgatacaccgacagacgatgctttggaaaaaattaagagtacccctgttccgcatgacgcggtagcgcgtgtcagctgcaaaaagcgccgctactcaagaactgcaaacgccaaatacagcgttgtggcgatcgactgcggcataaagcttaacatcatccgctcattaaactcgcgcggctgcaatgtgaccgtaatgccatataacacctccgccgcggaggttgaaaaaatgaagcccgacggcattttcctctcaaacggcccgggcgaccccgaggatgtcattccggtaatcgatcttgtaaagaaattaaggggtaaatacccgatattcggtatttgcctggggcatcagatgatatgccttgcctgcggggccgaaacctacaaattaaagttcggtcaccgcggcggaaaccaccccgttaaaaatctcgaaacggggaaaatcgaaataacctcgcaaaaccacagctacgccgtaaacgaaaagagccttgaaaacacgggacttaaagtcacccacataaatctgctcgataacacggtagagggcgtaagcgacgagaaatcaaagatgttcagcgtgcagtaccaccccgaaagcgcgcccggcccgcaggacagcgcctatttattcgataaattcacgtctcttatggaggaaaacaaaaatgcctaaaagaaccgacataaaaaagatactggtaataggctcaggccctattgtaataggtcaggcggcggagttcgactatgcgggtacgcaggcgtgcttagcgcttaaagaagagggctatgaggttgttctttgcaactcaaaccccgccaccattatgaccgatacatccattgccgataaggtgtatatggaacccctaacccttgaatatttggcaaagattatacgctatgagcgccccgacgcggtgctgcccggcatcggcgggcaaacggggctgaatctagccatgcagcttgagaaaaagggcgttttgcgcgagtgcaatgtagagcttttgggaacctcaagccgcagcattgagcgcgccgaggacagagagcttttcaaggagctttgcgaagaaataggcgagcctgttttgcaatcggtaatagccgaaagccttgaagagggtcttgcagccgcaaaggaaataggctatcccgtagtcttgcgccccgcctttactttaggcggcacgggcggcggctttgcggataatgaggaagaatgcgccgaaatattgaggggcgctttggagctttcccccgttcatcaggtgctggtggaaaaaagcataaagggctataaggagatcgaatacgaggtaatgcgcgataataacgacaccgcaattaccatttgcaatatggaaaacgtcgatcccgtgggcattcacacgggcgactcaattgtggtttgcccctcgcagacacttaccaacaaagagtaccatatgctgcgcgacagcgcccttaaaatcatacgcgcccttaaaatcgagggcggctgcaacgtgcagtttgcgcttgacccgctttcctttaactactatcttattgaggtaaacccccgcgtttcgcgctcctccgcccttgcaagcaaggcaagcggctacccgatagcgcgagtcagcgccaaaatatcggtaggtatgcggcttgatgaaattatcatagccaacacccccgcctcatttgaaccggcgctcgattatgtcgttaccaaaatgccgcgtttcccgtttgataaattctcatcggctaacaataagctctccacccagatgaaagccacgggcgaggttatgagcgtgggcagaacgattgaagaaagcctgcttaaagccgcaaggtcgcttgaaataggcgtaaaccacctttatatgaaaaagtttgaagctttttcggacgacgaaatgttaacctatataaaggacggcaccgacgaccgtatttatgcgattgcagagcttttgcgccgaaaaaccgatataggcatgatttgcaacgccacaaaaatagatatgcttttcctggaaaagataaagaatatcgtaaaaaccgaaaacaagctgaaagagcacattggcgataccgacacgctgtataccgctaaaaagctcggtttttccgatgaatttataggtaagctttggggcatgacaggcgaagaaatttataaaataagagagaagcgcggtatgttccccgtttataaaatgattgacacctgcgcctcggaatttgaaagctatatcccctatttttactcgacctatgaggacgaaaacgaatcggcggtatcggataaaaagaagataatagttttaggctcgggacccataagaataggtcagggcgttgagtttgattactccaccgtgcacgcggtaacaacaattaaaaaatcggggtatgaggcgataatcataaacaacaaccccgaaaccgtctcgaccgattacacctgctcggataagctttactttgagccgctttgcaccgaggatgttatgaacatcatccaccttgaaaagccgataggggttatagcgtctttgggcgggcagaccgccattaaccttgccgaaagccttaaaaaccgcggagttaagattatcggcacggattgcgaggcaatagaccgcgccgaaaaccgcgatttgtttgaaaaggtgctgaaagagcttaatatcccgcagccgcagggcaaggcggtaaccaaaatcgaggacggcgtaaaagccgccgaggaaatcggataccccgtgcttgtgcgcccctcgtttgtgttgggcggcagagccatgcagatagtggcggacgaagatcagctgcgccgatatttgcgcacggcggttgaaattgacgaagataagcccgtgcttgttgataaatacatttcgggtaaggagcttgaagtagacgccatttgcgacggcaaggatgttttcgtgcccggaattatggagcttgtggagcgcacgggtatacacagcggcgattcaataagcgtgtaccccaccttcagcataagcgaaaaggtccgcgagacaatacttgattacacaaggcggttgggactgggcatcggcataatagggctttacaatattcagtttattgttgataaaaacgataatgtgtttataatagaagtaaacccgcgttcttcaagaaccgttccgttcctttcaaaggctacgggcttcagccttgccgacattgctacgcttgtaattttgggtaaaagccttaaggagcagggctttgataagatttatccgggagacaaaaaacgctggtatgtaaaagcccccgcgttttcgttctctaagctcagagggcttgacgcttatttgtcacccgaaatgaaatccacgggcgaagccataggctatgacgacaagctcacccgcgcgctttacaaggcgctgaaagccagcggaatgagcgttatgaattacggcacggtgcttgctacaattgccgataaggacaaggaagaggcgctgccgcttatacgccgcttttacaatatgggctttaatattcaggcaaccgcgggcacggctgaatttttaaagcgaaacggaatacgcacccatgcggttggcaagctcagtgacggaagtcgcgagataaccgacgcaatacggcaagggtatgtaacctacgttataaacacgcgggatatgaactcgtcgggagtgctgtcggacgggtacgaaatccgccgctgcgcggttgaaaacaatgtcacgatgttcacatcactcgacaccgtcaaggtactgcttgacgtgcttgaagaaaccacactcggaatatccacaatagatgcatgaaaggaaacgctatgaaacaagatttttacgaaattacggaaaataagcaaatagccccctcggtttttaaaatggtgcttgcgggtgacacctcgcccattatagcgcccgggcagtttgtaaacattaaaatacccgaattttacctgcgccgccctatttcgatttgtgattgggacgataagagccttacaattatttacaaggtagtaggcgacggaacaagcgctttaagtcgcataaaaaagggtgaaaagctagacttattaatttccctcggcaacgggtacgatacctcgctttcgggcgataaacccctgcttataggcggcggtgtgggcgttcctcccctgttcgggctgtgcaaaaagctgattgccgaaaataagaccgtaaatgtaattttgggctttaacacaaaatcggaaatatttttagaggatgaattccgcgcgctaggcgcaaatgtagccgttacaactgcggacggctcttacgggcttaaaggctttgtaaatgccgcaatggagtacgccgattacagctatttttacacctgcggcccgaaaccgatgctgaaagccgtaaacgccgccgcgaaaaccggcggtcagttcagctttgaagagcgtatggggtgcggcacgggcgcctgcatgggctgcacctgcaaaacaaaaaatggtcctaagcgcgtttgcacagagggccccgtgtttttaagggaggaaatagaatggtaaatacaactgtcaacctgtgcggtataagcctcacaaacccaataatccccgcgagcggcacgttcggcttcgggtatgaatttacaaggttttacgatataaat

SEQ ID NO: 1453 - DNA, 5562 bp, Unknown
  16S sequences of unknown bacteria
agtgaggacgacttaagtataggacttttatatatgaaagtctgatttacattgtctaaaagtcttataagtgatataatcaataaaaataaacacaaaggagaagtgtgttatgaagaaaagaaatattgcactgagtattatttttacgctgattacttgtggaatctatggcttatactggtttgtatgcctgacagatgaaacgaatcaggcggctggtgaacagaaaaccacaggagtcatggcattgatcttcacattgatcacctgtggcatttatggtctctattgggcatattgctgtggcgagaagattgataaggcaaaggctaacagaggaacgccggcttctaacgggggagtgctctatttgattttatatatctttggaggcgtgattgcatatgcattgattcagcatgagcttaacaaactgattgaacaggatgaggcatgaatcataagcgtatagaaaatgtttttctgatatgtctgatgttgggcatttatacagtgtttgtaagcaataccggaacaggatttccttgcctgttccggtattttacacatttgcaatgccctggttgtggagtcacacatatgcttttggaattgctgcacggaaattttcgtgaggcatataatgctcatcctgttctgcttttgtggggaccatttttactatggcttgtgttaaaatctttatatgcatatataacggataaagatctgcggcttaggacatgggaaaaagcaggaatgtatatttttttagtagttctgtttgtattttttgtgtataggaatctaccgtaaaaggacctccacgtcctatataacgtacataactcctataatgaaaaccgctgcatgtgtgggcagcggtttttgttgtttgccatataagcatatggtaaaatacccccatacaaaagatcaaaggcgggagaagaaatatggctttttcagagattcggacgcagagaagaataacggtcagggaggcatctggcggcgacctgttcaaaggtgcggtggcgattgcggcggggacgacgctgatttcctgtttgacgctagatatttccacaggattgaaaggggcacttctggtggtaggatgcttgttgtgtctttatggggcgaaatgggtcagaaaatatctgaaagatgataaaacctacagggagtatgcgccggaatgggatgacaagcattttatttacgaccgttttgcgaagggattgaatgcctggtatcgacaggaggaactccccgaggatgccgacggagatattgcatattttttgaagcttcagagagagcgtctgcggaacaagggattgcagatggagaaacgagtcgttcctaccaaaggaaccggttatggaactggaaaaagatctcgcaaatccctctggtatactacggatatgttttttgagcaggtgtctggaacgcttgcatttcacaatgcaaatgagacggttttcgagcagcaattggagatgactatgtatgaaatcgtggcgcacacgccggatacgacgagagcagatcagattcgagtgacctgtccccaatgtggtgcggtaaatgcggcgctgaagctggaggagggctgtccttattgcggcaccagatttcggatcagggatctgttcccacgagttgtgaatttcttctttataaagacgaaatccattgccagctacaagcagatctttacgcagaccatgaccctgtctatggcgagcgtattcatcattactttatttcacaatatatttaccaatttccgggcgctgccgtccatgctgttcaacagctttatgatggcactgctggctggtggtatgatcggttatctggtgggagatgcaagacttctggctgcagtttttgaccgggatggcatgaaacatatttcgttgctcaaatggaccagttccaagcgaaagatcaccaatacgatgctgaaatacgataagaaattttcctttgataaatttgagggacaactggtggcgctggttcgtatggcggtcctggcggaaaaaccggagaatctggcctgctatgcggccggaacgcgggatgcacagttcgcagatattctggagatgacctataccaatggcctctgcttgaacaaactctggctggaaggagaccagatgcacatgtccatccgaacctggtggatcaattattatgaaaatgatggaaagattaagaaatgcggagactgcatcgacacagtctttgtgaaaaatatttccagacaggaagagccgggattctccatcacatctgtcttctgccctgattgtggcggcagctttgatgccgtcagacagcggatctgcccctactgtgggaaagaatatcatatggaaaatgaaagttggatcattgaaaaaatgcatttgatccggtaagaggatagaagaaaccgtgacaaattgtcgcggtttctttggaatatttctgcagatatttcctccagacatactttttactcgttattcctgatccttcaacacaccatcttctccaacggtcacatcaaaggacagatttgtcaacttctggtacaatccggatggattctgaatctctttcagaacaccgccggagcgctggcagggaatgagcttcacagagggtggattttcatcggagaaggtggtctccagcagaaccgtctgcccatcacgatttccgaataaataatttccaagactgtatacgatgggaacaccgttgtagtattcaaagccctggagcacatgagggtggcagccgaccaccagatcagctccggcatcaatataaccttttgcaagagacctctgataatcttcgggggtctcatttcgttcgatgccccaatgtacgaagacgatcacatggtcacaagtctgatgggcttctttgatggctgcatttaatctggctggatcataggtctggaagatcccggcctgattgtcagtggcataccagtcccaggaaggagagactctggtggcaccaaagatggcaaaggtctgtccattgatggtgcgtgtagcaggtgcagatgcctcggcgtcattatagccgccgccgatccgggtgatgccagcctgatccagagtggcaagggtatcacagaaagcatcccggccaaaatcaagagaatggttattggcaacagtcacaatgtcagcacccagatcctgaaaaatcttcacatatttcgggtcggcacggaaagtgaactgcttatcttccatggcttctccctgaagactgaacggaaattcctcgttgaaaataaacaggtcagcatcctgcatatgggacagcatattgttgtcagcaagtgcctgaatgccggaacggttgtaggcatccagataagcttctggaaacattacatcaccggcaaaggccagaagtacatcgccggttcccgatgcttcgtctgtgcttatatcggcatcttcagatacctgagtggagtcttctgccattccggactcgttgttccttgtatcttccgagttcgaatcagatttttgataggaatcattctcgataccggtatttccggtaaaaccagattcctctacttctgaatcctgtgaaaattcttcctgcatggatgcatttttatgtaaaaaagatggccatcctgtgatgtgagatgcgatcagcaagaccgcaagcagtggaatgccgatacagatgccgatgccaattccctttaaaaaatttttcataatgatagtcctgcctttgtagctgattatttttctcttgcgctcattatgtcgtgattacatcacttcacaatttcgccgttcgtcaagaatgagcgagttcccgctggctctcttgtgttcattacattatatcacaccataatcctccttgcccacaggaaaaacctgcggtatcataagaggtagaaaaaggttgctgccatacagcagccagacacttggaggatgaagacatgttattgattcgaggaggcagagtaatagatccggtgagggaagtggacgagatcatggatgtgatgatcgaaggttcccagatcgtggagactggtaaagctctgaaggttccggcagatgcggaagtgatcgatgcaacaggacttgtggtggcaccgggactgatggatgcccatgtgcattttcgcgatccaggccttacttataaggaagatattgagactggtgcggcagcagcagcccgtggcggatttaccaccgtagtctgcatggcaaatacaaagccggtggtagataatctggaaacactttcctatgtgcaggaaaaaggggagcagacaccgatccatgtgctgcaggcggcggctatcacaaaaggacttcagggcaaagaactggtggatatggagtcactggcagatgcgggagcagctggctttaccgatgatggaatcccgatgatggatgaaaagctgctggtgcaggctatggaacaggcgaaggcattgggccttccgttggctttccatgaggaagatccggcattgatgagtgagccgggagtgcacaaaggaaaagtggcagagcagataggatacggtggtgctgccagagcagcagaagatgtgatggtggcaagagattgtatgctggcactgcataccggcgcttctgtctgcatccaacatatcagttcaaagaattctgtggaactggtgcgtctgactaagatgctgggagcagatgttcatgcagaggcaacgccgcatcatttcacattgacggaagaggcggtgctgaaatatggcacattggcacggatgaatccgcctctgcggacagaagaagacagacaggcgatcatcaaaggtatccaggatggaactattgatatgatcgtgacagatcatgcgccgcacagtgaagaagaaaaagcaaaaccgatggcacaggcgcccagcggtatcaccggacttgagacctcattggcacttggtatctattcattggtggagccaggatatattacgctgatggatcttatgaaactgatgagtaagaaccccgcagaattttaccggatggtgccgggaagcgtggaaccggaagcaccggcggatctggtgatcttcggcgaaaaagaacagtggacagtggatcattttgcatcaaaagcaaccaacagtccgttcaaaggctggaccttgccaggaaaggttcattacactatctgcgcgggaaagattgcgtataaaggttagtggattggataaaagccctcaactgtgtatgaccatatatgtgggacatatcagcacagttgggggctttatttttatttgtttttacttaagaaataatcagcaagtttttcatcaggttcctgtgggtgtgttgtcagcaggtcacagatctgctgaacaaactccaaagaaagtcccagaatatcagaaatctgaacaggtgtcatctgtttgctgagaagctgaaatcgtatgatggagatttgatttatagtctgtcctttattgagcccctcagcaaggcc

SEQ ID NO: 1454 - DNA, 2246 bp, Unknown
  16S sequences of unknown bacteria
gaggccaaaatgaacgacgattggaggcatgcatttatgatttatcagattcatcagatggacgcggagaagcggggcatcgccattggcgagaaacggggcattgccattggcgagaaacgaggcattgccattggcgagaagcagggcgagaaacgaggcattgccattggcgagaagcagggcattaccatcggcgctaagcaggagaaattggacaacgccaagggaatgcttcacgagggtctatccgccgacctgatttcccgcgtcacggggctctccatcgctgaaatcaacaggctcaaaaccgctccgaacgccaactaagccaaaacacacaaagccctctatggcaaacgggattgctcctgtccgccatagagggcttttatgatcgatgcctatttagcagtgttcaatcttttctgtaaatgcgtgaagaggggcacgcaaagaatttccagagccagagggcctcggcctgcgagcaactgccaacgcagccaccgctccgcctccggccccggacgttcaatcgccgcttaggctgccgggatacataatggccagttccgcgtagatctgcccccagtttcgaacgggcagggtccattttttcgtcagttcccaggttgccaggtagagcgccttagtgaggcccatggcgttgggcgtatacatgaccttttaagcggtctgcgagaacttaaacatcgggctgatgcagtcccagttgtccgtccagcggttcatgcagccgggaacttgtctttgttctttcgtgtatttcattggtaaacctcttgtccacgcttcgggtagcatgtcctgtttttgattccccctgcccacttcgtccgcatccattatagaatacttcctctcgtgtccagttttagtttaccacttcacaagcgacaaaaattgacaccatgagcagggggctgtcccacatgtgggacagcccccgcgaaacgctgacaaaatccacctttacagcgaattgttcttgatgaaatccacgacctcgtccaccatgcagtgcgccatgcaaatgacggtatccgcgccgccataatagatggaaatgcggcccgtttccgcgtccgccagcgcggcgcaggggaagcatacgttgggcacgtcgcccacgcactcgtagagcatcgtcggctggatgagatagggcgcggtgcgcgcgatgaccttccagggcttatcgatgtccagcagggccgcgccaaaggcgtacacatagccgttgcaactggtgagcacgccgtggtagaagagcagccagccttcgtccgtctcgatcgggatgggaccggcgccaatcttggtgctctgccagccgcccgtgggagccatcacatggcggtgtttgccccagaagaccaagtcggggctctcagaatagaaaatatcgccgaaagcggtgtgaccggtgtcgctcgggcgggaaagcatggcatagttgccgccgatcttgcgcgggaacatcacgccattgcggttgtagggcaagaaagcgttttccttctgatagtaggtcttaaaatccttggtggtggccacgccgatggtggggccgtggaagcaattgcaccaggtgacgacgtaatcctcgccgatcttgcagcagcgcggatcgtatccatacacaaaatcttcgaactcttcgttttccttcaccaggtggaagggctcgggatcgatgttccaatgaatgccgtcctccgagaacgcggagtggatgcgcatttcgcggcggcggtcgtccacgcggaacacgcccgcaaacttgccctcatagggcaccacggcgctgttaaagatggagttcgcgcaggggatcgcgttacgcggaacgatgggattcaagctcgagcgccacacgacttcgctgcatccggcaggcctatcttcccagggaatattcttaagagcggggccgagtatcttagccatagattcaccctcctcaattcgattgcacctttattgtaacgtaaaaacgcaggttttgtcaagcgcgggggcgttacgcgcacggaaatcaattttgagcaagcacccgaaggagcatatttgatttccgtgcacccggaattgcttgccacgaccggattggcgctgggggattgccccgcgcacgaaaacatggtataataaaaatgaggaaagccgatcgcaaaggagggccgcggaatggcggaaggaaattggggaagcgcgggcat

SEQ ID NO: 1455 - DNA, 3470 bp, Unknown
  16S sequences of unknown bacteria
tgaagagcagtataacatcgcaatggcagagctcggcgaggctctccgcgagcttgaaaaataaggaaaggaaggattatccatggcagacgtaaaaaaacaggccacccgtgaagcctacggcgaggcgttggccgaaatcggacataaatacgataacttgattgttttggatgccgacctttcgggcgcaaccaaaacctcgaccttcaaaaaagagttccccgaaagattttttaattgcggtattgccgagcaggaccttatcggcgttgcagcgggtcttactgccgcgggaaaacttgtgttttgcagctcctttgcaatgtttgctgcgggacgcgcctttgagcaggtcagaaacgcagttggatacactcatctgaacgttaaaattgccgcgacccatgcaggtctttcggtgggcgaggacggagcaacgcatcagtgcaacgaggatattgccctcatgcgctccattcccggtatgaccattttaagcccggccgacggatacgaagccaaggcttgcgtccgcgccgcagcggaatatgttggccccacatatctgagattcggcagaatggccgtgcctttcattttcgaacccgattataaaattgaaatcggcaaaggcgtaaagcttaaggacggtaaagacgttaccctcatagccaccggacttatgaccggaatggctcttgaggcggccgaaacgcttaaaaacgaaggcattgacgcccgcgttatcaacattcacaccattaagcctatcgaccgcgaaattataataaatgccgcaaaggagacgggtgccgttgtcacctgcgaggaagcgtcgataatcggcggtctcggcggtgccgtttgcgaggttctttccgaaaccgttccgactcccgttatccgcgtcggagttgaggacaaattcggaacctcgggccctgcgggagaagttctgaaaaaatacggcctttgccccgaaaacattgttgaaaaggccaaaaaggcaatttctcttaaataattttttatcgataaaagctcttccttcggaacgtctgcgggaagagcttttatttttacaaagggattttatatactttaaggttgactttgcagggcgtttttattataatttatataataatttgtgttaaaatggtgtaatgtatatgaaaggcaaagtaattgtaatcgagggactcgacggaagcgggaagggaacccaaacgccgcttttgtgcgagttcttgcgtcaaaagctcggcgatgtgagaaagctgtctttcccgtgctacgaaagcgagtcaagcgcccttgtgaaaatgtatcttgagggaaagctcggaaaaaacgccgatgacgtgggtccctttgccgcgtcggctttttacgcggtcgacaggtttgcatcatttgtcaccgattggaaggaagaatatcaaaagggaaaggtctttgtggccgaccgatatgcaacctccaatattatatatcagatgtcaaagctcgaaaccgatgccgcgaaggacgaatttattcgctggtcggaggattttgagtataacaagctcggaattccccgtcccgatcttgtaatttatcttgacatgccggtggaaatttctcaaaagcttatgtcaaagagatacagcggcgacgaaagcaaaaaggacattcatgaaaaaaacatcgaatttctgaaaaagtgccgtaccgcggcggcctatgcggccgagaagtgcggttggaaggttataaactgcgccgaaaaagggcagccgctttccattgatgaaattcataaaaaaataattgaaattgttaaggagtcgatattatgatttatttgtttcttgcagacggatttgaagaggtggaggcaataaccaccgttgattatttaagacgcgcggggctttccgttgtaacggtgggaatcggaggcagagaagtcagaggaacccatgatattcgtgttacagccgacaagaccgaggacgaaatcagactcaacgacgaggttatgggagttattcttcccggaggtatgccgggcacaaccaatcttgaaaaatccgaaacggtgcaaaaggccattgatttttgtgtggaaaacaatcgtcttgtggctgcaatttgtgccgctccgtcaattctaggacacaaaaatttgctttacggccttgacgccacctgctatcccggagtggagggcgaatgctacggcgccaacatacgcaaacagcgccccgtgtgctgtgcaaagaattttatcacaggcatgagcgcgggctgtgtaactcaatttgccgcaaaaatcatcgaatatttcaagggtgaaacggtcgctcaaaacgtactttccgacgttgtatggaaggtttaagagacaaaaaagagcttcgtcgaacttttcttgaaaaaagacgacacattgacccgaaaatcaatgaacatcttgacaaaaaaattgccgaaaacctttttgaaagtgaaattttcaaatctgccgacacgattttaatttacgtttcgacaaaaccggaaataaacacaagaccgattattgagagggcttttgaaagtgagaagcgggttgccgtccctaaaaccgaaggaaacggccatatgaatttcgtgtttatcgagtcgtttgatgagcttgaaatcggaaggttcggaattcttgagcctaaaaaccatttgaaaaaagtgtttgatttcagcaaaccggctttgtgtattgttcccgggctttgctttgataaagacgggttcagagtcggatacggcggcggttattatgacaggtttctttgtaaattcaagggcctttcggcaggactttgttatgataaaaatgttttaaagagtattgactttgacgaatatgatgtttcggtcgactgtttggtgaccgaaagcggaataaaaaagataaatcggagggaaaacgatggatgaaaacaaaaaaagcggagacgccttcggtgatttttccattgacgatattttgaaaagtatcgaaacgggggagcaaaagaaggaagaaaaaagcgatgaaagcgcagaaccttccgtgaaatcggagcaaaagcctgcttttgaagaaaaaacaaccccgatttccatgggaaaagcggaaatcaaaggcggtctttttgacgagcttaaaagaaacgacgcggcaaaaaagaacgagcaaaacacagtaaacagaagcggcgaaacatgcaacgttcctgccgaaaggagaaattcttccgaaagtaatcacaaaagcaaaaaagcatcaaaggagaaaaagcagggaagtgcggtcggaggaataatccgcggcgccgttatcgttgttatttcggtgataattgcgggtattattcttttcctcatttcagatgtcaccggtatcggcaaagaggtctttaaaggctccgacagcaacaccgagctttacataaccg

SEQ ID NO: 1456 - DNA, 26534 bp, Unknown
  16S sequences of unknown bacteria
gtcggatattttcggtcagataagcgcttcccagattggaagtaatgatgacgatcgtatttttgaagtctaccgtccttccctgattgtcggtaaggcggccgtcgtccaggagctgaagcagaatattgaagacatccggatgcgctttttcgatctcatcgaagagaatgacgctgtaaggatgacgtctcaccgcttcggtgagctgaccgccctcatcatatcctacataacccggaggcgcgccgatcagacgggataccgaatatttttccatatattccgacatatcgatgcggatcatatttctttcgctgtcgaagagcgcttcggaaagcgctttcgccagttccgtcttgcccacaccggtaggtcccataaagataaaggaaccgatcggacgattgtaatccttcagtcccgcacgggcgcgtatgacggcttcggttaccgcctccaccgcttcctcctgaccgacgactctctgatgcagcacgtcccccagacgcagaagcttttctctctctgcctccaccagcttggataccggtattccggtccacttcgataccacttccgcgatttccggttcgtctacttcttctttgatcagacggtactccgacttggaagcagactctaatttttctttcgcctctttcagctgctgctccagcgcaggtaattctccatatttcagcttcgccagcagatccagattataatctctctccgcctcttccatctgaagtttcacatcttcgatgcgctgcttgatctccttggaagctccgatctcactcttttcctgctcccactgcagacgcatggaatcgtttttctctttcagattggaaagttctttctcgatattcgccagacgggcctgcgatgcagcgtcatcctctttgctcagcgcctgcttttcgatctccagctgcatgatttttctggaaatttcatccagttctgccggcatggaatcgatctccatccgaaccagagaggctgcctcgtccatcaggtcgatggctttatccggcagaaaacggtcgctgatataacggtccgagagggtagcgcaggcgatcagtgcgttatccgtaattctcacaccgtgatgaatctcaaatttctgcttgagaccccggagaatggaaatcgtatcttccacagtaggctgatccaccagaaccttctgaaaacgccgttccagcgccttgtccttttcgatgttctgacggtactcgtccagcgtggtggctccgatgcagtgaagttcgcctctggccagcttcggcttcagaagattgcccgcatccatcgaaccttccgtctttccggcgccgacgatggtgtgaatttcatcgatgaagagaataattcttccctccgacttctcaatctcattgagaaccgctttcagacgctcttcgaattctccccggaatttcgcgccggcgatcaaagctcccatgtccagagcgaaaatcgtcttgtccttcaggccctccggcacgtctccgttgagaatccgctgcgccagaccttccaccaccgcggtctttccgacgcccggttcgccgatgagcaccggattatttttcgttcttctcgacagaatctgaatcgtgtgccgaatctccgcatcgcggccgatcaccggatccagcttgccggatctggcgtcctccaccagatctcttccgtatttttccagagcctcatatccgtcttccgggtttgaactggtgacgcgctgatttccccggaccttggataattcctgtaaaaaccggtcttttgtaataccgtagcgcttgaaaatcgcggcgctcggcgtattcttttcgtctaaaagcgccagatacagatgttcgacactcacaaactcgtctttgaattcccgggctttcttttccgcatccatcagaagcctgttgaatctctgcgatgcgtacagctggccgccctgtactttcggcagcttggccagttcgttttccagctccgtgacgacgtcctccttcggaacgcccatataatccatcagacgaccgatcagcccctgatcctggcgtaccaaggccagatgcaggtgctcgccctccagctgctgatgtccttcggaaatggcgtagttctggcagtctacgatggcagactgcgctttttctgtgaacttttcaaaatccattgatctcatctcctcgtttttattcaaagaccggatccggacagcgaaatcccggcggagttccgcaggaaaaacggagatttccccgccggcttcactttcccgctctgcggaaattccaatcactcacgcagagacttttcatccgaaaagcagacttgacgcggcggaactccgcaggtctcttctccggaacaggtcctttatgtatcaccagaaaaatatactcatgatcagtgaataagtccatgatacagccggcgaaatcacataagaagtcagatggaacagaatgataatcataagaaacatcggtcccagctgatagaaccgtccataccacggttttctgtccagcctgaaaatctgtgtgatgatgccgaagccgtccagcggcggcagaggaatcaggttaaaaaacatcagaacgagattgatggagaccgcactctgaagaacactccagagaatgcctcccgctgaagtcccgaaaagaaacggcgctccggcttcgtacgcaagccgcataatgcccgccgtcaaaacggcgatcagcagattcatcgtcacgcccgccagcgacacgatcagttcatctctcctgcgatgcttatagtatcgcggatcgatctgaaccggccttccccagccgaatccgatgagcagcagcagcagaaatccgaccggatcgatgtgagacaccggattcagcgaaactcttccctgcagtctcggcgtcggatctcccagcacactggacgccttggcgtgagcgaactcgtgaaatgataaacctatgataatccccggaagaatgattaatcttcccaatatataactgattattgaactcatcgattataatatccccttctttttttgacttaaacgccgataaaacataattttttaccggattttcctgtttctcccgctccgcggccaaagagggccgatcctcagtccgtcccgccgcttcgcaggtgatttcggcgacaatctccattctgccgttattcttttcgaaattactcttttctctccgaataaatgccggaaatatgcgtgacaaactgctttgcggaacgtccggaacgactggtctggcgcatatcccatttgttagcctcctcgatgagctgctgactgtcgggatccagcccctctctctctgccagcgaccggacgatctccgtatacagctccttatccggcgcgtaaaacgtaatcgtcagtccgaagcggtctgccagagactgacgctcctgaataccgtcctgagcgaaaatttctccgtcctgagaatttctgtcagtccacgtctccttgacgagatttctccggttagaagtcacatagacgaggacattcttcggctgcacttccacaccgccttccagcacggatttgaaatgtttgtattcgatttcggtagattcaaaagacagatcgtcgataaaaatgataaaacagcagcctctgcccgacaccatctccatgatcttcgtaatatcgaaaatcctggctttcggcacattgatcatccgcagaccgctgcagctgaaataattcagaagagccttgacgctggaggattttcccgttcccttgtctccgtacaaaaggacattattggcccttttgccttccacaaagattccggtattccgtatgagctgctgctgctggatgtcgtagccgatgagctcgtcgaaggtaatcggatcgtgctcctttattccctgcaggctcccgttccagaggaacgcccggtatttgcccaaaataccgcagagatgtatgcggtaataattttccagcttttttacggattccgacagagaatccgcaaatttcagagcttcccggagatggcaggctctgccgtcttcttcgatcggcggcgtcagcagacagacgcagggcctttccggatcataaaactctcttacaatattccagtcgagattcaggagactgcggatcaccgtcagatctccctgcaccagcatctcagtgatttcgtccgtctctcccttttccgcgctgaggctgaaatgattctcgctttccgccgccagacggtagatataattttcccagtaggtaccttccgtatccgctgtcgttaccgctcccaaaatccgcctctgcacctcataataaacagagacatccccgctctccgggatttttcctgccctggctttctccgccagctccactgcggaacgtacgattttatctgtacggatattctcataatacagcagtctgtccaaattcatttttcctacctcacagatatcttcttttcaaaatttccatttattttatcacaacgaacatgcatttgaaatagtataaatccaaaggagtgatgttagaaaatgaaaaacagagaacctcatttaaaaaagccagtatgtgccgctgtgcacaaagtcgccgcaggcgacacgctctacaaaatcgcgcgcagatatggcgtggattacggacgtctcatggcgctcaacggaatcacaaatccatataacgtaaaaatcggaacagaaatctgcataccgcctgcagcaggaacaggcgccggaagcaactgcgccagttattatgtcatcagagaaggggatacactctacggcatcgccagaaacttcggcatcggcctggagagcctcatgtccgccaacagcgacatagacccgtacaacatgcatgtcggaatgagaatctgcattccgccgcaaaggccggaccttcagaacccgaacgggcagagaccaaaccggccaaacgctccgggcggtccgcagtccggttcctccagaccacctcagtccggcacacccggaggacagcgtcccgttccttcccatccatcccgtcccggcacaaacggaggacagcagccgggctcttccagaccgtcgcgtcctggaacttccggaaaccagcagtccggcggaatgcagataatgccgcggacagaagtatccgccggtaccgcttcctcagacacgcagtcttccgcggcatcggcttccggatcagctcagacgcaaaatgtctccgcagctccggcggcagcggcacagaccggtacggcacagtcatcgggcgccgcggcacaggcttctaccggttcagcggttatggacgctctcaatacggcgaacagaaaagaccgggacaccaaacttttcggcgccgctttcctctctgacagcgaacggacgtcgccggcatccgcggcggcagccaccggaacttcctccgcacagcagaaaaaaaccggaaaaacagatgcggaagcagcctctgccagcgcatcgaaaaaagccgctcccggtaccgtagcggtcttcgcagagatgacagcggaaaacacgactgccgcagcagacacttccgcccctgatctgcaggaggtaccttcggaaaccacaaatctcgacagtatgaccgtttcagaaccgaaagccgcggattctatggtgcgccctttcgtctccgacaccatgcctgacggtattctctaccgcgtagagcagggagaaaccctgaccgatatcctcaaaaaattcggaatctgcttcagcgcactggattacagcaatgcttccgtcgatctttccgacgatctcaccggtctcacactcaatattccatacggagaccgcttctgcatcgcgccgaacaaccagcgctatgtcatccgcagaaacgatgatctcgataatctgtccatccgcttcaatatttccaccgatgatctcctgcgcatcaacccgatgaaaaaaccggaagacttttccaatatcggcagccggatcaatgtctccaatgatatttaacccgatcttcattgaaaaaatatacagacattttccctttgcagacagccgttgttgagaaaggagaaaatacggcgcttctcctgatttacagaaaaatatgacaaaaggggaccggacgccggcagaggttcactctgccggcgtccggtccccttttgtgtccgcctgtattctcaacgctaccagattcccataatatgctgcattccgagactggtgacagatattcccacccagcagcaaagccccatggcgatcggttttccgccggattttacgagttttacgatatccgtattaagaccgatggcggccatagccatcacaataaagaacttgctcacctgtttcatcagagagaaaaaaccgaggatagcggccgccgccattcccgtgatgattccggaggaaatcattagctgaaatatcgtagtgatgacagaagcgccgacgaaataaaggataaaaaacggaaaaatcgatttcatgctgactttcgtaccttttccgcttttttcttttctcgccctgagaaaagccagcgccagagtaatcgggatgatcgccagcgtccgcgtcagcttaacggtaaccgctttatccagagtttgagatcccagaccaaacatcgcgtcccaggtggaagccgccgccgtaaccgaagaagtatcattgaccgccgttcccgcaaaaatgccgaaagcctccggatccgggctgaatcccaaaatctgtgctccgagcgtcggaaagagaatcgcagccagtacattgaagaaaaagatgacggaaatggactgcgccacttcctcgtcatccgcatcgatcaccggcgcagacgccgcgatagcggaaccgccgcagatagaagaacccacaccgatgagtatggagatcttcgacggaatttttatcaggcggtacaacagataagctattatcagtgataccgtgatcgtcgaaatgatgatgggcagcgactgctttcccgtctgaaagatgaccgacagattcaggccgaatcccaacaaaatgacggcgtactgcagtatcttttttgaagtaaaggtaatgcctggctgcatcttcgtcttatctttcaaaatctgtgtcattatcattccggcgataatggcgattaccggtccgcctatgatgggaaaccggtttcccagataagcggcgggtacggcaatcgccagacaaagagccaatccccgccaccgctctttcaatagttccatattcactcctttcttttattccgttgtcatgtttgatgacttttgcccttcggaaaaatcccccacggacgaactgattttcccgggaaatgagttctctctctcggacggcgctgcgaaagaactgccctgagacgcggaatgcatcccagggcagtcgatacgctgcgtatgatcagatccgccgcgtcctctttcgagaatccggatttctacagatagagtggatatttctcacagagttcttttacgatagtctttgccttttccagagacgaagagtcttccggatgatccaggacaagcgcgatcgcttccgcagtctttgccgcgtcctcttctttaaaaccgcgggtcgtcatcgccggcgtgcccagacggatgccgctggtgataaacggactctgaggatcgtttggaaccgcattcttgtttgtcgtgatattcgcttcatccagcagcttctccgcctgcttgcccgtaagacccttatttaccagatttaccagcatcagatggttgtccgtaccgccggaaaccaggtcaaagcctctctccatgagaccttccgccaatactttcgcgtttttgacgacctgttccatatcgcgcttaaattcaggagaagccgcttctttaaaacacacggccttcgccgcgatgacgtgcatcagaggaccgccctgtgtgcccggaaagatcgccttgtctacagcctttgcgtattcctctctgcagagaatcgcaccgcctctcggacctctcagtgtcttatgcgtcgtagtcgtaacgatatccgcatactccaccggattcggatgacagccggctgccacgagacctgcgatatgcgccatgtctaccatcagaatcgcaccgatctcatccgcgatctcgcggaacttatctgtctccaccgtgcgcggataagcgctggcgcccgctacgatgagcttcggccggtgttcctgagctaacttcctcacattgtcaaaatcgatcatgcctgtagcgggatcgatgccgtaagaaacgaaacgataggatttccccgaataattcaccggagaaccgtgtgtaagatggccgccgttggacaagtccatacccatgaccgtgtccccgtactcgagaaccgcctggtagactgcggtattggcgttggctccgctgtgcggctgcacgttggcgtgttccgcgccgaagagggctttcagcctttcgatcgccagagtctccgcttcgtctacaaattcacatcctccgtaataacgcttgccgggataaccttccgcatatttattcgtcaatgcgctgcccatcgcttccatgacagctctgctcacgaaattttccgaagcgatgagttcgatcttgttttcctgtctgcccatctctttctttattatcgaggcgatctccggatctgccttttccagataatgaaaatacattgtcctctccttttcaccagtaaatgatctgaagcccttcagaaaaattgaaggaaaatagattcgatgcaaatttcttcaaaatacgcctttcatcatcgtatcagatgaattatagcacatgcccgctatattttgaagtaccaaccatttcttccggtaaatcgccttttccctcactgacaaagccggatccggaagaaccgcccggcggattttggagatccgcagttccggatctcagacgtttcagcctgcagcgctgaatattttaaaatccgcagaatattatttattctgtccgcatataatatttccgtttatttttccgttcgttttgacgtataataacatagcatcgatcatccttcggctctgcaggccgcggatacggctctttcaaaacaggatttcacgctctgcacggtttataccggttttcgcatttttaaagccgaattcgcaatttttgaaccggccgcagcatattccgaagaaaatttcggatttctcagagaaactatttaccgcacccacatacccacagaaagggagaagcggaaggagacagaaaatgactgaaccgagttccacaaaaaaaatatcgaaactatctcttctggtgatcgtcatgataacttcatttctcaccacatttaccggcagcgccctgaatctttccgttccggccatcagcggagaatttcatgcgggagccgtcagcgtaggctggatcattacgggatatatcctgtcttccgccgcgctctccgtccctttcggacacttcgcggacctgtacggcaaaaagccggttctggtaacaggccagattctgtttaccgtcttcgctctgctgtgctctctggcgtggaacattcagacgatcatcgccttccggctgctgcagggtgtgggcgcggcgatgatcttttccacaaatgtagcgatcctcgtagcctcttttcctccccagatgagaggcaaaatgctcgggttctccgtttccgccacatatctcggcctgtcgctcggtccggttctcggaggcgtcctcaaccataatttcggatggcgctccgtattttatgtcactacggcgctcgccgcagctatcgccgctctttcggttttcaaacttcaggagccccgctctcttcccgccggcgaagaagacgtccaaacgggaaccgggggaagaagcgataaaaagtccgaagtcaacaccccggatgacagagagaagaaaaaatcgtccggtagccgcaaaaagaccgtcgccaaacagatggatctgcccggatgctttctgtacagcgccacactggcctgtatcatgtacggattttcttcaatcacatcgagcctcgccgcaaaaatactcctgccgctgggaatcctcttgttaatctgcttcctgcggagagagacgcggacggaagatcctctgatccgcctggatatgttccggaagaatatcgtgttttctttctcaaatatcgccgctctgctcaattacggcgcttcttatgccgtcagctatcttctctcgatctatctgcagacggtgatgggattcgactctcagatcgccggcctgattctcattaccagcccggtgtttcagacgattctgtcgcctgtggcgggaagactgtccgaccgatattccccgttcctgctctcttccgtcggaatgggaatctctgcggcgggaattttcacctttatctttatcgggaaaaattttccgatatctctgtttctcgccgcgctggtggttatcggtatcggcttcgctctcttttcctcgccgaataccaacgcgattatggcctgtgtggataaaaaagattacggcgtggcgtcttccgtcaccgctaccagccgctccatcggccacacgctgagcatggccgtcgtaaccgcagtcatggcggtaaccgtgggaaacatcaccctgaactccgcgtcggaggatgcgatcatcttcgccatgcgggtttcttttatcgtatttacactgctgagtatctcagccattttcttctcgtccagaagaaagtgacgaaaacaggaagccaccgaaggcttttcttccagtctcaggcggccttccgacggaaaggatgaataaatgacacaacaggagttcgacctgctttacagcggcggcatcgacgcgcagacagcgctgacgcttctcatgggaaaagagacaatctaccggaaatatctcttccggttctccgaggacgaaaactacggacatctcctgtccgctgtaagaaatcagaatgcggaagcagcctttcgcgcggtgcacacgctgaaaggcacggccgcctatatcggagctttccgcgtttcggaaaccgcagattcgctgacggaacagcttcgccccgtccgcaccggacatccggatctgaacgaaatccggccggagacagaactgctcggccgcaggatcgcggaggcctgccgggttatcgaagagctaaaaaatctgacggaaacttaagaaagaacagccgtgttacattacaggaaacgcagaggtgtcccatggaaatattcacaaaagaaatcatcgcccgcagccgaaaacagcgtaaaaaagagttctgcagcgccggcgatatcttccggatgctggagatggctgcaggagaacacaaccgcgctctcggattcggccgcagccggcttctcgaaaacgacgcggcctggattctcaccgggcaaaaggtccggtttctggtcatgccccgtccgggacagaaactgagaatcggcacctggcccggaaagatgcggttcgcccttttctcccgccattatctgatcgaagacgaacaaaatcaccctgtggtcagagcggcctccaactggacgctgctccatctgaagaaccgcagcatcctgccgccgaaaaaggccggcatttctgttgagcccgtcgtcaccggaacggaattagagctggaaaaacacatccctgccgcgaaagcgccgccgtcacttcagcgcgccgttctgccggaagatatcgacgctaacggacacgtaaataacgccgtctatgcagactggattgaagaatatctgacgagccccgattccggtctttctctccccgcactccgcagcatctcaatccaataccgtcacgaactgcgtctgggagaccgggttcagatccgcaccgagcgaagcggagaccgcattctgctgaccggagaatcggaaggtaaaacagctttctgcgcggcagcggaaggataataacaacgatacggttacataggtaaaatgtgaaagaagttctttcagaggccatcccatcgcaagatacttcggacttagaaaatcccggacgataaaaagaggaatcgcagcaaaaagactgcgattcctctttttcatttcgcattatcccgtctgaaaaccgggcgttcgttttattttttctcatcctctggcggaggacacatatttcagcagctgatctgccgtggtttcttcgtacatgatataccggttcatttccagcagactctgcggcagtcctttgaccaccacatttctccccggctgtgtggtgaaagtggccttgatgcccagctgcaccagaaccgaggtagtcagttcggtatactgaccgccgggataagccagagcaaacgtctctcctccggtgatcgaccggatcagttcccgctctttctgcacgtcatccgctatcagatccgcataatcccattcatcctctccggacagaggagccatattttcccgcgggattcctttttcacactcaccgttctgatgcagatcatacgtatgactctggatagaaatcagacccgaattctccatctccctggcttctgatacgccgaaatgaggaagcatcggccggccggtatccttgtattcatcctttcccacagaagaaccgatgacgaaaatcgtcgctttcataccatatttcttcagtatcgggtaagcgtactcgtaattgctctgatagccgtcgtcaaaagtgataaccaccggtttctccggcagagcttctcccttttccacataagcggtcagttcttttagagaaatggcggtatacccgttttccgccagcgtccggatctggttttcaaaagtctgaggcgacaggaccgctccgttgctgccgtccgccgccggatcgatctcgtgatacagcagtaccggcacgtccgcggtattttcctcctccgaaagagcgttgcaggtatacagcgaatccactgcatctcttacattttccttcgtgaccagccggccgaaatcctccggaagatagacgctgtcatctcctgccatgcgggccagcgccatctgacccacacagttccgaaaatgtgtggcgtcataaaaataacgcatttcatagctgaccgaactcatggaaaaatcccaaaaatccgtaacctccgcaagagcggtgtaaaattccagaacctcttcctttgaaaaatcatcgaaatattcccaatagaccggcgatgagacgacaacgaaattaattcccttttcctcgcagagatcccggattctggccaggctctccgccgtcgattcgatctccgtcatctccggcgaggtctgaggataatttgcaaactcaggataggctttcagataagactcacgatcagaaatccgctccgcatctctcctcgtcttgtcataagccccggtctctgcattgaatacgtcaaaggtctgattcagataagtgtccttgtaccaggaccgcagtttgtccacggcataagtcggttttgccttaagataacgcagataatattccgcccggtccaagaaaccgtcctccgcggccttgctgtgcaccgaataggtcagaggattctcctcctcatcataatgcatcgcattgtcgatatatacgttgacgatgagatttttgcactcgtagttttcgataatatagcggctttcctgttccacatccagcatatcggcgccgtacatgatcatattgtaaaagctggcgtcgtagtattcgttcagctgttccaccggatacgagctggtggaggaacagccgatgatgtaggaatcgtatttttcgtgattccggtcgagataagcgattttcgccgccctcggattcagcgtcatatcataagaataccaggagaacagacgatctccgaaaataccgaaaggatccaccgccagattcaacccgcccagaagcgcaagcagtccgaatacggtgaggataaacgaaacgagccatttttttgcagacacagtctctcctcctttttctaaaactgcatatagatgaatcccactgaaacatctcccttaaaccatacgcccagcagcaaaaccgccgccacgggaatcagtatgccgagatactgtacaaaagcgcgcttctgcgccagcgtttcccggatggagagcccccgctcctgcagaaattccacggtcagcagaaccgccacacctgcggagatgaccagatagtccaccgccgtgacgcccagctgcagcgctgtgccgtccagcagagcccccggctgaaaacggagcgcggtggccttcatcatagaaactgcatctccgagggaatccgctctggtgagatatcttccgatgaaaatcagaagacaggtacgaacgatgcggaaaatccgccatcccgtacttttgcggtcgatccccagacgtctgcagtttcgttcaaaggtctgttccagcagcagagacgctgtgatgataataccgttccagaaaccgtagacgatatatttcggatcggagccgtgccagataccgatgatcagatagacgataaaagtcgccagcgacgtgggtagaatctttccgaagactccgctgaaatgttttctgctgaactttcccagcttcatgaacggtttcgacagagagatcggataaaatacataatcccgcatccaggaacccagagtgatatgccatctgcgccagtaatccgccacggaatcggcgaaaatcggcctccggaaattttctgcaagattgacgccgaaaagatgcgccacgccccgggcggtatcaattccgccggagaaatcgcagtaaagctgaatacagtaaaaaaatacggccagcgcgatgatgctcccgctgtaactgtcataattatcgaagaccgtattgaccaggactcccgcccggtctgcgatgatcagcttcttaaagtatccccacagcatcagctgaattccgctgcgcaggttttcaaaatcgagattccgctgagccgtcagctgaccgcccaggtcgcggaaccggctgatcggcccctgtaccatctgcggaaagaacgatacgaaaagcgcataatgcccgatattgtgctccaccgcatatttgccgcggtagcagtcgatgacataaccgcaggactgaaatatataataggaaattcccagcggcacgaggatattgatctgggtcacaggtctgcccgcgatctgactgagaacttccagcgttccgtccagatatttcaccacatagagcataccgaaattgaagatcagcgcggcggcggccacacttttcttccgccgcttccacagattcttgtccagctgccctttcttcgcattgagacgttctaacgccaggcccgcggcataagtacataccgtcgccgccagaagataaccggtcagcagaacgcctccgcagagataaaagatgtaattggccgccagaagaacaatccactgaaatcttttggggaccagatagtaaagtacgacggctgccgtgactaacaggatgaattctaccgatgtaaaagacatggattatcctctgcgttcttcgatgagctgcatcatagcctccacagaattgaagttttccggcatcagatcatccacgtccagttccacttcaaaatgatccatgatctccgctacgatagatacgatttcgaaagaatcgatgagaccgtcgtctacgagagccttttcctttctaaagtccacattgggacagatttcactgagaatttcgattaatttatccatgatctatttcctttcttttctccgcagtaccgccgacgtccatccgtcgggacgataaccgctctctcgataaaactccaccgccggtttgttgtcccggcgcgcccagaccagagcggtctttcgctccgtaatgccgagatagagatgcagcatcccctgggccagtccctgtccccgcatcccttccgccgtcgccagatggcggatttccgaggatttctttccgtgcttgaaatgaagaactccttcgatctcctccgaaacgcctttcgcgcagatgattcttccctctgcgataataccttttatctcctgacgctgaggaaggcaggcagtctgcggatcgaaacaggacgtcagaagatcgtacacgccctgatcatcccccggttccgcccgacatacgcggattcttccgccggccgcttccccgccggcctcggagaaatcatctccaaaacccggcagttccgcgattccggaccggtatccggacatatcattgcgcgccgccgtcacattctccctctcttctgcgccagccgcttcttcctgccgcccggaggacatttcttcctgtctgacaaatcgctcccggtgaaaaagcgtctcaaatcccagatctttcagaaaacggagaacagtctctccgtcatcttccggccgcagcaccggttccgtcagcagaatttccccttccgtaagttttggaagaatctccggatctgtgagatagtagttcatcagagaaaacccccggcgccggcggaaaagaagaagccctccctcgtaagcatgataataaagcgtcccgctttcgatctccgaaagataatcgctcttgtccataaaattattggtgacgactcccggtctgatctgggccatcacgagcctggaaaggctccggtaatcagctgctttctccactcaaatacctctttttcagctccggccggtccgccttgccgttggcgctccggggcagagcttttaatttataaaatatattcggaaacatatacttcggtaccagagattccagtgatttcagaatctccgcggactcgatgctccccgaataacacgcgataatcttatccctgtcctcatcgaagagacagaccgcctcgtccacctccggcaaagaattgagagccgcctcgatttcaccgaactcgatgcggtatcccatatgcttgatctgtccgtcctttctggagcggaaatagatcattccgtcttttccctccgcgccgatgtcccccgtgcggtaaatcagatcccggtaagcgggattcatgggattctgcacaaaagcctgccgcgtcttttcgtcctctccgtaatagcccagagacagaccgatcccgcggacgcagatttctccgggctgtccgggagaaaccggcctgagatcttcgtccaagagaagcacctgtttgttttcacaggctgttccgatgggaatcatatcactgtcctcaaattgccggtcgatacggtaataggtgcagtccaccgtcacctccgtcgggccgtagagattgacatactccacctccggaagagcccggcgccacacgttgagctgctttgcctgcagcgcttctccgcccagaatgaccgtacgcagactctttggagtcacccggctgagagccccggaattcgccaccagatgaaaagcggaagtcgcccagacaaacgctgtgatctttttttcctgagcgaattgaaggagcagcttcggaaacagaaaaaacttcttcggaaaaatataacaggtcgctccatttctcagcgtctgatagatatctttcaccgaaagatcgaaataaaaaggcgcctggtttccgaaaacctctgtttcatcaaaacaaaatgtcccgctcatccactcggtaaaatcgatcaccgaacggtgggaaatgacgatgcccttgggaacccccgtagaaccggacgtaaaaatcacataagcgggatccacgtccagcacggattctctggcggaagcgagaagctccgtgtcttcttccgaagcaaaacccctctccatctcctccagaggacagaattcctctatatgcgccagcttctccttctgagcctccggcgccagaaaacaaaccggccggatcttttcgagaatgcgctccatccgccggcgtggcatggatgtgtccacgggtacataataatttcccgaagcgaggactcccataaaagcggcgatgctgtccgacgagcgctctgccgccacggccaccggccggctgacgtagccgtacctgcgggcgagatatgtgcccgccgcccgtgcggcccgcgcaagctccgaaaaagtatatgccttcttctcatcggaaaaagccgtcttgtccggatacttcattgcagattcctgcagatattcataaacgtttttgcggtaattcatttttcctctccgtctcaagtcagtttacagaaaaaagagacctgtcgcaagcagatcataaattatattataatcgaaaaaagacttccatgaaagcggtaagacaaaaggtactttcttttttaaagaagaaaacgtccgctaaaaacaggcgtcccctcctctgaggccccggactgtctgcggggcgtgcggaaaagacgccgcgtctcacagcgtctcatacggtctgttttggaaaaatcagataaaggaaagaacaaattgtgttatacttaatacagatattcttaatctcgacaagagaaaggacgagaaaatgagaaagaaaattatttcggcagcgctgtcgctgtgtctgatctgttctgcggcagttccgatatttgcggcgcaaaacaacatgagcaattttaagatcaccaatacctacagcggcacattcaaagatgtagcttctacgcactgggccgcttccgccgtagaaacctgttacgaatatgacctgatgaaaggaaattccgccgtcacttttcatcctgacggaaatctcacggtagcccaagctatcgttatggcggaccgcgttcacgaaatctacacgaccggagagagcacactccagaatggaaaaacctggtatcagccttatatcgattatgccgccgaaaacggcattctctctgaaggggaattcaaagattacgatgcggcgatcaccagggcgcagatggcctctctgttctgtaatgcccttccggcttccgaactgagcgcgatcaatgcggtcagcagcatccctgacatcgcaggcaatccgaattccgataagatcctgatgctttatcaggcgggagtccttacgggcagcgacatctacggcacattccatccggacaactccatcaaacgctccgaagccgcggctattatcgcgcggatggcgattccttcggaacgcaaaaacgtcactctgatgaataaatatgtttggaaagaagacacttctgtcacagccgctattccgcaggatgccgtggacatatcttctctctccggcgtaacagcctatgccagcgaagatatggccgtcattttcaactctgagtacaacagttcctatgcgggctatgatatttcgatcatctccgcagcggacctgaatctcatgctttcccaggaatttgctcagtccggcatgacactttcctctgcaagttcttccataatcacattcggaacgatgaaagcataccgcaccacaggaaaaatgagcagcgaagacttcacttccgactgtgttctctacactttcatcaccagtgcgggaaaaatggacatcgtagcgttcctgacttacgacgacagtgatctgctgaaaaaaattgccaatcacctgactatagacggcagaacagcatctcctcagatgcagtaatttctgaaagtgagatgcgaaattcatacatattcgcacaccaaacaggacaccactgccggcagtttttaccggctttttcttttcctcacctttttcccttcgtcccgatgattataggtgaagtccgccgttacctcagagacaataataccatgcgcgtcagccgctctttgcgggatctggcctatcgggccctgcgcgccagagaagcgctggttcacagacttcagagggacccttccgtcgatgaaatcgccaaagaaatcgactctcccagagaagatgtggtacgggcgctggattccatccaggatacggtttccctatacgaacccgtatttcgcgacaacggagacacggtcttcatcatggaccagatcaaagacacaaaaaacacggatgaacgctggatgacaaacatctctctgtcagaggcgatgtcgcggctcaatccgagagagcggcatattctcagcagaagatttttcgatggaaaaactcagaccgaagtggctgacgaaatcggcatctctcaggcgcaggtcagccggctggaaaaaaacgcactgaaatttatgcagaaatacgtttaacccgaagagggaaaaaacgagcccggcgaagaactccttcttgaaaagaaggggttcttcgccgggcttttcttccgactctcatccgtgcgttccgcagcataccgttctgtcatttcttctgcagaaacaccggccgcagtaccgcgatcgccggcccattccggctattttttctccgcgccgtcctctctgatgtccgcggccaattcctcttcactgagttctgacatgatcgcctgatttccatccatgtcttcctctgacgcgctcaccgcgccgctggaatgccagatccatgttccggtggaactcagatgcgtcttctggctgctcatctgaatgacttcgatctcatctccttcatccagcgattcgccttccatcgcttcaatccgtcccgaattgataaaggtcgtcttcacctggtttccattgataaaaattttgctcgccgacgtgaaattatctccgataatatacagcgactcaccggctgtcccgatactgcggatggtaatcggatcgattcccatctgcatctccgtcgcgacataaggctttactccgccgtaacagtaagactctccatagagaatatcatactgaagggcgtggagcgagctgtaataattgctgctgcccgccattttctgatggagcgacgtgatgacgcctctgtgcatatctaactgatccatggcataagagtagagctggtaggtcttgagatctttatcgttctgctgcagtccgaagttatcccagatcacatattctgtctgatagagattttcattctccagatcttccggatcgaaagagaatttcggcagatggtcgccgtaaaccacgaggacgcaaggttcgccgctcgcctccaacatgtccgtcacatcgcccagaaaggcgtccatctcgtgaatctgattgacataatattcaaatcccaccgcttcctcttccttaaatccggaaaccgtaatggtctgatccggatcgatctgctctgtcggatattttccgtgcccctgaacggaaacggcaaatacaaaatcctgttccggtgtggaatccatcgcctttttaatttcctccgtcaggcagctgtcttccgcccagtccagaggattccgctgtacattctgcatatattccacagaagtatacgaatcaaatcccagattcggatataccagataacggccgtagaactttccggtatggttatgtatcgcatgagtggagtaaccgtaatccttgagatcataagctaccgattccgatgtggtctcgcgcatgattgtggtaaacggatattctcccggtccgaaatattccagactcattccggagagaacttcaaattccgtattggccgtacctgcgccgaaagaaggcgtggtcagccatccggaagtataattctccttcatcgaggtaaaattcggaaccggattttcagagaatgtcacatccttcaagtggtttacgtcaaagaaagactccatctgaaggaatacgatattcggcgtctcttccgtcgctttctccgattttaccacttccgcattgcctccggcctgattgatctcatccaccaccgactgaatactctcccggctgtaatcctccggttctgagattccccggtctactacgctgcaggcaaagcaataagcgaaaccgtaatccttatatgcatcctgaatattgtgaaacgtcgttgccagcgatcccgaagagacggaaaaagtcgttgccgccgaaagcgtaacgcccagcaccgcgatagacgccagagctctcgccgggcttcgctttatcttcggagatttcacgaagatcagcgcgatgatacccgccaccagaatgacgccgacagcgatcatgataatctgtccctttgtaaaatatacgttgacgatgctcatgacatttttaaatgttctgaaatccatggcgttcagcggcgtcgtccgaaaccccagaagcacacagttggtgatgcccagacccagccaaacgatagaaatcagcgagtacatgaactctttttttcgaaacagtaaagctatagacaatgtgacgatgacgatcagagaattgtagagaaacagcagcgggtgctgaatcagatacgccgcgccgtcgatgacggaacgtctgctgagcatctctatgatcagatagagcagcagtcccagccctacggtaaagagaaacggccgctcctcccattttcggatcttagcgacaggcctccttgtcactctccggacaaaggcagccggcctgtgaaaaactctgtttaaagtatttctgattttgccagcggtttgcccggcagtctgcctcatacgcgtccacgtttttttccagattgaattatccatttttacacccccggttatcccctgtattccgagctgaatcaactgatacgtttcctacagaattattcttcccgtaaaactcccccagtttttcggaaggtttttcgcagactttataatctattccggagaccctgctgacttgcagggaattctctctgaaatccgcgaaattcagaactctgtaaaaaatttgtaaactgcttaagtcagatttattttagccctgcatcatcgtaacgtcaatcatatttgaactaatataagaaattcttaatgaatgacgaaacatataagaaagtgccgacgtctcccgatttttgagacagccggcaccattttgtctaattctgctttgccacgattttatattcgtcatacaggagataatacgggcagtcccggaaggaatccgtgagaaatttgtacatctcatcctcatccaggctgatatcgcagaaataggtatcatattccgcgtcataaatatagtaagaacaagtatcgcaggatcctttacttttcataaaattctcctctcatcatctgggacatgatacatgcccccgccgcgccggcctttcttaccgccttcacattttccgcggagattccgccgatagcgaaaacgggaatcgatacagcatttacggtctctcggagaaactccagtcctctgggttccagccctcttttgcagtcggtagcgaaaacgtgacccgcggtcacataatccgctcccagagcctgcgcttcgcgggcttcctccggagagtgaaccgacgcccccacggtactgaaatgtctgagcatcgtttcctgactccggctcagcacccgcagcacgtgcagcgggaaatgaatcttccggcaattcagccgcaccgccgcttccgcataagtatgcaggatacagctgatctgcgccctttcacagatttttatgacccggcgggctaattcttcatattccctttctttcaggtctttttcccggacgatgactgcgtctgcgccggaagagacgatcttctccatgcgctcaaaataatcgcccgccgaaagatgccggtttgtcaccgcgatgattcgaaatccgccttctgctgcgccctttccgccgcccgtctcatctgtcccgttccgcggatctctttcctcttccttatacataaacataatcattcatcaccggctgaaggcccctgtcctttatggcctgatagacctcgtccaccgatcggtcatcggagatgacaaactgctcgtctcccttttcttcgatttcctccacatgactgccgatgccggtgctgacgccggcggagatcttcgtggccgcgatgctgatcacattgtctctgaaacgctgtccctctctggtggaaatcgtgatattggcgaaaggcatgaaaatccggtacgccatgatcacctgcaaaagctgggtttcgtgcacatccttcgggttaatttcctcgtgattgatggtcggtctgaggcgggggcaggaaaaggcgatttccgcgtgaggatattttttctgcagcagataagcatgcatccctgtagcgaaagcatcttttctgaaatcagagagccccagaagagccgcgaaccctacgccgcgcatacctcccagaacagcccgctcctgagcgctgaaacggtacggaaagactctcttgtgtcctcccagatgcagcgtctcatatttttccggatcataggtctcctgaaaaacagtgacaaaatccgcgccgcattggtgcagataagcatattcatcggaattcaccggatagatctccagaccgatcagcttaaaatatttttttgcgattttgcacgcctctccgatgtattccacatccgacattttccggctctcccctgtcaaaaggagaatttcctccagaccggtggcggcgatggcctgcatctcctgctcgatctgttcgaaattgagttttgctcttctgatcttattgtgacagttgaaaccacagtaaatacagtagttttcgcagtaattcgcgatataaagcggcgtaaacatgtaaatcgaattgccgaaatgctttcgggtttcctgctgcgctctctgcgccatttcttcgataagcggctgggccgccggtgagagcagagctccgaaatcataaggtgacagcgtttcttttcccagagccgccctcacatcctctgaggtataagactcggggcggtattttgccgccgctttcagcacccggtccatgagatcggacttctccagaacctccattcccggcagatattccatgtggctctcgggaattttctttctattatctatttccataccagatcctctcttctccatttcaacagcctgcggcgcatcccgccgcccggcggcaccggatggaatccacgcgctccgaatccgcaacacggccggcgctccggcttcgtatccgtgctgacgccggatttaccagtcacacatccctggaaatcaggctccgaaaataaatctttttctacacttagcctcagtcagcgagaaaacccgtcagcggagaagaaggagaggctcctttcgtgagcacccttcccatacccgccagatacgcgcttcttcccgcctcaatggccttccggaacgcaccggccatcgcgggaatatccccggcggtagcgatggccgtatttgccatgatcgccgcggctcccatctccatggcttcacaagcctgcgaaggccggccgatgccggcgtctacgataatgggcagatcgatttcatcgatgagaatctgaataaaatctctcgtgcacagacccttatttgagccgataggcgacgccagcggcatgatcgccgcagcgcccgcattctgaagatctctggcggcattcagatccggatacatgtaaggcatcaccacaaacccttccgacgccagaatttccgtggctttcaccgtctcgtaattgtccggcagcagatacttggaatcccggatgacttcgattttcacaaaatctccgcatcccgcctctctggccagccgggcgatccgcaccgcctcctccgcatttctcgctcccgaagtattgggcagcagcgtcactccctccgggatgtagtccagaatatttccgtcgcctgcggtattgacccgtctcagagccagagtgatcatttcggcgccggcgcattccaccgccgcctgaatcagatccagatcatattttcccgatccgagaataaaccgggaggaaaattcatgtcctccgatgctccatttatcttcactgttcgccatagtttcttcctttcttctcatagtcttcagatcagtatctaagtcatgtcaaaccgcggcgttctccggtcagtacgccgcatcatcatctgcaggtatcttccccgcctcacagatctccgagaatcaggcggagcaccgcattggcctgatgagccgcacaggcggccacacggggcgccatcagcttctgcccggactccagaccgtttttctcatcgccgcagatataaaagcgctccgcaacgcggcgcgttcggatcagattcgtatcgccgctgcccgccattccgctgccgctgacgagtatcgcctccggcagcgacgtcagcaccccgttgacaaaagccgctttgttttccgcaaggtcaaatgcctcgcagatgatcccgtcttttgcaaaaagctctgggatgttttcttctgtcactctgcagcagtctgccgtcacttggatatatggattgatatcattaa

SEQ ID NO: 1457 - DNA, 2838 bp, Unknown
  16S sequences of unknown bacteria
ccggcgtgctcggctgccaggtgctcgacgcgtcccatcacggaggggaatatcgtcatgccggcaatggtcacgacgcgcgacgtactgcggtggcgtgcgtaaaacgcgatgtcgtcgagcgcgtcgaccatgtcgcccgcgcggttgaagacgtaggtgccggcgtccgtgaggacgacgccgtcgctgcgacgctcgagcagttccatgtcgagcgatttctccagcgccttcagatgacggctcagcgtggactgcgagctgttcagcgcgcgcgacgcgcgggcaagcgagccctcgcgcgcgatggtcacgaattcgatgaggtagtcgctttgcatgtgcgttgcctcccgcatgctcagttggcgagcttgtcgacgtgaagcagggcgttggtccagatcgcctcgagctgccgtgccgcctcgtcggcatcgcgctcgagcagcgcgccgagcaccgcctcgatgtcgtcgacgagcagccccttgtgcgacaggcgcacggacttggtccacaggtactcgctctccgatttgaacgagtggtacacgagcggcaggatcatgttgccagaaatcacggtgacctcgtggtagaaggcgtaggcggcctccgcctcctgctcgggcgtggtggtggcgcgcgcctcggcggcgagctgccgcaggcgcgcgaggtcgtcttgcgtcgcgcgctcgaccacgagacgcgcggccaggcggtcgagcgagtcgcgcacctcgaacagcgactgcacctcttccttgcgcatgcgcccgccgttgtagcgcatgatggcgtcgagtgtctcgatggtgcccttgcgtcggtaatcggtgacgaagacgccgcggcgcgggcgtatcttgacgaagcccatctgctcgagctgggcgagtcccgcggtgacgacgggacggctcacgcccatcatctcgcacagcgaacggctggaggggagctgctctcccgtcctgagctcgccggaaaggatcatcccctcgagctgctcgacgaacatctcggtgagcgaaggcgagctgatcttgtggaatgccatggagaccacttcctctggaatgtggtaataccaaaaacactagttttatcgctgtctattataatagttcgaacggtgataattacaagtctgaacttctctgtagaccttgttacgatactggtattaccagatggggattctggtcagacaaggttgaggaggaactcatggttgacaagaacgaacgcatcgcgatcatcggcggcggccctgcaggtctttctgccggcatgtacctcgagaaggccgggttcgagaactacgtcatcttcgagcgcaacggctgggtgggcggcaagtgccattcgcccaactacaaggggcgccgctacgagatgggcgccatcatgggcgttccctcgtactacgccgtccacgacgtcgaggagttctgcggcgtgacgcacgagggcggccccaagctcaaccgcaactacaaggaccttcaaggcaacgtcatagaccccttcgacgcaagcgaccctgcgcgcgtggagctcgtgggcgagatgcgcaaccaggtcaagaagttcggcgagctgctcgccaccaagtacaagggctatgacgtcaacggccaccgcggcgtggcgcagggccgctacgacggcgacgcggtcaccccgcagcgcgagcacatcgagggcgagaacgagaacctcaaggacctcgcgcttcccttcaaggagttctgcgagaaaaacggcgtgccgctggtccagcagatctggatcgggccgttcacgagcttcggctacggctacttcgacgagattcccgcggcatacgtgctcaagtacctcgacttccagaccacgatgaacttcgtcaaggtcaacctgtggacctggaaggaaggcacgcagtccatctgggagacgctcaacgccgccctcaagcacccggcgctgctcaattccaacatcacggacgtcacgcgtgccgacggcaaggtcaccatcacggtcaacggccgcgtcgaggtgttcgacaagctcatcgtgaccgcgccgctgcagttcttcggccagtacgccgacatccgcgacgatgagaaggcgcatttcgacaagatcgagttcgagcgctacgacacgcaggctttcctcaccaagcccgaggatgcgccggagatctcgtactacatcatggagaacatggtgcccgagcgccttggccatctgatggtctactaccgccgttgggcagacaccatcgaccaaccgtacgtgacctacacgctgcgcaagcacgctggcggcgaggagctcggctacgaggaaaccaagaagcaggtactcgacgaccttgccgtcatgggcaacccggccgaaaaggtcatcgacgagggcaagtggtactacttcccgcacgtgctcaccgacgattacgcggcgggctggtacgacgaggtcgaggccatgcagggcaagtacgacacgtactacgccggcgaggtcatgagcttcggcgacatggacgagacggccgagtacagccgagctggtcgagcgcttcttcgccgagtagggcatgcgccatgcgtccgccgagaaagtacgccggtttttccgagcttgtcgaggcgggggcgcgcgagcgcgggtgccaggtggcgttcgtgcacgagcgggcgggcagggtcgaaggcgtcacgtggaacgactttgccgcccgcgtgcaggcgcgcgcagctgagctgagaggcgatgcgcgcgcctgcgaggcggtgtttgccgatggctcgcttgcatccatcgtcgagg

SEQ ID NO: 1458 - DNA, 1843 bp, Unknown
  16S sequences of unknown bacteria
ggtttgtgccgtatttctttgcgcattacttgactttgccggacatcgctgccatagagcccgttctgcaggatataggagagcaccttgggatcgagccccagttcccggctgtcccggcagccggcggcaatgcgcttccggatctcggtggaggaacagtcaaagggttccttgtggatgatccgtgcctttccgcccgcggcccggatgcgttccgcctgggcttccagcatctcggcggtatccccgccccgctccatggtgcagatctccgccagcttcaccagttccgcgccccgatgccagtccagcacggtgcaaaacatatcgctgccggtgagcagatagaactccccgtccggatagagctgccgcagctcttccagggtatccaccgtatagctcttgccgccccggcggatctcgatgtccgaaacctcaaaccccgcaaatccttccgaagccagctctgccatgcggcagcggtgttcaccgtccggcagatggtcggtgtgcttgtggggcggctgataggtggggatcaggagcatcttttccagccccagctcctgctgataggtctttgccaggcgcaggtgcccgtcatggatggggctgaaggtcccccccagaatgccgatcttcactgtccattcctcctccggcttgtatgtccgtcactcagcggacatcgtcctttttcagactgatcttcgggttcttcaggttccggcggaacagtacgaaccgcatgccgatcacctgtaccacctcactgccggtggcctctgccagctgggcagcgatctccccggcaaagcccggagcggtttccagcaccttgcccttgatgagttcccgggcggtgagtgcatcgtccacctgcttgatgagattctccgaaattccctctttgcccacctgcagaatggtctcggcactgtttgccagactgcgcagataggctctctgcttgcttgtcagcatctgttattctcctttttcactggggtttgtcacccggatctcgccgctttccacccggcgtccgatctcctctgccatctgccggagcgctttgccccggtggctgatccggtccttttcctcgtcactgtattcggcaaagctgcgctcgccgatataaaagatcgggtcatagccgaacccgttctgtcctctggtttcatatcccaccatgccggggcagtcggcatggaaggcatattcccgaccgtctgccagcacaaagtgaatggcgcactcataccgggcgccccgctgttccggcggtgtatcccgcagttcggagagcagcagtttgatcttctcgggatggggcaggtcctccccgccgtaccgggctgaatagactcccgggcgtccgcccagggcatccacacagatgcctgagtcatcggcgatcactgcttctccggtgtgctgatgcacggtcatggccttgatgcgggcattctccgcaaaggtggtgccgtcctcgacgatgggcacatcaatgccctcttccttcatgctggtcacctggaagcccagcggctccaggatgcgcctaaactcccgcattttgccggcattgccggtggctacgatcactttcatgtccgttttctctcccttgtattacagctcctgtccctcaaacagcgcggcggaaaattccgccggcacaaagggacgcagatcgtcaatgccttcgcctacaccgatgaacttcaccggcacgcccagccgggcggaaatattgatggcaatgccgcccttggcggtgccgtccagcttggtgagcaccagcccggtgagggtcgccgcctgattgaac

SEQ ID NO: 1459 - DNA, 5241 bp, Unknown
  16S sequences of unknown bacteria
agcctgtactgccggggagcgaatggaaaactgatgtgtccggtaactgcgtgttctgtgaacaccatgttacttaattatgtaattcatacccgaactctctgttgacagccttcttctgcaggcttcaataacccacgctgaaaagtttcctgaacctttcagatcaagagcgatgttaatttgttcaatcatctggtttggaaatcggatgttgcgggttgttgttctgcgggttctgttctttgatgacataatgtttccccatattcagtgttgctgatttgtattatctgaagttgcttttacgttaatttgatgcagatcaattaatacgatacctgcgtcataattgattatttctcgtggtttgatggcgtacacacatgttgtgataaaccttatatagatgataatcattatcattttcgtgggtcctttccggcgatccgaccggttacggggcggcgacctcgcggtttttcactatttatgaaaatttttcagggaaaatcgtgtcggtacttctcgaatataactttttgttttttttaatattgcattcataaatgtccgacatgaaagtgtccgaaaatgcctttttctggcgttttcatgtcgggccttgtatttgataatgggttgttctatgaaggttaataaaaagaggcttgccgaaatttttaacgtggacccgcggacgattgaacgctggcagtctcagggactcccttgcgcctccaaaggtagtaagggcattgaatctgtatttgatactgccatggcaattcagtggtatgcgcagagggaaactgatatcgaaaacgaaaagctccgcaaagaactggccgatttgcgtgcggcagcggagtcagatttacaacccggcaccattgactatgaacgctaccggctcacaaaagcgcaggcagatgcgcaggaactgaaaaatgcccgtgaagacggagtggtgctggaaactgaactgtttaccttcattctgcaacgtgtggcacaggagatttcggggatacttgtgcgtgtgccgttgacattacagcgtaaatatccggacatttcaccatcacaccttgatgtggtgaaaactgaaatcgcgaaagcctccaatgttgcagctaaggccggtgaaaacgtgggcgggtggatcgatgatttcagacgcgcagaaggcagctaatgcagccggtgcgatagctacagggcttttatctctcattattcctgttccactgacgacagttcagtgggccaataaacattattaccttcctaaagagtcgtcttataccccggggcgatgggaaacactgccgtttcaggttggcatcatgaactgtatgggcaacgatctgattcgcacggttaacctgattaaatctgcccgtgttggttatacaaagatgttgctgggagtggaggcttattttattgagcataaatcacgcaacagccttctttttcagcccacggactcagctgctgaagattttatgaaatctcatgttgagccaacgataagggatgttcctgcattgctggagctggctccatggttcggaagaaaacaccgcgataatacgctcaccctgaagcgtttttcctccggtgtgggtttctggtgtctgggtggtgcggcagcaaaaaactaccgtgaaaaatccgtggatgtggtctgttatgacgagctttcctcgttcgaaccggatgttgaaaaagagggttcgccaaccctgctgggggataaacgtattgagggctctgtatggccaaaatccattcgcggctcgacgcctaaaatcaaaggctcctgccagatcgaaaaagccgctaacgagtcggcacacttcatgcgtttttatgtgccctgtccgcactgtggggaggagcagtatctgaaatttggcgatgatgcctcgcctttcggtcttaagtgggagaagaataagccagaaagtgttttctacctttgtgagcatcatggctgtgtgatccatcagtctgagcttgaccagagtaacgggcggtggatctgtgaaaacacgggcatgtggacccgtgacggcctgatgtttttcagcgcccggggtgatgaaattccgccgccgcgctccatcactttccatatctggacggcgtacagtccgttcaccacctgggtacagattgtctatgactggctggatgcactgaaagatcccaacggcctgaaaacctttgtgaacaccacgctgggcgagacctgggaagaggctgtgggcgaaaaactcgatcaccaggtgctgatggataaggttgtgcgttacacggctgcggtgccttcccgggtggtttatctgacggcgggcattgactcgcagcgaaaccgttttgagatgtatgtctggggatgggctccgggagaggaagcctttctggtggataaaatcatcattatggggcgtcccgatgaggaagagacgctgttacgtgtggatgcggcgatcaacaaaaaataccgccatgcagacggaaccgaaatgaccatttcccgtgtctgctgggacaccggggggatcgatggcgaaatcgtttatcagaggtcaaaaaaacacggtgttttccgggtgctgccggtaaaaggcgcatctgtctatggcaagccggtgatcaccatgccaaaaacccgcaatcagcggggcgtgtatctgtgcgaagtggggacggacaccgcaaaagaaattctctatgcccgtatgaaagccgatcccacgcctgtggatgaagccacgtcgtatgctatccgttttcctgatgatccggagattttttcgcagacagaggcgcagcaactggtcgcggaagagcttgtggagaagtgggaaaaaggaaagatgcgtctgctgtgggataacaaaaagcggcgtaacgaagcgctggactgcctggtgtatgcctacgcggcattacgtgtgtccgtgcaacgctggcagcttgatctggctgtactggcaaaatcccgggaagaagagacgacccggccaacccttaaagaactggcagcgaagctgtccggaggagtgaatggttacagtcgctgaactgcaggcgctgcgtcaggcgcgccttgatttattaaccggtaaacgggtggtgtctgtccagaaagatggtcgcagaattgaatatacggcggcttctctggatgagcttaaccgggcgatcaatgatgcggagtcggtactggggacaacccggtgtcgccgtcgtccgctgggagtgaggttatgaaacgaacgcctgtcctgattgatgtgaacggcgttccgcttcgtgagagtctcagctacaacgggggcggtgcaggatttggcgggcaaatggctgagtggttgccaccggcgcagagtgccgatgcggccctgctgcccgcgttgcgtctggggaatgcccgggcagatgatctggtgcgcaataacggaatagcggctaatgcggtggctctgcataaggatcacattgtcgggcatatgtttctgatcagctaccgtccgaactggcgctggctggggatgcgggagaccgcagcaaaaagctttgtcgatgaggtggaggcggcctggtcggaatacgccgaagggatgtttggcgagatcgacgtggaaggaaaacgcacgttcacggaatttatccgtgaaggtgtgggcgttcatgcgtttaacggcgaaatctttgtgcagccggtctgggatacggaaaccacgcagttattccgtacgcgttttaaagccgtgagtccgaaacgggtggacacgcctggacacggtatggggaaccgttttctgcgggccggtgtggaggtcgatcgatatggccgtgccgtcgcgtaccatatctgtgaggatgattttccgttctctggtagtggacgatgggaacggatcccgcgtgaacttcccaccgggcgtccggccatgctgcatattttcgagccggtggaggacgggcagacccgtggggctaatcagttttacagcgtcatggaacggctgaagatgctcgattccctgcaggcaacacagcttcagtcggccatagtgaaggcgatgtatgcagcgacgattgaaagtgaacttgataccgaaaaggcctttgaatatatcgccggcgcgccacaggagcagaaggataatccgcttattaatattctggagaagttttccagctggtatgacacgaataacgtgacactgggcggtgtcaaaattccgcaccttttccctggtgatgatctgaaactacagactgcgcaggattcagacaatggattttctgcgcttgaacaggcgctgctgcggtatatcgccgccggtcttggcgtttcctacgaacagttgtcccgtgattactcgaaggtcagttactcaagtgcccgcgcctccgccaatgagtcgtggcgctattttatggggcggcgaaaatttattgcggcccggctggccacgcagatgttttcctgctggctggaagaggcacttcttcgggggattattcgtccgccacgggcacgttttgatttttatcaggcgcgatcagcctggtcacgggcagagtggattggtgccggaagaatggccattgacgggctcaaggaagtccaggaatcagtgatgcgcattgaggccggactgagcacgtatgagaaagagctggcgctgatgggcgaggattatcaggacattttccgccagcaggtcagggaatctgctgagcggcaaaaagccggactctcacgtccggtgtggatagagcaggcgtatcagcagcagatagcggagagtcgcaggccggaagaggagacaacaccacgtgagacgtaatctttcacacattattgccgcagcattcaatgaaccgctgcttctggagcccgcctatgcgcgggttttcttttgcgcgctcgggcgcgagatgggggcagcaagtctttcggtaccacaacagcaggtacagtttgatgctcccggaatgctggctgaaacggacgagtacatggccggaggtaaacgaccggcccgtgtttaccgggtggtgaacggtattgctgtactgccggtgaccggcacgctggtgcaccggctgggtggtatgcggccattttccggaatgacaggctatgacggcattgtcgcctgtcttcagcaggcaatggcggatagccaggtgcggggcgtactgctggac

SEQ ID NO: 1460 - DNA, 32759 bp, Unknown
  16S sequences of unknown bacteria
gcccaagcgcacggagcgcgccgtgcgggagctgatcgcgcactttggcgcgccaaggcccgagacgcccgcccaggcgcggcgcctgctccgggagatcgggccggagcgcgcggcggagctggcgcgcctgcgcgcctggccgcccggggcgctggaggaagccctcgcccgcggggatgcctacagcatcccgcagctggccataacgggcgcggacctcgccgacgcgggcatccccgcgggcccgggcgtgggccgcctgctgcgcgccctgctggacggggtcgtcgagggcgaaatcgaaaacgagcgcgcggcgctcctttgcgccgcacagcgctggaatctacaagaggaggaatcctgcagatgaaccaaggcgtagaaatcctgcgcgcgctggcggcgcgcgctgcggagtgcgcggccgacccggtcaacgccgagcgcgccaagctctaccgcgcggtcaacgaccggcacatggtccgccccgtggtcctgctcgaggagatcccctggaacgaactcgccaaggaagaggcgctgcgcgcccgctgcacggaccccgacttcgccgcgctggagacctacctgcggcgggagatctacctctgggagcacgcgcaggcggaccgcatcttccggccctacctgcccgtgcccaaggcggtggagatcacctccgtgggcctgaacgtccgcgaggaggagcgcggcaaggagagcggcggcatctactcccaccgctacgagaaccagctgaaggacgacggggacctggcaaagctgcgcgatcccgaggtgaaatacgaccacgcggagacgatgcgccgcttctccaaggcggccgaggccgtgggggacatcctgccggtcaagctcatgggcctggagacgggctatggcctggggcttaagacctgggacgacgtggtgatgctcatgggcccggagcagctcttctacgagctgtgcgaccggccggagttcctgcaccgcatcgcccgcaggttctgcgacatcttcgtgcgcctgatgcagaaggtcgagcagatgggcctgctggaggcggaccagctgctgatccacagcacgcccgccctctcggacgaccttgcggccggggaggacaggagccgcgtgaccctcgaccactgctggggccggggccttgcgcagatcttcgcctccgtctccaaggacatgcgcgaggagttcgacatcgaataccagatcgaggcgatgaagccctttggcatggtctactacggctgctgcgagccgctgcacgaccagatcgacatcctctcgcgcatcccgaacctgcgcaaggtctccatcaccccgtgggcggacgtggacgccgcggccgaggccatgggcagccgctacgtcatggcctggaagcccaaccccgcgttcctgctgcgcgtttcggagaacgagggcgccatccgcgcggagatccggcgcgcgctggcggcggcaaagcgcagcggcacctccatggacatcgtcttaaaggatatctccagcgtttccggcaaccccgaaaacctgaccgcctgggagcgcatcgccatggaggaggtcctcgcctggtgaccgggcgggaaaaccccctgtacaaacgccggcccgccgcctataatagaaggcggcggacccaacgacaaagggagaggttcaagcgatgaaagacgaaagattcacaaaactctatgaaatggccaaaaaggaagtcctggaggacatcctgcccttctggatgcgctacgacgtcgacgaggagaacggcggcttctacggcgtggtgacccgcgagggcaagcccgtcaaggaggggaccaagtgcctggtgctcaacgcgcgcctggtgtggacctttgcctccgcctaccgcatcttccgggacgagaagtatctgcagctcgcccgccgcgcctacgactacttctgcgagtatttcctcgacaaggagtacggcggctgctacttcatgctcgactgcaaaggcaaccccgtggacgacaagaagttcgtctacggccaggcgtttgccatctacgccctgagcgaatactgccgcgccacgggcgacacgaccgcgcgcgaccgcgccgtcgccatccgcgacctgctcgaggcgcacgcctacgacgcggagcacgacggctacgtcgagatcctgacccgcgactggacctacaaccccaagggccagggctccaacatcaaccccgagggcgagtccacccggaccatgaacacccacctgcacttgatcgaggcctataccggcctgctgcgcgtgctgcgcaccgaggagcagatcaacctgacccgccggcacctggccatcatgctcgacaaggtctacgacgcggacatccaccacttcaagatgttcttccgcgacgactggagcgccacctccccggagatctcctacggccacgacatcgagggcacctggctgatgatggagaccgccgaggtcctgggcgacaaggccgccggggagaaggccgcgccccgctgcctggccatggccaaggcgtgcctggagcaggcgatcctgcccgacggctccatgctctacgagtacaaccccgtcacccgccacctcaacacgaaccgctcctggtgggtgcaggccgagaccgtcgtcggcttcctcaacgcctggcagatgagcggcgagggcgcgttcctggacgcctcgctcaactgctttgagtacatcgaccgcttcgtcgtggaccacgagtacggcgagtggttcaccatgctcggcaacagcggcgaggtcctctccggctacgagagcaagatcgacggctggaagtgcccctaccacaacgcgcgcatgtgctttgagatcctcgagcgctacgagaagtaaagaagaaagttcagacgaccttcctgcgcatcccccggcgcggcgcgccgggggatgcgcgcaaaaaacggagagccgccatgcgcatcgattggaatgcggagcgggaactcctcgttcccaacctcaacggcggccgcggccaggtcgcggcgcgcctttgcccgctggactgcggcaaggcgctctggagccgcctgcccgccggcgcctccatcggagagcaccggcacgagacgagcacggacgtaaacttcgtgctcgccggccgcggccgcgccgtgacggacggcgtcccggagcctctcgcccccggcgtctgccacgtctgcaaaaagggctccacccacgccatcgaaaacaccggggaagaggacctcgtgctgctcacggtcgtctgcgaacacggaaaggaagactggggaaaggatgcgacgaatgaagaagagaatcgtctgcctggtgctggccctgctgctgctgggcacgctcacgggctgcgcgctgtttcagaccaccgtcgaggacatggacgaggcggacgccgcgccctattacagcatgggcgagggctttttgaccgcgctgtttgccggggactacgccgcctgctccgcgctgtgcagcgaggacctgcgcaaccagatgagcgagagcgatttgcagagcgcctgggagaacatgcgcctgacctacggcgatcccgtgtccgtcgcggggcagaagccctactggatcaacggcgaggggacggtcgtctaccaggtggcctgcgcgcacggcgggtgcagcatccagctcacctacgacgcggacaacaacgtcgcgggcctctggttcggcctgccggaggaggactttccctatgaggtcgccgtgccggagggcgtgacggagatcgagatcaccctcggcgagggaacggacacgcccctgaaggccctcgtcaccctgcccgcggacgcggaggggccggtgcccggcgtcgtgctcgtccacggctcgggcgcgaacgaccgcaacgaggccatcggcggctgctatccctttgcggacctggcccacggcctggcgcagcggggcatcgcctccatccgctacgacaagcgcacctatacctacggcaactcctacaccgaggaggaggtcaacgccatgaccgcgcgcgaggaggtgctcgacgacgcgcagctggccatcgaggccctggccgcgcagccgggcgtggacgcggagagcatcgtggtcgtgggccactccctgggcggcatgctcgccccgcgcatcgcccaggagagcgggggcaaggtcgcgggcatcgtctcgctggccggcacggcccgcgggtacctggacgtcgtctacgaccagaacatggacgtggcccaggacgactcccagcgcaataccatcaagcgcgagtaccgcaaggccgaaaacctctcagagctcgacgcggacgacacggtcttcggcatccccgcgccgtacctgcaggacctctacagccacccggtcgaggagtcgctggcggccctgtccatcccgatcctcgtgctgcagggggagaacgacttccagatgcacacggaggacttccgctcctgggaggaggcgctcgccggctacgccggcccctgggaggccgagatgctggagaacctcaaccacctcttcgtcgacgacagcgcccttgcaaaccgcggcagcctggccgaatacctggaggaggggcacgtcgacccgggcgtcctcgaccgcatcgccgcctggatcggggaaagcgtggcctaggcgccgcgcaccggaaagttgtgctgccgcaagattccgggcggtttgtttcatatggagaaactttggaccgaattgtgaaaacactattgcaacattccggaaaaccgtgtatcatagagcctgtaaagaccggttacgcgcctgcggcccggccggtaaacacagagaatttcagggaggaagaaaaatggccgagaattacgaacagactcttgcccatgtcaacaccaactccaagcccacggatctgaagatcacggacatgcggtttgttgacatcgttggcgctcccatgcactgcacgctcctgcgcatcgagaccaaccagggcattaccggctacggcgaagtccgcgacggcgcgtccaagctctacgcgcagatgctcaagcgtttcctcattggcgaaaacccctgcaacatcgacaagatcttccgccgcatcaagcagttcggcggccagagccgtcaggcgggcggcgtctgcggcgtggagctcgcgctgtgggacatcgccggcaaggcctacggcatcccggtctaccagatgctcggcggcaagttccgcgataaggtccgcatgtactgcgacaccgacgtcgacggcaaggacaccggcctcaacatgggcgacgccctcaagaagcgcgtcgagaagcacggctacacgatgctcaagatggaccttggcatcaaccagctgtgggacgtcgaaggcggcctgtgcgcgcccgtcggcttcctcgagcagtacggctacaccgccaagatggcgcgcgaggccaaggcccgcggcgacaaggcggccgcccgttggtgggccaaccgcaactacgatgtgaacaacatcgcccaccccttcaccggcatccacatcaccaagaagggctttgactacctggagaactacgtcaaggaagtccgctccgtcatcggctacgagatcccgctgtccatcgaccacttcggccacatcggcgtggaggactgcatcaagctggccaaccgcctggagaactacaacatgtgctggctcgaggacatgatcccctggcagctgacggagcagtacgtccgcctgcacaacgcctccaccaccccgatcgccacgggcgaagacatctacctgctggagaacttcaagcccctgctggacaaccgcgcggtctccatcatccacccggacatcctgtcctccggcggcatctacgagaccaagaagatcggcgactacgctgaggagtgcggcgtggcgatggctctgcacatggcggagacccccgttgcgtgcctggcggcggtgcacgtcgctgcggcgaccaacaacttcctcggcctggaattccactccaacgacgtggattggtggagcgacatggtcaaggacaccgagaagcccaagatcgtcgacggcttcatggcggttcccgagaagcccggcatcggcatcgacgagctggacgacgaggtcctggccgagcacatccaccccgaaatccccggcctgtgggagagcacggacgagtggaacgactggatctctcacgatcgcctctggtcttaaaaaaacagacaaaacccgcaaaaagggcgccgtttcggagcccttttttcatgcttccgccgcaaaaattctccgccgcagggcaaaaacttttccgcggccttattgcaatttccagggaaatgtggcataataagccttgggtatgaacctatagaaacaaaagtttggggggaactcacatgcgtttcagcggtaagaccgtatatgtgacgcaggccgacacggctcagggcgaagcgcttgctctgcgctttgcaaaggagggcgcaaacctcgttctgggcttcggcaaggaagacttggtcaaaaaggttgaggaccttggcgcaaaggccatggtcgtgcagcccgatatgctcacctacgagggcgccgaggccctggtcgaagaggtcaagaagaccttcggccgcatcgacgcgctgatcttcaacaacaacaacgtcgtcaagaccgaccttgagcacctcacgcgcgaggtcttcgagagccagctgaacgacaacgccaaggcggccttcgtgctcgcgcgcgtcatcggcctgcacatggccgagtaccacagcggcaagatcgtcttcgtgtcctccatccactgcgacaagcccacgggctcggcggtgatgtactccatctccaagggctgcatcaacatgctctgcaaggagtgcgcgctcttcttcggccgccgcggcatccagaccaacctcatcgaggccggcgccgtcgagggcgacgacgagaagtttgaaagcacgttctcccccctgtacgccatgggctacatggaggagcgcatcccccgccgcaaggccggcacccccgaggagatcgctgcggtcgcggcgttcctcgcttcggacgatgccagcttcgtcaatggcgccagcgtgcgcgcggacggcggcttcgagctgttctacggcttcaaagcgtaaaggggaggcggaaataccatgaaagcaccgtttgatctgaccggaaaggtctttatcgtcaccggcagcggcaagggcatcggcaagggcatcgtccgctgctttgtcaaggccggcgccaagtgcaccatcaactgcaacagcaacctcgccatggccgaggaaaccctcaaggagatccaggccatcggcggcgaggactgcgccttcctctaccaggcggacgtgtccgactacgcccaggccgaggccatggccaaggccacttatgaccacttcggccgcatcgacggcctggtcaacaacgccgccctgcagaagcagtggatgctcgacgaataccccatcaaggactacgacctgctcatgcacgtcaacctgggcggatacatcaacatgatgcgcgcggtcttgccctacctgaaggagacccgcggctccatcacctgcatctcctccgtgcacggcaagcgccccacggactttgacccggtctacgccatgaccaagggcggcatgcacatgctcctgcgcgaggccgccatcgagttcgccaagtacggcgtgcgcgtgaacatgatcatgcccgcgggcgtcaagatcgagttcaagaccggcaacccgcgccccttccagaagccgcgcctcacgcccccgcgcgagtactatgagaagtatcccatgtacccgctgggccgccacggcctgccggaggactccggctgggcgtgcgtgtacctcgcctcccaggaggcggagcacatctccggcgcctgcctgcgcgcggacggctgctccatgctgctgtaaaaaaacaacacataaaaaagggaatttctccgcaagcggggaattccctttttgcatagcaaaattagaggagtggagagagatgttccaatacccccaccaccgcgataccctgcagctctacctcgaccgcgcaaaggcggaccccgagatcctctgcatcgccctgggcgggtccgtggcgcggggcagcgcccggccggattcggacgtcgacctgctcatctgcgtctccgacgcgcgctgcaaggcgctggaggccgaaaaccgcctctgcgagaccatcgtggaggagcgcttctacaagggcggctactacgacatcaagtacttcgcaaaggactacctcgccgcctgcgcgcgcaagggcagcgagcccgcgcgcaacgcctgggccggcgcgcgcgtggtctactgcgcggacgcggagatcccggacctcgtcgcgcgcatccccgtcttccagaaggccgagaaggaggagaagatgctctcctttgccgcgctcttcgaggtctcccacgtctacttctggaactgctgcgtgtccgggcaggacgcgccctacctcaagatcaagaccgcggcggacctcgcgctcagcggcctgcgcctcttcctgcaggagcgggaggtgctcttcccctgccagcgcaagctcctgagcgcggtccgcgcgcagccgggcggcgcgcccctggccgacgcggcggaggccttcctgcgccggctcgacgacgagagcgagcgcgccttctacgcggccgtctggcagagcgtgacctggaccccgccggaggactacaacaagctcctggcccgcgacgtcgaggacaacgagctctggtggtacaaggaccggcccaacctcatcgagtggtagagaaagcagcggaccccgccctgcggcaggatccgctgcttcgcggcaaaaggggagagggcgcgcctcagtcgtccgtcagccccaggtcccgctcgagcgccaggacgaagtccatgtgcagccgctgcttttccgcccagaaggcgcggcccctctccgtcaccagggggttgcgctccgggcggcggtagagcttgcgcatcttcagccgctcgagcgtcccctcgtaggtctgcagcggctttgcgccctcggccatggcgtcccagaggatgcccagcgccccgcgctcgtcgagcatgtccgcctccatgaggatgacgagctcgatgggcgtgtccgggtcctgcatccgctcgcgcgcctggtgctgcacgacgagcgaggccacccggtccgcaaaggcgggcgcgtacccgttttgcaggagatagtcccgcgcgatgggcccgccgagcaggtcgtggtccgccttgggcttctcccgcgtggtggcaatgacgccgatgtcgtgaaagagcgtggaaacgagggtcagctccgcgtccgcctccggccggcaggggaggatgcgcttggcccagcagtagcagcggtacatgtggctcggccggtcccgaaagggataggggtccagaaagtcctgcacgccgctccggtcgaccatggagcggatgtcctggagcatctgtgcatgcgcggggttcatcataagcgacgccctcccatctctctgcaatttttaccagtatagcagatgcgcggcccaaaatccaataaaaagaagaaaaacgaaaaaagaattttccgcacggcgcaaagccttgcggaaaaccgattgcaatcggacaacttttcgaaaaaaatgggctagaagatgttcccaggggagggaacctctttttgcagcaccgcctccaccgcggccggcaggcgcgagcaggccagcgccgccgccgttgtgtcctccagctccagcgcctcctgcgcctcgcgcagcgcggcggtgatctcctcgatgtcctcgtggatcgcgatgaactgccaggcgcgctccgtgcgcgcccagcgcgcggcaaaggcgtccaggtgcgcccttgccgcctccgcgtcgccggggagggccgcagccgcggcctcggcctcctgcagcagcgcctgcgcgctgcggttcaggcccagcacgcacagcatccccgcgcccagcagcacgagggcgaggacgatcaggatgaggtttacgcgcattgccgcgcctcctttctcaccagttcacctgcccgggctggagcgagcgcgcaaagtgcagccgcccctcgcccttcttctgcacgcagagcacgccgtccgtgcccagcaggcaaaggtaggtgccgggaacgtccacggagaaccgggacagctccgattgcagccactttgccgagcggcgcgccgcgcgcaggctgtcctcctgcaccttgccgtccagcaccagcggcaggggcaggttttcgtacccggggcgcaggttcaggtccccgggcgtcaccgcgcgcttttcggagagggggaagacgttcaccttcccggagatctccaggaccgcgcagcccacgtccgagaggttcgccacgccgcactcgcgcatctgctccatgagctcggtcagcgtcatgccctggcggcgcatctcgtcctcgtcgacgacgccctgctgcaccagcaccgcgggcttgccggagagcagctcccgcgcccgctcgctcttgagcgtcacgagcgagaacagcgcgtagcagagcatcagcgcggcgatgggcatcacgccgtagagcagggggatgcccacgtccgacatgggcgaggccgcaaggtccgcgacgatcaccgaaaacaccagctcaaacggctgcagctggccgatctgccgcttccccatcaggcgcatgagcaggatcaccagcacatagagcacaaacgcccgcacgaacatcgtcagcatggttccgcctccctttcttaaagagaagtttgcgctgcagggccggaattgattcgcaaaagaggtttacaaagcccggcaaatgtgctagattagaaaaggtgcggaccgaaaaccggcccggagtttttatcggaaaagtagagggaagattcgatgagaaaaagagagatcgcagcggtcaacggcatcacggagggcgtgatctggaagcagctcctgtacttcttctttcccattctgctgggcaccttcttccagcagatgtacaacacggtggacgccgtggtcgtgggccaatacgtcggcacggaagccctggccgccgtgggcggcacggcgggcacgctgatcaacctgctggtcggcttcttcgtgggcctgtcctcgggcgccacggtcatcatcgcgcagttctggggcagcggcgacaaggaccgcgtgagcaagaccgtgcacacgggcatcgccatgtccatcgccggcggcgcgatcctgatggtgatcggcgtcgtctttgcgccgacgatcctcggctggatgaacacgccggaggacgtcatcgacctttccgccatctacgtgcgcatctactgctcgggcatgatcccctcgctgatctacaacgtgggttcttcgatcctgcgcgcggtgggcgacgccaagcggccgctgtacttcctgatcgtctgctgcctggcgaacatcgtgctggacctgttcttcgtgctcgtgctggacatgggcgttgcgggcgtgggcatcgcgacggtgctgtcgcaggtcatcagcgccgtgctcgtcatcgtgacgctgttgcggtcggagactgccatccgcctcttccccaagaagatcgccatcaccggctggctgctgaaggacatcgtccgcatcggcctgcccgcgggcttccagtccgtgctctactccctttccaacatcgtggtgcagacggccgtcaacgcctttggcacgacggtgatcgcggcctacacggcctatggcaagatggacggcctgttctggatgatcatcggcgccttcggcgtctcgatcacgacgtttgtcggccagaacttcggcgcgcagaagtttgaccgcatgcaccgcagcgtgcgcgtctgccttgcgatggccttcatcgccacgatcctgctggaagtgatcttccttgcgggcggggagttcatcctgggcctgttctcccgcgacccggccgtcatcgccgagggcgtggacatcacctggcacatcgcgccgaccttcgtgctctacgtgtgcatcgagatcctctccggcgcgctgcgcggcacgggcgacagcctcgtgcccatgatcatgacctgcgtgggcgtctgcctgctgcgcgtggtctggatcctggcggtggcgccgcacttcaacaccgtcgcctggacgctgtactcctatcccgtctcctggggcgtgacgtcggtcctcttcatcgcctactacctccagggcggctggctcaagcggcgcaagaaggccatgggctttgccgtggaataaacttcccatttctctaaaaaaggccttgacaaacccgagcggaaatgctatcattatacacgttcccgggaacgggatcgtgttcggttcgttggctcagttggtagagcacatcgttcacatcgatggggtcactggttcgagtccagtacggaccaccacaaacaccaagtatagcagaatctttgcaagaagagctgtacttggtgtttttctttttccaaacgagaacaggagggaagagcatggacgagcggcggggcgaccacgtcgcggaggcgtgaggtgctttgggcgagaaagcgctccggaatccagaggattccagggcgcttttttggcgcggggccggcggaaccctgtgcgcctggatcgcgcacggggtgcgccctgcgccgccctatcctgtaggggaagagcgagtgggaagggagggcatagcattggaggagatcggggttcttgtcctgcggtgggcggtgcccgcggcgtgcgcggcgctcgcggcctgggcggcggcgcagctccggcgcgcaaaggaggaggaccgcgccgtgcgcctgggcctgcaggcgctgctgcgcgaccggctctactggaactacaaccactaccgggagcgcggggagtatcccatcccggcgcgggagaacgtcgaggagatgttccgctggtacagggcgctgggcggcaacggcacggtcgccaacctcgtgcgcgagctcgacggcctgccgacaaagcggatggagtagggacaagggagggggaagacgatggacggtatgacctgggttctcctggcgattgtggcactcgcggccggggcgatcgcgtttctgcggctcaaggggcatttgacgggcgacgcggcggcgcgggcgatcggcgcggtggtggagctggcgcgcaaggccgaggcgctctggagcgggtaccagggcgccgggccgcagaagcgcgcctgggtgctcgagcagctcgccgcgctcggcggcgcgctcgacgagaccgcggccggcgcgctgatcgacggcgtggtcgcctacctcaacgccacgtcctggaaggcgtaaggggagcgcggcggccgcgcgcgaatcaccccgtttgcggccgccgcatatcctatagaggacacttgtgtccaaaggggaggaaaaaagagatggaatggaaaatggaaaacggccgccccgcccccgccgccgcggtggacgtggccgaggcctcgtccgtgacctaccgcgtgccggtgggcattttgctgggcacggtcgagtgcgagagcgacttccgcctgggcgtcgtgtccagcgcgggcgcggtcggtccctgtcagtttcagcccaagtacgcggaggactactaccgctacgcgggctttcgctttgacttaacgtcttgggagtccatcgccggcatggccgcgatcttcgtcttctatgcgaagctcggcgcggagcgctacggctttgccggcgacgacctctggcgctttgccatgctcgcgcaccgctacgggcagaacagcgagcaggccaagaccctccagcgcaaggggcgcgtggacgacgtcgagcgcatgatgcggcagaacggcctctggtacgacacgcccatcccggaggaggtccccggcgacccggattcgcccgaggagccggaagccccacaggggccggaagctccgcaggagccggaagctccaccggagccggaagaacccgatgcgcccgaggagccggagggcggacggcccgcggcgtgcgtggcgcagggcgcggccctctgggcgatgaccaagctcggcagccgctacagccaggcggaccgcggggccgccgacgcctttgactgctcgagcctggtggcgcgggcgtatgcggcgcagggcgtcagctgggcgctcgtgggcagcgcgatcccgaactcgtcccaggaggtctattcggacgccttcgagctgctctggccggagacgtacgcgcagatcggcaagaccctgggcggcgcgtccgtgctggagcgggcgacgcaggcaggggacctgcagttcctctgcacggacaagagcacaaagcgggccaaccggatcacgcacgtgaccatcgtcgtggacggggaagagatcgtgcacgcgcgctcgaccaggtacggcgtgcgcacagaccccctgacgctctaccgcggcaaggcctgcgcgctcctgcgctacaacccggaggcgccgctgcgcctcgggatgcgcggcctgcgcgtgcaggccctgcagaaggcgctcaacgcccggggcgccaagctcgacgttgacggcatctacggcaggaagacggaggaggccgtcgcccgctacggcgcggcgctctaacccctgcgcgcgggaaggcggccttgacgggccgcctttctctctatataatggggcatgaagaaagaaaaccgcagattgccggaatatggcgtcccccaaatcgcccccttcgcaagagaagaaaggaagtgcgcggacatgaagaagatctccttcccgccgggcaatgcgttctgcccggcatgtttgtacctctacggcacctaccgcgaggacggccagccgaactacgggctcttcacctgggcggcctatgcgtgggacgagggcctgcggttcgtggcctgcatcggcgaggacaagctgacgcgggaccgcatccgcgcgcagggcgtattctcggcctcggtggtgagcgaggcgctcctgcccgcggcggacttctgcgggaaccacgcgggctacgcggtggacaagtcccggcgcatcccctcgggccgcggcgccgtgctccccgtgcccgtgccggaggagagcccctggacgctggagctccaggtggaaaagaccctgcgcctggacgaggcgggaaggagcgagatctacctctgcgcgatccgcagcgtcctgggagacgcggtcctggcggaggaggggcggccctttgccgagcgcgtgcgcgcggcgggtccggtcgtgagcatcgggcagacctacttcgccgcgggggagcgcccgctgggcgcctggggcgactggaaggacaagtgggaatagaaaaaagcgcggcgcgctttccccaaagggaatggggagagcgcgccgcgcgcgtgcggaggggggcaggcttacgccttgccgatggaaccaaagagctccatcttctccttgacggtgtccttgatggcctggaagccgggggccagcagcttgcgggggtcgtagcccttgccctgctcgtccttgccttcctcgatgtacttgcgggtggcggcggcgaaggccagctggcactccgtgttgacgttgaccttggccacgcccagggagatggccttcttgaccatgtccgcggggatgccggtgccgccgtgcagaaccaggggcttgccggagcaggcgttgtggatctgcgagaggacctcgaagttcaggccctgccagttggcggggtacttgccgtggatgttgccgatgcccgcggccagcatcgtgatgcccaggtccgcgatggtcttgcactgaacggggtccgcgagctcgcccgcgccgatgacgccgtcctcctcgccgccgatggagccgacctcggcctccagggacaggcccttctcctcgcagatcttgacgaactcggcggtcttctgcaggttctcctcgatgggggcgtggccgccatcgtactggatggaggagaagcccgcggcgatggccttcttggcgccctcataggtgccgtggtccaggtgcagcgcgacggggacggtgatgttcagctcctcgagcatggccttgaccatcgaggctacggtggtgtagccgcacatgtacttggccgcgccctcgctgacgcccaggatcacgggggactgcagctcctgcgcggtctgcaggatggccttggtccattccaggttgttgatgttgaagtggccgacggcgtatccgcccgcgacagccttgttcagcatttcctttgcagataccagacccatggtaaaaccctccttaatatccttttcagtgttcagtatacaccattttgcggcaaagcggaagccgaatttccaagaaaagcgctcgctcccaagaaaatttacagagcggacaaagagcggcggcaaaaaaaggcccgcccgctcccaaggcgcgggagcgggcgggccaagacgaaagcgatggagacgggaccaaggggttacatcacgtacttggagtccggggcggggcaggcgcgcagctccgcagccttgttctcgtacccggcgcggccgagcagcgcgtaggcggcgttcttgccctcctccacgcccggctggttgaaggcgtccacgttcatcagctcgcccatgtaggcggtctgcatctcgaagaagtacatgagctggcccagggtgtaggcgttgacctcgggcagggtgatggaccaggagggcttggccgccttgagcagcgcgtactccgtggacttgcactccgcctccatgagctcgcccagcgtctttccgcacaggaaggagacgtccttgaactcctcgcatcccacggggatggtgatggagcggcggaagttcttcaccttgaggaaggtgatgaccttgtcgtccgggccctcggtgtagagctggacctggctgtgctggtcggtgacgcccagggacttgaccggggtctgcgcctcgtcgcagggcgtgccgtcgcggtgcacgttcttgcccagggactcggcccacagctgcgcgtaccagtccgccatgaacttcaggctgtccgcatagggcatcatgacgtggatgttgaggcccttctccagcgcggcgtacatggcgccggcggcaaagagcgcggggttcttctggtagccgggcacgcggcagcgcgcgtccatggccgccgcgcccgcgagcagctcctcgatgtcgatgccggaaaccgccgcggccagcaggcccaccgggcacatctccgagaagcggccgcccacgccgtccggcacgacgaacatcttgaggccgtccgcgcggccgatcttgttgaggttgcccttggaggcgtcggtggtcaggatcatgtgctcgccgtaggccttgccgtagcgctgcttgagcaggtcggacacgatcaggtactggctcatggtctcggaggtgttgccggacttggagatgacgttaaagcaggtcttgtccaggtccagcaggttcagcagggagaccatgcgctcggggtcgacgttgtcctcgatgtagatgcgcgggccgttgcggcgcccggccggcagctcgttgtggcgcaggtcgcccatggcctgctgcaccatcgccgggcccagcgcgctgccgccgatgcccagcaccacgaaggcgtcgaacttctcgcgcaccttggcggccgtggccttgatgtcggagatgacctcggcctgattataggggagctcggtccaggccatcatcttgtggatgtcgccgcgggaggcctgcaccgcgctgtgcgcggcggcaaggcggtccgccagctggctgaggtccttgtactcgatgaagtttttcttcagcagccgtcccggcgggtcggacagcttggcgatggaatcctgcaccttgccaagctcgcggccctccagggtgtgggcgagcttgcgcaggtccgagcgcaccgcggcgcgggcgtcggcggcgtagtccgccatcatgtggttgaagtcgaaggccacgcgcatggaggaagcccaagcttcattctggtattctttggtcataagatcagcctcgtttccgtcgttgtaatcctcattcattatagacaactcctgcggaaaattccatcgttttttgggagaaaagtgtgaaaaacgatggaattcactcatttttaacatattcgtgctaaaatagacggcacggggccggaaatgttcgggcagcgaatcgtttttgccccggcagcgtgcaaaaaacaaggcgaaaaccaaagggggaatggcaatgcaggcgaacgaagcggacgccagggggagaagtgcgcgctggcgcccttttcgaaaggccgcgcttcttggaattgcctcgcttgcggcgtggctgctgacgcgccttgcgcagtcgcatccggaggcggtggagcgcgtctattcccgggggatctacccgctgtggggccaggcgctctccacggtcacggggctgctgcccgtgtcgctgagcgaggtgctgctctttgcgttgccggcgctgctcgcgctgggcatcgtgcaggcggcgcggcgcaggatcgcgtggcggcggctcgcggcggggtggctgtgcgtgcccctttgcgggtacctggtcttttccctcggctgggcgctgaattattcgcgcaagccctatgccgaaatagcaggacttcccgtgcaggctgtagaagtcaataccctggagcggctggtcgcgcgcctggcggaccaggccaacgacctgcgcgcggagctcggcgggggcggggaggccttcgccctgtccgtggaccggcgcacggtgctgcgcgagcacgtgaacgaggcctatgccagcgcggcgcaggcctatccctggctcggcgggcactacggcgcgccgaagttcgcgctgctctcgacgccccttgcgtatttgcagatttccgggatcttttcgccctttacgtttgaggcgcacgtcaacgcccacgagtccgacgcgctgcttgcggccaccgccgcgcacgagggcgcgcacctgcgcggctttgcgcgcgaggacgaggcgaacttcatcgcctacgcggtctgcatggagagcccgcgcgcctatgtccgctattcgggcacgctgctggcgctcatctacgcgggcaacgcgctcagcgaggcggaccccgcggcctacgccgcggtctgggagacgtattcgcccgcggtggtcgcggaccttagggcctacaacgccgcctgggagccctacgacggcgaggcggccgaggtgcacgagcagctcaacgacgcctacctcaaggccaacggccagaccgagggcgtgcgctcctatggaagaatggtggacctgctcatcgcgcagatgctgcaggaggaaggggaggaagcacaatgagcgaaatccgggaagaaaaggacaaggggacgcaggagcgggacgcgctgggcgccctgctcgagagccagcggcgccaggaggccctggcccgccgggggctttggcaccagaggatccgcaccgggatcgcggcggttgtggcggttgcgatcctggcccttgcgggcacggcgtcggccacactgcacgacgtgcagatcctcgcgggcaacgcctcctacgccgtgagcgatctgcacgcgacggtccgcgcgctggagctgcaggagacgctcgcgggcatcgacgcgctggtccaggacggctcggacatgatcgagtccagcgccgaggacatcgaggcctcgctgcgcgccatcgccagcctggacgtcgaggggctcaacgagagcatccgcgccctggaggccgtcaccaccgccatgggccggctcttcggctaccagagcgaaaactgagcaaaaacacaagacagaagggggaaattcccaatgacggaggaagaaaagatctttgccgggcagctcttctgccccggacacccggagcttaaggccctgaagctgcgctcgcacaacctgtgcgcgctctacaaccgcctctttgaggacgaggaggaggcgcgcgaggccctgctgaagaagatcgtcggcagcctgggcgagggcgcgcgcatgcagggcccgatcttctttcactacggcagccacacgagcatcggcaaggcgttcttcgccaactacaacctgaccgtgcaggacgacgggcgcgtgaccatcggcgaccactgcgacttcggcccgaacgtcaccatcgtcacccccgtgcaccccatgctgcccagggagcgcgagctcatgcgcgggccggacggcaagcccgtccgcctgtgctacgccaagcccgtgaccatcggcaacaacgtctggctgggggccaacgtcgtcgtctgcgggggcgtgaccatcggcgacggctgcgtcatcggcgcgggctccgtggtcgtaaaggacatcccgcccatgagctttgccgcgggcaacccctgccgcgtgatccgcccgatcacccaggaggactccatggcgaacttcccggagatcgccgcgggcaacaccccgctgtaaaacccgcccccctgcgctttacattttcgccccgggcggctataatgaaagcaatcccgacaaaattcaaccttcggaggaggagactgctgtggagaagattcaggttgccgtcatcggctgcggctccattgcaaactcggcgcacgggccttcctacgccaagattcccgaggcgcacatcgcctactgcgtggacatcatccccgagcgcgcgcagaagttcaaggagaagttcggcgacgaggagaccgtcgccctgaccgactaccgcgagatgctccgcgacccgcgcgtgcaggcggtgtccgtctgcgtgcccaactacctgcacaatcccatctccatcgactgcctgcgcgcgggcaagaacgtgctctgcgaaaagcccgcctccgtccgctacgacctggcgcagcagatggccgacgccgcgcacgagacgggcaggatcctcaacatcggcgtggtcaaccgcttcaacaacgccgtcaacgccctgcgcgacgatgtgctcgcgggcaagctcggcagcgtctaccacgtctactgctccttccgcgcgcaccggtccatcccgggcctgggcggcccgttcacgaccaaggagctggccggcggcggcgtgctgatcgactggggcgtgcactacctcgacctgatcaactacgtgctcgacatccgggaggtcaagaccgtctccggcgcgtgctactccaagctcggcagtcccatgcgggactacgtctacgaggacatgtgggccggtcccccggactacagcggcacctacgacgtcgaggagtacgtcaccggcctcatccgcaccgacggccccaccatcagcctcaacggcgcctgggccgagaacatccaggccgccgagagcacctacatcgacttcctcggcgacaagggcggcgtgcgcctgacctacggcggcggctacaccttctttggcaccagggacggcaagctcatctcggagacccccgagatcgaaaagggcgatatgttcctcagcgagctgcaggcctttgtggactgcgtccgcacgggcgagcacatccgctcctacgtggacaacaacctgatcaccgcccgcatgatgcagggcctgtacgactccgacaaggcgggcaaggaggtgtccttctaaatgaagatcggcatcatcacggacagcttccgcctcggcctgcgcgagagcctcaaaaaggccgcggaccttggcgcagacggcgtgcagatctatgccgtctccggcgagatggcgcccgaggcgctggacgcccaggcgcgccgggacctgaaggcttacatcggcgacctgggcctggaggtctccgccctgtgcggggacatgggcggccacgccttcacccgcgccgaggacaaccccaagaaggtcgagcgctccctgcgcatcatggacctggcgctggacctgggcagctcggtcgtcacgacccacatcggcgtcgtccccgcggaccccgcccacccgcgctacgccgtcatgcaggaggcctgccgcgccatgggcgaatacggcgacaaggtcggctgccgcttcgccatcgagaccggcccggaaaaggccgtgaccctgcgcgcgttcctggacagcctcggctgcaagagcatgtgcgtcaacctcgacccggcaaacctggccatggtcgcgggcgacgaccccgtcgccgcggtcaagaccctggccccctacatcgtccacacccacgccaaggacggcaggatgatcacctaccacgatccggagatcatctacgacttctttgccgacggcggcatcggcgacctgcgcctggaggactgcttccaggagctgccgctcggccagggcgtcgtgccctggggcgagtacctggccgccctgcgcgggatcggctacgacggctacctcaccatcgagcgcgaggtcggccccgatcccgccgcggacatcgccatggccgtgaacttcctcaaggaaaagctcgcgtaaatccctgtgtgaacgcgcgcgcccccaaaaacggcggggcgcgcgtttttttctccttgacaaacatatacccctatgggtataatgacctcgaaaggggagaagagaaaatgaagcgagcgatggaggggctgcagcggctcctggacctgggcgggacgaagaaggacatcgtcctgctggcgctctcggggatcggcctggcgctgagcctgctgggcctgcccctgccgtttgacccggcgtgggcggcgatcgtgctgtgcggcgtgccgatcgtgctggaggccgtcgtcggcctggtcacggcctttgacatcaaggcggacgtgctggtgtccctggcgctgatcgcctcggtctgcatcggggaggacttcgccgcgggcgaggtggccttcatcatgcagctcggcggcctgctggaggacctgacggtcgcgcgggcccgcgcggggatcgagcggctggtcaagctcaccccgcgcacggcgcgcatcgtgcgcgaggggggcgaggaggtcgtccccgccgagcgcgtccaggccggggacgtgctccgcgtgctcccgggcgagaccgtgcccgtggacggcgcaatcctgaccggccagaccagcgtggaccagagcgtgatgaccggcgaatccctgcccgtggacaaggggcccggcgacgaggtcctcagcggcacggtcaaccgcttcggcgccttcaccatgcgcgcctcccaggtcggggaggacagctccctgcagcgcatgatccgcctggtccagtccgcggacgcgggcaaggccaagatcgtgggccttgcggacaggtgggcgacctggatcgtcgtggcggccctggccgcggcggggctgacctgggtctttacgcgcgagatcctgcggtcggtgacgatccttgtcgtcttctgcccgtgcgcgctggtgctggccacgcccaccgccatcatggcggccatcggcaacgcgacgcgccacggcttcctcgtgcgcgagggcgacgcgctggagcgcctggcaactgtgcagcgcgtcgcctttgacaagaccggcacgctcacccacggcacgccggagctgaccgcggtcctgcccgtccccggcgggatggcggaggcggagctgctgcgcctggccgccggggtggaggccctctccgagcacccgctgggcaaggccgtggtgcgcggggccgggcggcgcggccttgccccggccgcggcggaggacttcgccatggagccgggccgcggcgtcttggcgcgcgtcgagggccgggagatcctggccgggaaccccgccctgctcgccgcgcgcggcgtcgaaatccccgcggccctggaggcggctgctgccgcccagcgggagacgggcgcgacgctcatctacgtcgcggccgacggcgccgcggcgggcctgctcgccctggccgacgccctccggccggacagcgcgcagatggtccgcgccgtccgcgaccagggcgtggagcccgtgctcctgaccggcgacaacgaggccgccgcccgcgccatcgccgcgcaggtcggcatctcgctcctgcgcttccagtgcctgccggaggagaagctccgcttcatcggccagagccagggggagggcaagcccatctgcatgatcggcgacggcgtcaacgacgcgccggcgctgaagctggcggacgtgggcctggcgatgggcggcatcggcagcgacatcgccgtggacgccgcggacatcgccctggtcaacgacgacatccgggagctgccgcacctgctggccctctcccggcggatgatgcgcaccatccgcatcaacctcgtcctctccatggcgctgaacttcgcggccatcgccctggccatcacgggcgtgctgaacccggtcgtcggcgcgctggtgcacaacgcggggtcggtgctggtcatcgtgcactccgcgctcctgctgcggtggcgcagggccgcgtgacgaaaacccggtgttgcgttcgcggcggaaagggtgtatactgtgcaaggcggcacgaagccgtccgcgccggcgcaagaagcgtcgggaaccgcatccgacgcggaaggcacaccgtccaacagagttccagacgcaccgtatgctcaggaaggcatgcgcatcccccgaaggggagacgtaggccttctttttttgcgttttcgcgcaaaaccactctgcaaggagaaggagagaacccccatgcacgcaaaacacgcccttgtcttgctcctgacgctcgtcctgctgacggccgccacggcctgcagcgccccggagagcccggccgcttcgcccgcgggcgcgcgggacagcgtcatcatcgccatcggctccgaacccgagacgctcgaccccacccagggctggggccacggcaattcgcccatcgtgcagagcacgctcgtgcgctacaccgcggacctcgactttgaaaacgacctggccacggactacgccctctccgaggacggcctgacctggaccttcaccctgcgcgacgacgcctacttcaccgacggggagaaggtcaccgcccaggacgtcgcctttacgctggagacggccaaggccgcccagggatccgtggacctgagctacatggtctccgccgaggccgtggacgaaaccaccgtggccgtcaccctctcgcagccgacctccatcttcctcaacaccctggcctcggtcggcatcgtgccggagcacgcctatggcgaagactacggccgcagccccatcggctccggcccgtatgcgttcgtcgagtggcggccccaggagcagatcgtctttgtggccaacgaggactactacggcggcgcgccggccattgagaacgtgaccatcgtcttcatgagcgaggacgccgccctggccgcggtccaggccgggcaggtggacgtggcctacaccagcgccacgctcgcccaggaggtgcccggctaccgcatcgaggccatccgctcggcggacaaccgcggcttcaccctgcccatggagcccaacaccggcaagaccgccgccagcggcgcgcccatcggcaacgacgtgacctgcaacctcgaggtgcgccaggccatcgcctacgcgatcgaccgccaggccatcgccgacgcggtcctgcacggctacggccggcccgcctattccgaaaacgacggcatgccctggaacaaccccgaggtcgccatcgagacggacgtcgagtacgccaagcagctcctcgccggcgcgggctgggcggacggggacggcgacggcatcctggagcgggacggcgtgcgcgcctccttctcctgcctgtacccggcggacgactccgtgcgccaggccgtggccatggccgcggctgagcaggtgcgcaagatcggcatcgagatcgtcgtcgagggcaccagctgggacgagatcgcccagcgcatgttctccgaggcggtgatgatgggctggggctcctccagcccgaacgagacgtattacctctaccgctccgcgggcgtgtacctggacgactactacaacccggagggctacgccagtcagaccacggacgcctacctcgacgcggccatggaggccctgacggtcgaggaggccaaccggaactggcagctcgcccagtgggacggcacgaccggcaccgccatgcggggcgcctgcccctgggtgtggatcgtgaacctggaccacgtcacctacgtgcgcgagggcctctccatcggggagcagccgatccacggccatggccacggcctgccgctggtgcagaacctggaggactgggcctgggaagagacccaggacgcctaaagaaacggaggatagagcatgaagggaaccgtcggccgccttgcgcgcctcctcgcggggaacctggtcaagatcctctcgctcctgctggcggtgagcctgatcgcctttgtcctggtcacggcctcgcccgtggacccggtgcagcagtacatcctgggcctgggcacggccgtctccccggagcagcgggcgcagatcgaggcctattggggcgtggaccagccgcccgtgcagcgctacctctcctggctctcctccgtgctgcacggggacctgggcgtctcctcgctctaccggcggccggtggcggagatccttgccgagcggttcggcaattcgctggcgctgatggtgagcgcgtgggtgctctccgggctgctgggctttggggtgggctgcgcgatgggcctgttccgcgaccgctggccggaccgcctcctcaagaaggtctgctatgtgctcagctccgtgccgacgttctggctggggctgctcctgctgctgatcttctcggtgtggctgaagtggttcccgaccgggttctccagccccatcggtcttacgcaagcggaggtcacgctcggccagcggatctaccacctgatcctgcccgcggtgacgctgagcttcctctccttctccaacatcgcgctgcacacgcggcagaaggtcatcgacgtggagaacagcgagtacgcgctctttgcgcgcgcccgcggcgagggggccttaacgcgccttttccgccacgacctgcgcaacgtcctgctgcccgcgctgacgctgcagttttcctcctttgcggagctgttcggcggctcggtgctggcggagaacgtgttcagctacccgggccttggcagcgcggcggccgcggcgggccttggcggggacgtgccgctgctgctggggatcacgctgttctctgcgctgttcgtctgcgcggggaacctgatcgccaacctgctctatggcgtggtggacccgcgcatccgggaggtggaggcatgagggcgcctgcaaaccgccgcgtgcgcgtcctggcgctggcgatcctgctggccgcggtgctcgcgggcgtgtacgcgctcggcctcctcatcccggaggaggccatcgccggcagctatctgcaggccggccaggcgccctcgctttcgcaccccttcggcacggacgcgctggggcgggacctgctgctgcgcacgctcaagggcctttccacgagcatgacggtgggcattgcggcctcgctcatcagcgcgggcatcgcggtgctggtgggcatcgcctcggcgatcggctcccggcgcgtggacgcggggatcaactgggggatcgaccttgtgatgggcgtgccgcacacgatcctggtgatgctgatctccttcgccctgggccgggggctcaaggggctgctggtgggcatcgcggcgacgcactggtgcagcctggcgcgcctcatccgcgccgaagtgctgcagctgcgcggccagccctacgtcgccgtgtcgcgaaagctcggcaagtccagcgcgtggattctcgtccaccacctgctgccgcaccttatgccgcagttcctcgtggggctgatcctgctcttccctcacgcgatcctgcacgaggcgtcggtctcctttctggggttcggcctgccgccggagcagccggccatcggcatcatcctctcggagagcatgcgctacctctccgcggggcagtggtggagcgcggtgctcccgggcgcggcgctggtgctgctggtgctgctcgtggaccggctgggcgaacaggtgcgccgggtgctggacccctggagcgcacaggaataagggaaggaggaatcccacttgcaacccatcttggaaattcaggacctgcgcgtctccttccgcatgtacgaccagggccttgcgcagcgggaccttgcggtcctctcggacctgacgctctccgtccggcccggggaggtcgtggcggtcgccgggtcctccggctcgggcaagagcctgctcgcctcggcgatcctgggcctgctcccggcaaacgccacggtcggcggcgaaatgcgctacaagggcgagccgctcacccaggaccggcaaaagcgcctgcgcggcagcgagatcgccctcgtgccgcagtccgtgcagtacctggaccccctgatgaaggtcggcccccaggcggacggccaccgctcgccccggccggtggaaaagcgccggcgcctcttttcgcgcctgggcctgcccgagggcacggagaagctctatcccttccagctctccggcggcatggcgcgccgcgtgctggtggccaccgcgctgctcgcggacgcgcagctcctcatcgcggacgagcccacgcccggcatgagcctggaccaggcgctggaggccctgcgcctcttccgcgggatggcggacgagggccgcgccgtcgtgctcatcacgcacgacgtggacctggccgtcgcctttgcggaccgcgtggccgtcttctacgccggaaccacggtggagatcgcgccggccgcggacttccgcgcgggcgcgcaggcgctgcgccacccgtactcccaggcgctgtggcgcgcgctcccgcagaacggctttgtgcccatccccgggtttcagccctatgccgggaacctgcccaggggctgcgtgttcgcgccgcgctgcccgcgccgcacggccgcctgcgaggcgggcgtgccgcccatgcggccggtccgcggcggggaagtgaggtgtctgtatggcgcttgaggcaaagaacgtctccttccgctacggccggcggggtcccttcgtgctggaggacgtgagcctgcgcgtggagcggggcgagcgcgttgcgctctttgcgccctccggccggggaaagaccacgctcgccctgctcctggccggctatgcgcgcccgcagtccgggcagatcctgctggagggaaagcccctgccggaaacaggcgtctgcccggtgcagctcatctggcagcacccggaaaaggccatcaacccgcgctggcgcctgcgccgcgtgctggaggagagcggcgccatccgcgaggaggacctcgtggccctgggcatcgagcgcgcctggctggaccgcttcccgcgggagctctccggcggggagctgcagcgcttctgcgtggcccgcgccctgtgcagcggcgcgccctacctcatcctggacgagatcagcaccatgctcgacggcatcacccaggcgcagatctggaacgcgctgctggaggcggccgaggcgcggtccctggggctcctcgccgtgacgcacaaccccgcccttgcccagcggatcgcgacgcgcacggtcgagctctgaccccgcgcgttttgcgcgccgaagaaatttggcgcgctttttttacgcatgaaacgcgcgcgcccggggagaataagcggcaaaaggaggcggagcgcgtgcgaaagcggcggggatggatctacatgctcctggcgatctgcgccgcggcgctgacggcggcggtctggtggcgcttcgcgcggtggggccttgcgcggcccgcgatgcgcgacgccgtgtttctgcggcggatcgagagcattttgagaaagggtgaggactttgcatcgggaaaagacgccggaagcgagggaatatgacgaactggtccagcgcgtttcgccccgcagcagcgcggggagcacggccctggcgctggtgaaggcctttggcgtgggcgggctgatctgctgcctcggccaggcgatccacgaccttggcgcgggcccgctggggctggacgacaaggcggtctccgccttcacctccacggcgctgatcttcctctccgcgctgctgacgggcctgggcctctacgaccgcatcggtaagttcgcgggcgcagggtcgatcgtgcccatcacggggtttgcgaattccgtcgtctccccggcgatggagtttaagcgcgaggggtacgtcctgggcgtgggggccaagatgttcgtcgtggccgggcccgtgctggtctacggcatcacggcctcggtgctctacggcgtgctctactacgccgtccgcctcgtgcagggagggtagaagaatatggcagaaaagaagcggggcgcgcagagcgtcctgttgcagaaccggccgcgcgtgctctccttcgcctccatggcggggcccaaggaggccgagggcccgctggccggcacgttcgacgaaacgttcgaggacgacaccctcggggagaagagctgggagcgcggcgaggccaagatgctcgagcacaccgtggacctggcgctgtccaaggcgcgcgtgtacgcggacgcggtggatgccttcctcggcggcgacctgctcaaccagatcgtctccgccagctacacggcgcggcagctcggcgcgccgttcctggggctgtacggcgcgtgctcgaccatggcggaatccctgctgctgggcgcgctgctggttgacggcgggtacgcggaccgcgtggtctgcgccacctgctcccactttgccacggccgagcggcagtaccgcttcccgctggagctgggcaaccagcgcacgcccaccgcgcagtggaccgtgacgggcgcgggcgcgacgctcctgggccgcggcgaggcaaagggcctgcccctgcgcctcaccgccgccacgatcggccgcgtcgtggacaagcagcagacggacatcaacaacatgggcgcggccatggcccccgccgcggcggatacgctgctggcgcacctgcgcgacctgcaccgcagcgtgcaggactacgacctgatcgtcacgggcgacctcggctgcgtgggctacgacctgatgtgcctgctctgcgagcagaagggcgtctccctggacgggcggtacatcgactgcggctgcgaggtcttttcgcccgagcaggacgtgcacgccggcggcagcggctgcgggtgctccgcctgctgcctgaacggctggctgttccagcggatgctctcgggcgagatccggcgcctgctcttcctggcgaccggggcgctgatgagcacgaccaccagccagcagggcgagagcataccggccatcgcgcacgcggtgacgttggaggtggaggaaggatgatgtatgccaaggtattcctggtcggcgggctgatctgcgccgccggtcagctcctgctgctgtacacgaacctgaccagcgcgcgcatcctcgtggcgttcgtgaccgcgggcgtggtgctgacggcgctgggcctgtacgagccgctggtggaatgggccggcgcgggcgcgaccgtgccgctgacgggctttggttacagcctggccaccggcgcgcgcgaggcggtggaggagagcggcctgctcggcgcgctcaccgggggcgtgacggccacggccgcgggcatcgccgcggcgatcgtcttcgggtaccttgccagcgtcctcttcacgccgcacaccaagcgatgagagaaaaacgggctccgccgccggggcccgcttttttttcgccccgcgcgctggaaatcctctccatcccgcgattgacgggaagcgggaatttctgctatactgaattgtagacggatcgaacaagcggaacgaggattgtgtgcaatgacggaagtcctgcgcaaagggaatcctaatactttttttatgcaaattccgcataagtttacagagcctctacagatccttcaaaaacggccgctatcatgtactctgaagaagatttggcattggaaagggatgacggatacggatgcgtaggaccaagattgtatgcaccatcggcccggcgagcaacagcgaggaaatgctcaaaaaactggtccacagcggcatgaacgtggcgcggctgaacttctcccacggcacgcatgcctaccataaggagacgatggaccgcctcaagcgcgttcggcaggaggagaacgtgcccctggcgatcctgctggacacgcgcggccccgagatccgcgtcaaggacttcaagaacggcgaggccttcctggaggagggcgcggccttcgccctgaccacgcgggagatcgagggcgacgaaaacgccgtgaccgtcacctacgcgggcatgccgcgggagctgcggcccggcaacagcatcctgatcgacgacggcaacatcgagctcaacgtcgaatcctgcacggagacggac

SEQ ID NO: 1461 - DNA, 13466 bp, Unknown
  16S sequences of unknown bacteria
ccccattccgcctccggcgggctatgccgccgggcgtattgcccttttctgcaatttttcgattacgaattgattataccggccaaaattcgcgttgtcaaccacctttgcgcaaattattgttcttgggaaagtgcagagggtttgcatttccatagaatctctgctatcatgaaactaacaatctgtatctactgaagggaaattgctatgaatcaaacagagatcaccttccggcagctgggcgttgccgagcatatactggcggcgctggagaaaaagggcttcacccatcccacccgggtgcagcgggagagcatccccccgctgcagcagtggaaggacgtcatggtcaaggccccgacgggcacgggcaagacctttgccttcggcattccgatgatcgagcacatcaaccaggagcaggaggccgtgcagggcctgatcctggccccgacccgggagctggcgctgcagatcggcgacgagctgcggggtctgctcacctgcacggagggcatccgcgtggccgtgctctacggcggggccaagatggagccccagctcaaggcgctgcagcgtaagccgcagatcgtcgtcgccaccccggggcggctgatggaccattacaagcgccgcaccatcagctttgacaagatcaagaccgtcatcctcgacgaggccgaccggatgctggacatgggcttttacgacgatgtcacccgcatcatcgagaaggtcaaaaaccgcaagaatctgggcctgttctccgcgacgatgtcccaggaggtcatgacggtcagctggatgtaccagcgcgacgaggtggagatcaccgtccccgccgacgaggagaacaagccggatatcgcccagttcagcatcagctgctccccctttgaaaaagaggaggtcaccaagcggctgcttgaccgattcgacggcgagcggatcatcatcttctgcaacacgaagcatatgtgccagcggctggccgacgatctggcccgcctgggcatccgcgccgggtgcctgcacggcgatatccgccagaagcagcgggaaaagacgatggacgaattccgccacggccaggtacagatcctgatcgcgacggacgtcgcctcccggggcatcgacgtcgacgatgtcggctgcgtcatcaactacgacattccagaggagaacgagtactatatccaccgcatcggccggacggggcgggcaaaaaaggcgggcgctgcatattctatcctggggaccttcccggagcaggccaagctggatgagatcgccaagtacgcccacttccaagtcaagcccatgcggttcgacgaggcgggcgagctggtggaaaaggagatccgcaagcccgtcccccggcggaagtaccgctgacgcgcggcaggataagcgaaaaatataaattttgtattgaaattgatacatctctgtgatacaatacccctgcaatggaaaacgccaactaattttggcccgctctcatgtgcgatttttccccgcaagagcggcgctgcctgacggcgctgcgtccgcctctccggcgtttgcccgggcggccgcggcggcgtccatttctgacgaaccggaggtttttctattatgtgtggtattgtcggctacgctggccacaagcaggccgccccgatcttactcgatgggcttgcaaaactggaataccgggggtacgactccgccggaatctgcgtatataacgaccataagctgccggtctttaaagccaagggccggctttcgaatctgagccagatggtgcacggcggcgcagatgttcccggcgtcatcggcatcgggcacacccgctgggcaacccacggcgccccttccgacgccaacagccatccccacaccgccgcaggcggcaagattgtggtagtgcacaacggtatcattgaaaactatcagcagctgaaggaaatgctgcagcacaagggcaaggccttctcctcggagacggatacggaggtcgtcgccaatctcgttgagctgttctacgacgaaggccgcagctttgccgacgccgtccgcaaggccatccatcgcatcgagggcagttacgccctgggtatcctctgcatcgactgcccggatacgatgatcgctgtcaagaaagacagccccctcatcttcggctacggcgacggcgagatgttcatcgcgtccgacgtcccggccattttgaaatacacccggcaggtgagctacctggacgacggcgatatggccgtcttcacggcggagcatgtcgatttcttcaacgccctcggcgagcccgtggaaaagaagatcgagaggatcaactgggagctctccgcggcggaaaagggcggctacgcccactttatgctcaaggaaattcacgagcagcccaaggccatccgcgacaccatctccccccgcattcagaacgggaacattgtcctggacgaagtcagcttgacggcggattacctgcgccagctgcggaagatttatatcgtcgcctgcgggtcggcatcttatgtcggcaatctggccaaatatatctttgaaaaatactgccgcatctcgacagaggtcgtcctgggctcggaattccgctacgcggacccggtcgtggacgagaatacgctggtgctgatcatcagccagtccggcgagacggcggacaccctggcgggcctgcgggaggcaaagcgccgcggtgcccggacgctgggcatcgtcaatgtcgtcggcagcgccatcgccaaggcggcggatgatgtcatctacacctgggccggccccgagatcgccgtcgcgacgacgaaggcattctcaacgcagctttccgtcatctacctgctggcgctccatttcgcccagcagctgggcacgatgacggacgctgcgcaggcggatatcctggcgcagctgcagcagctgccggatgagatgtccaaattcctctgtgaggagaacatctccgccatccagtactgcgcctcccagttcttcaaccaccgggacgtcttcttcatcggccggaatctggacagcgccatctgcctggagggcagcttgaagctcaaggagatcgcctacatccactcggaggcctacccggcgggcgagctcaagcacgggcccatcagcctgatcgaggacggcaccctggtcatggccatggccacaatgccggagctctttgaaaagaccatggccaacgtcaaggaggtcaaggcccggggcgcggatgtcctgggtgtgacggtggctggctatgaggaagagatcaaaaaatatgtcgatcacgccatcatcgtcccgcgggtgcacccgatgctgcagcccagcctgaccctgatcccgctgcagatcttcgcctattatatggcgctgctccggggctgcgacgtcgacaagcccagaaatctggcaaaatccgtcacagtggaataaatctgtttctaaacgcatcccaacgcatccctgccgcccggaaaaacggacgacagggatgcgtttgcttgactttgtccacggcggcagatataatagttttcatagaaatccagcgttctgtggcaaatacagacacggctttgcagcaaaggaggagcacaaatggaaaaggcagtccaattatacctgatcggcggttttctcggctccgggaaaacgacgtttttaaagcatatgctgaccggcctggagggccgcaaggtcggcgttctcgtcaacgaattcggtagcgtcagcattgacggcacggtaatccggcagcacggcatggagatggtcgagctcaacaacggctccattttctgcgcctgcctgaaagacagcttcgtcaagacgctgaaaatgtttgccgaaacggatatcgacatcctcgtcgtcgaaaactcgggcatggcagaccccggcagtatgaaccagattctggatcagctcaagccgtacctcaagcggccctacgactacaagggcctcatctgtctggccgacagcacgacgttcctggattatatcgacctgctgaaccccctgcagcaccaggtgcagacagcggacttcatcatcgtcaacaagacggatctcgttgaccaggacgtaatcgacgcgatccatgagacgatcaaattctataataaagatgtcgagatctacgacaccgtttatgcgaccgtcccggtggccatgctggagcggcgacttgtgaaccacggcatcgtcctgtccggcgagtgctgctgcaacaagaaagagacccgcccggcgacctacaccctggaatctgacgccgttttaaccgaggcgcagctggcagatttctgccggtaccttgcaaaatttgcgctgcggatcaagggcttcctgcggggcgaaaacggctggatccacgccgactgcgtcggcaagcagatcaacgtcgccccggcggcagacgatatggagatcatgcttgaaacgggcaagctcgtcatcatcggcagcagccccgacgaatttgaggacgatatcatgttcgcctgggaacgctattgcaccgggcattacgacctcatctgcacgaaataaccgatggcagctgttttattggtctgccagatgctggaggacgagatccagcgcgctgtgcagcgcaccggcgcgcagatgcccatcgtctgggtcgatgccggactgcatgaatatccggaccggctgcgcgaggagctgcagcggcagattgcgctgctggagcaggactatgatacgatcctgctgggcttttgcctgtgcggcaacgcgctgcacggcgtgcgcgccgcccgggcgcggctgatcgccccccggtttgacgactgcatccggatgctgctctgccccgccgcggggcaggccccggccgttgattgccgctgcctgtactatacggcgtcctggtctcgccacggcagctcgatcctggaccaatacgacaagactgtggaaaaatatggtgagaaaaaggccaagcgggtctatgccgcgatgctgaaaaactacgaaggcgtccgcttggtggataccggcggcggcctgcaggaggaaagccgggattacgtccgccggacagcgcagttgctggaattgaactacggcgaagtgaccggcacctgccgtgtgctggaaaagctgctgcagggcgcatgggatgaagaagtctgcatcaccgcgccgggcgcagcctttgaccagtcagattttctgcgccgcgctgccccagccgggcaagcgtagcggcaaaacgaaggagaacctatggcggaagtattattaagctgcgaaatgctggaggatgagatgcagctggcgctgcagcgcaccggcgtgcagatgcccatcgtctggctggacgccgggctgcatgaatatccggccaagctccgcgcctcgctgcgggagaagattgcagagctggagcaaagctatgacacgattctgctgggcttttgcctgtgcggcaatgccatggacggtgtcggcgccagccgagcgcagctggtcgtcccccggttcgatgactgcatccggatgctgatgagccgcgcccagggacagctgccggaggtggactgccactgtctctatttcacccattcctggacaacccatggcaaatttctctccacccaatacgatgagaccattgccaaatacggcgaaaagaagggcaagcgcgtctatcaaatgatgctgaaaaactacgaaggcattcgcctggtgaacacgcaggcatttgatctgctgccctgccgtgcctatattcagcagacagccgaaaagctgaacctctgctatggcgagacgagcgggtcgatccgcattctggaaaagctgctgtgccatgaatgggacgacgagttttatatcctggcgcccggcgaccacttccggcagatggaatttctgcgccacccaagcagcacggactgacaaaaaggaggagccttatggacggtaaaggcaaacgggtacaatcggtcgagaaggcaatgctgctgctggactgcttctggcgggcccgcaaaagcttctccctggcggagctggccgcccaaactggctgggccaaaagcacgatccacgcgctgctctcctccatgaccggcagcgccctggtcgagcaggacccgcagacgggcaaatatcagctgggctaccacgccttcgagctgggctgtgtcgtgctggagcgctggccggtccgcccggtggcggggcactatatgcagaagattaccgagcgcaccggggagtctctctacctcggcatgcgctgcgccaacgagctgctgctggtcgagagcacggagggcttcggcaactaccagctggcctcccccctgggcgggcggatgccgctctacggctgctcccagggcaagatcctgctggcctatatgccgaagaagcagcgggcagagttttttaagaccgtcaccctgaagagctacaccccctacacgatcacagacccggagcagctggagcaggagctggagcagatccgcgcccagggctacgcggtcgagtccggtgaattgcagatcgggcttaaatccgtcgccgcgccggtctttgacccggacggccagtgtgagtacgccatcagcgccgtcaccattgcccggagcggcatggcgggcgataattttcaaaagctgcaggaggtcgtcatccggacggcggaggagatcacctgtgaactgcggcaccccagtgcccacggcagatgaactgcaagcgccgggcgcttgcccgaccccttgcaggtcaggcaggcgtcccggtgctttttcgtgacaggcaaggggcgcaaatttgcggcaaagcggcaaaattcacttgccagtttccaggcagcggtgtatactgttgatagaattcccaggcgcgggctgggctttccccagcgccgcagcttttcacaaaacagtggaaatgcagaggaaaaaggaggcgcgttccttatgatttttcagaaaaaacgttgtgtcgccatgctgctggccggtgggcagggcagccgtctgaaagtattgacggaaaacacggcgaagcccgccgtcccctttggcgggaaataccgtattatcgactttcccctctccaactgtgtcaactccgggatcgacacggtcggcattctgacccagtaccagccgctggagctgaacgaatacatcggcaacggccagccttggggcctgaacaaatcccacggccgggcacagatcctgccgccctatgcccggagcaagaaatccgaatggtacaagggcacagccaacgccatttaccagaacatcccctttcttgcgcgttacgagccggagaatgtcgtcattctctcaggcgatcatatctaccggatggactatgcccagctggtgcgcttccacgaggccaacggtgccgactgcaccatcgccgtccggacggtcccgctggcagaggcctcccgcttcggcatcatgaacacgaacgaggacggcacgatctacgaatttgaagaaaagccgaaaaagcccaagagcaccaacgcatcgatgggcatctactgctttaagtgggacgtgctgcgcaaatacctgatgcaagatgaggaggacccgaaatccagcaacgatttcggcaaaaacgtcatccccgccatgctggccgacggctgcaaaatgtacgcttggcgcttcgacggctactggaaggacgtcgggacgatcgagagcctctgggaggccaatatggacctgctcggcaccgagcccgccttctccctccgggggaaggacaagatcttctcccgaaactttgccatgcccgctagctttatcgacgccaaggcaaagatccgcgatagctttatcgctgagggctgcgacatcggcgggacggtcacccactgcgtcgtctccaccggctgcaccatcgaagccggggccatcgtcgaagacagcgtcattatgccggatacgacgatcaaggccggtgccatcgtccgcaacgccatcatcggcgaaaacagctgtatctccagcggcgccgtcgtcggtggtctggctggggaaacacagcgcatcagcgttgtcggccatcgcaccaccgtgccggagaaccacctggtccccgccggtgagatctattaatttgggaggtaagagaggatggacgttcttggcattatctttgcaaatatttatgacagctccctgggccagctgacaaacaagcggaccatggcctccctgcccttcggcgggcgctatcggcacattgacttcccgctctcgaatatggccaacgcggggatccaccacatcggcatcatcacaaaatacaattaccaatccctcattaaccatgtcggctccggcctggaatgggatctggccctaggcgagggcaatatggaatttttgacccccttctccatgggtcacagcggtacctaccggggcaagctggaggcagtcaactcagcggcaaaattcatcgcccagcaaaacgaggaatacgtcattctgagtgacagcaacgtcctttgttccattgatctgaccaaggtgctggaagcgcacattgcctccggctgcgatgtcaccgcggtgacgaaatccggcatcgccgacggcaagaaggagctggacctggccatcaagaccgacgacgccgggcaggtcacccagatggccgtggactatgtcgccgacgccagctatgacgcttccatgggtattttcgtcatgaaacgcacgctgctgatggaggcggccaaggaatccaccagccgcaaccgctaccgcttagagcgggactttatcctgcgctcgtttgacgaaggcaagatcaccatgcatatctacccgttcgccgacgtcgccctctttatggagagcacgcgggaatactatcagaataacctgcggctgctccagccggaggtccgtcagggcctgtttaagagcggcacgccggtctacaccagtgtccgcaacgaagtcccggcttatttcggcgaccaggcgaagatgggcaactgcatcatcggtgacggctgcagcattgaaggcagtgtggatgaatccgtgctgttccggaatgtaaaggtcgaggcgggggttacgctcaagcactgcgtcgccatgcagggctgcgtcatcggcgcgggggcgcagatcgcctatgctgtactggacaaaggtgtcgtcgtgcggcccgggtcgatgctcatcggcacctgggagcaccctgtgatcatttccaaaggagagacagtatgaaaattgtacacgcagcatccgaagccgcgccgttcgtcaagacgggggggctgggcgatgtgatgcaggcgctgcctgccgcgttgagccgttaccgcgattgtgaggtcagcctgtttttgcccctgtacggcacgatcaagcaggacccctcgatccatctgcaaaaaatcacggactttaccgtattcctcggctggcgggagcagtatgtcggcctattccagctaaagagccgggccaagaaaaaggtctattttatcgacaacgaattttacttctgccgcaaccgcatttacggcgagggagatgacgcagagcgatttgccttctactccaaagctgtcctcgcctgcatcgccttcttggggctggatccggatatcatccagtgcaacgactggcagacagcctgcatccccgtattcctgcatgcagaatttgcgcagcagttcccccacgcaaaatgcgttttcacgatccacaacatcgaataccagggctgggcggaccgggatttcttctcgaacgttctggccctgccggagcaataccgggatgatctgaccatgggcgactccattaacctgatgaaaggcgcgatcatgacggcggaccgggtcacgaccgtctctgagacatatgcccaggaactgcattacagctacttcgcccacgggatggagacctgcctcggctaccggggcgcggatttctctggcattctcaacggcattgatacggccgtgtttaatcccgcgcaggacaagctgctggcgcaaccctacggcgcagacacgatgcgtgaaggcaaggccgcctgcaaggcggcgctgcagcgggaggtcgggctggaggtccggccggatgtccccgttctcgccatggtgacccgtctggcggggcacaagggcattgacctactgtgttatatcctggaccggcttatggagcgagacgtccagttcgtcctggtcggctccggcgaggcgcggtttgaggatgcgctgcggtcggctgtgaagcgctatcccggccgcatcgccgcaatcctgcgctatgacgggcagctggccaaccggatctacgccggggcggacctctatctgatgccgtcgcaggcagagccctgcgggctatcccagctcattgcgatgcactacgggacggtccccgttgttcacgccaccggcggcctacgggataccgttctcccctacgacccggccactggcgatggccgcggcttcaccttccaaagctacaacggcgacgatttcctggcagccatcgaccgggcgctggcgctgtttaccggcgaccgcgccgcctgggacaagctcgcccagcaggatatgcgggaggactttagctggcgcgtcccggccaaagcctaccgggcgctgtttgccagcctgcacgagggctgagcgcaatgcgcatcctgtataacagtctcgagacccgctataaaacgcccttcggaactttatttccgaggcaggactgccggatgcggctggccatccccgccagctgccagaccaggcaggtcaccttggtcgtggagcaggagaacggcgcgcctgcgttttctgtttcgttttccctgcagcagcgggaggggccatatgaatggtacggcggcacgttccagattgcaaatctcggcctatatttctactatttccgcatcgaaaccgccaatgagaccttccgcctcttccagcagggggaggacaccaatatggaagcgggcggcaaatggcagctcagctgcgtgacggaccgctacccggtcccggcctatgcccagggcgcggtcatgtaccaggtcttccccgaccgttttttccaggctgggcagccagaccttaccgaaaagctggcgccgttccgcctccatgcagaccggaccgaaacgccggactatcgcccggatgcggatggtatcgtccgcaactgcgatttttatggcggcaacttcgccgggatcgcagcaaagctgccgtatctgcgcgatctcggcgtctcgctgctctacctaaatccgatttttaaagcctattccaaccaccggtacgacacctgcgactaccgccagccggacccgatgctcggcacggcggcagatttcaccgccctgtgcgaggcggcccaccggctcggcatccgcgtcattctcgacggcgtcttttcccacacgggaagccgaagtatttactttgaccgcagcggcgagtttggcggcggggcctgtaccgggccaggcagcccgtattacagctggtatacctttcagcacttccccgatcgctacaccagctggtggggcatcgacacgctgccgtgtgtcaacgagctggacccgggctatctcgattacatcatcgatgggtcagacagtgtcgtggcccactggctccgcctgggggccgacggctaccgcttggatgtggccgatgagctgccggacgctttcatcctccggctcaaagaccgcatccggcaagtcaagcccgacgcattgctcatcggtgaggtctgggaggacgcatccaataaaatcgcctacggcaagcgccgccgctattttatcgacggggcgctggattctgtcatgaattatccctggcgcaaggcgatcctagactactgccagggtcaggacgacggcacagccctgcgccagagcgtcctgcgcatcgcagaaaattatccgccaggcgttttaagctgcgtgatgaatatcctgggcacccacgatacgccccggattctttccctcctgggcggcagctgcgacggcacgaaggatgagcaggcgcagcgccagctctcctcttggcagcgggcacaggcgctggagcagctgcagacggccgcgttcctgcaatttatgctcccgggcatggcctgtatctattacggcgacgaagccgggatggagggctgtggcgacccgttcaaccgccgctatttcccctggggcgcggaggacgccgccctgacggcgtattaccgcacgctggccgccctgaaaaatcaggaaccggcgctaaaaatgggaacgatcgggtcctttactgcgtccaatggacaagtgcagtttacgaggcgcgcgccgggcaacttgctgcagatctcctgcaaccgctcctccctgccgatgcaagcccaagggcagctgcttttcggctgcaagctggcgctggctgcgccaggcgagatcacgctgcagcccggcgggctctgcctctcccggatcccggcaacagtagagaaaaacttacccataagtgaggtatcttatgaattgtaaagaatgtggcagacagatccccgacggggcgctgttctgcaagtactgcggcgcgcaggtggaaaagcaagccgcggagacggaagacgtcgccgcgcccatccagcatccgcgccgcagagcaaagaaaaagcgcggtccgaagccggccgcgatcctggctgtcgtcctgatcctggccgcaggcgtcgcagcaggtgtgctcatctggaaaaacagtgggcagaccccgggcagcgatgcgccgccagcggaggtccaggccccggccgtgactgccagcatctcgccccggaacagccaggtcgaggtcggcagcagcctggtactcagcacgaaactctcggacacggcacagacaccgaaaagcatcacctggcagagcagtgacactaccatcgccaccgtctcggacggcatcgtccggggcatcgcgccggggcaagtacagatcaccgccaagctagcgctggagagcggcaagagcatcgaggcggagacgaccgtccgggttgtcagccccagcgtggtctatactctctcggtcacaccggcggacgtctctttgcatgtcggcgacgccacccggctggaaacgcagctggacccggcgccggaagccgacgtgacggtagagcgcacagactggacctcggataacaccgccgtcgccacgatcgccgacggtcggattaccggcgtcgctgtcgggacggcgaaaatcaccgtcaccctcaccctgtccaatggccaggctgtgacggcaagcgtccccgtcaccgtcacgcagcagcctgcaccggcgcagacaccggagaacaacacacaga

SEQ ID NO: 1462 - DNA, 3691 bp, Unknown
  16S sequences of unknown bacteria
tcgctcgtcggcagcgtcagatgtgtataagagacaggatatggggcgagctagaaattgaaaacctcattttttccatttctatttctcctcctctttcctagccgccgcagcacgttcccgccgcagcctgccaatctcagcctttgctaaacggatggactgcaccaaataccgcttgctggggcagatatatgtgcagcatccgcattccatgcaactcatggcgtgttcatcctcggcacgttcaaaatcctttttccgggacagctggtctagctgaaacggcatcagcccgataggacataccgctacgcacttgccgcaatggatacacggcatttccggcaacggttttgccatgtcttcgttgatgaccagtatgccgctggtaccctttacgcagctgacctccgtactcgtttgggcaacacccatcatcggcccaccggaaatgactttcaccggctttccttcaaatccgccgcaggcctgaatgcagtcctcaaaagtcgtcccgattcttaccattagattctgcggatttttcaccccgcctgtaatggtaatcacacgctgcaccatcggcattccctcgtaaacggcccgatagatagccgctgccgttcccacattgagcacaacgcattgacaatccatcggaagcccgccgtccggcacttcccggcccgtcagcgattgcaccagctgcttttcagagccttgcggatagcgagtgcgcataacctctaccgaaatccctctgcaatttttgcaggcatcttttatcgtctgcaccgcgtccatcttattttgttcaatcccgatgattgttttctggatgccaagcgcattcatcgccagctcagcaccaagcaccacctgatccggatgctccaccatcatgcgttcatccgccgtcaaataaggctcgcactctgccccgttgatcaaaagcgtgtccaccgttttgccttgagggatgctcagctttacatgggtggggaatgtggccccgccggcccctacaatacccgccgcttggatgatctcgatgatctcctgcgaagaaagcgccatcacctcatccttggttctcggtttgatctcatcatacagcgtatatgccccgtcattttctatcacgacatgcatcgtgggggcgcctgttacgtggagcttctcctgaattgccttcaccttgccggatacgctggcatgcacaggcgcgccgacaaatccggccggctggccgataggctgccctacgcaaaccgtatcgcctacttttacgcaaggatgcgccggcatcccaatgttttgcgccataggaatggctaccagcttaggcgcctccagctcttgaatcatctttccgctagccaacggctttccttcatgctgtttatgcagcggctttacgccgccctttttaaatgtaagaatgcccaatgctacaccttcctttaaggccattcgctgactatgcctctctaataatttttaattatagcataattcctttttagtataacaactttacacactctcggcacgaaaaaattattaaactttctaaaagtccttagcatcagtctcacagcagcttattgatttattctacaaaatatgcaaaaatataaaatggttttttatgatatagtagaaatgaaggaatggagtgtgttccggtatgaatataattttacttggtgcttgcgtgctcgttgcctgttttggcatctttactgctctgcttggcagcggaaaacccaagctctttggtgcgttttttggaatcatgcttggcagcggcctggccattgtcgtgtgcaaggcattgggatttagcttaacttccatccccgtcgccgttgcaatgggcgttgcttccgtcattcttttggcgcttgccatttggaaagaggccgcttccttgctcatcatcagcatctgtggcgggttgtatattggcgggggcctggtgtacggcgtgatgaccttgttctctatccagttggattgggtgataggagggctagcggcagcaattttggcccttatctttgccgcgctttgtttgattcgccccagcaatggcattttaatcgctacctctatggcaggtggtgcattggtcagtatttccggatctatcatcttgtatatgatcctcaatattgctgccagcgccggctttatcggggatttgctggctttgtatactgccttgtccccaaataccattcttctcatttgggtttttggattattgctgggcggtggcgccatgctgctccaaagccttttgatgaagtccgtagaggatgtagacgacggttcttgggaggattgggaaccggaatatgaagaagaggaagaacccattgttgtcaaacgcggccctcgtcgaaaaaagaaaaaacagcttgtggagccgtatgattggggtgaacctgaggaatccgattcctacgacgcttttgatgagcagaaggattggtcagacgagccagaagaagaggtaccctatgaagaaacggtagaaaaagaagagtttgtagaggaagatcctgtgcctagccaagagcatgtgcgtactgtgatcccgccagttggctccacaaccaatgaagaagatggctctaccaaggtattccgtaaggtggtattgcctcaaacagagacgcaatcaacgacgcatgctgacatcccttcgcactctcccatatcgtctgaggatacggctcaagctgagtctcataaagagcatgcacccaagctttctcgtcctacgtttcctccgcgctcccagcgcagaaaataataatgtctcaaaaaagctccccaatggggagcttttttctatgcatcaaccaatttttttgatccaacaacggcgtcttttgtgctgtgtagcttcatagcttttccacagcgcctgtatcttctcgttcgtctccaactcgggccccgtctctgcatactttccatgattttcaatcgcttctttggtcaaatcattcagcatcaacgcgatatgcccttgtttttgatactttggcttcacgcctaccaaatacagatcaataacgtccgtctttttatagggcgctctgaggatgcgaatccatccaaaagggaacaatcttcctttggattttcgcacgcaatcgttcatcgacggtagcataaagcccacgcccaccggctcgtcattttcatcgatgatcatccgtacataatgaggattgatcagcatcataaactgagaaaagtatttttgtatcagcttatccgtaatgggaactgttccgtacaaattctcaaatgcttcattgatgacgcgcatcgcacccttcaagtacggacggatctcccttttgctcttgaacgacgccattttcatcttgcttcgcttcatcaccagctggctcagtcgttcaattctggggtctacctgttcaggaatcttaattttgtattccacccagtcaacatccttatcaaagccgagccttgccatatgctctttgtaataagcataattgtaaatggtaataaaattgttatcctggtcaaaaccttctatcagcataccctcttgatccaagtcgctaaagcccatcggcccatggatctcttgcaagcccttctcgcgcccccacgcgataacagcgtcgaataatgc

SEQ ID NO: 1463 - DNA, 4268 bp, Unknown
  16S sequences of unknown bacteria
aaagcagccatgatggcaggaccgaagctgttgaccagcccttggacggccaggatgcccaggttcatgatggattgctgcaggcaggtgagcgcggaaaatccagtgatctcccggatgcgggaaaggcgcagacggatccgtccgtctccacggtgaaacagctgcggaaagcgcagagcggtgtacagggcgatgccgatgccggagacgtattgggagaggacggtcgcttctgcggcgccggccacgccgcggtgaagcccggcgacgaaccacaggtccagcacgatgttgagcacggcagaaactgcgagaaagacaagcgggatgatggaattgcccagagagcgcagcagggcagcgaagaaattatagagaaagatggcagccaggccggcaaagatcacgatgaggtagtcatgcatcatcttgaccaggctttgcgggatctgcaggatctggatgatccagtcgatgcccaggtagacgagcacgttcaggatcaaggtgacgctccctaacaggacaaacgatgccaggacgcattccttcagcgcgtccgtttttttctgtccgaatcggatggagaagacggtgccgctgcccatggccagccccagcaggatagaagtgagaaaggtcatcagcgaaaaggcggaaccgacggcggccaatgcgtctgcgcccaggacacgtccgacgatcagcgtatcggcgatgttgtaacattgctgcaagagatcgcccaggatcatcggcaaggcaaaacgcagcatcgtccggatgatcgggccgttggtcagatcatgattcatggcacacctctttcgtttgtaaatctgataattaacattcgaaaatattatagggcggatgttgtctgctgtcaatcttccgtcttgacgcagatcagcgcttcccggtataatgagccatagatgaacagaaaggaagatgcctgtgtttctggatggactggatgaaacagatcagaagatcgtgaagctgctgatccgcaatgcccgcatgtcctactctgatatcggcaagcagatcggcctttcccgcgtggcagtgaagctcagggtgcaggcgctggaacaaaagggcatcattgaaggatatacgacgatcatcgatccgcagaagatcagcgggtcgatctcttgttacatcgaactggaaacggagccaggatcgctgcaggagatatgtgagatcctgaaccaggaaccgatcgtcacgcagatctatcgggtaacaggccgcaaccgtcttcatgtgcatgcccttgccgcgtcgcatgaagagatggaaaagctgatcgttgaaaagatcgaccggcttccgggcatcgtggcgtgcagctgcagcacgatcctctcgcgcatcaaggatgtcaagggactgcggttgtaaaaaaaggagcgttcacttctgatcgagtgtgaacgctccttttgtgattcatacgtgtttcggtctaggcagctcttcgatctcattcagctgataaggcgtcatctgatagacatagttgagccagttgcggtacagcagattggcatgagagcgccaagtgagcaccgggggacgggaagggtcatcatccggaaaataattgaccgggatctggatcggcttgtgctgagcgagatcgcggaaatattcctgggcgagcgtttccacgccgtactccaagtgaccgaggatgaagatctgccggaagtcggcagtcgcgcagatgttggtgccgctgacttcggaacaagagagcacttccagcccttctgcccgtttcagctgttcctcatcgatggcggtatggcgggaatgcggggtcatgtggatctcgtcaaacccattggtcagaaagttatattcatcacacagcttctggggaaagatgccgaacatcttctgcggaagcaggtgtttgtcgatgccgtagtgataatacagtccggcctgcgcgccccagcagatgtgcatggtggagtacacgtgtgtgcggctccagtccatgatgccgcacagctcctcccagtaatcgacttcttcataaggcagatgctccaccggcgctccggtgatgatcagcccatcataatagtttctgcgcagcacatcgaagttatcatagaacttcaccagatggtccgcgctggtgttcttggagcggtgagaggaaactttcatgaaatcgatatccacctgcaggggagacttgctgatgaggcgcaggatctgcgtctctgtctcgatctttttcggcatcaggttgaggatggccaccttcagcggccggatgtcctgtttcttcgcgatgtcttcttccagcgcgaagatcttctcactttccaggatggcctttgcgggaaggccgttggggatgttgatcggcatgcgcccgcctccttacgcgatggcggcaaaggcctgtttcaggtcatccaggatatcgtcgatgttttccaatccgacggagaagcggatcatgccgccgctgatgccggcatccttcagctgctgatcggtaagctgacgatgtgtttcgctggccggatgcagcacgcaggtgcggatatcggccacatgcacttcattggaagcgagcttcaaggcgttcatgaacttcatcgctgcttctctgccgcctttcatctcaaaggagatgacgccgcttgctcctttcaggtatttctgcgctaaagcatggttggcatcagattcaagccccggataagtgacgctttccacttgttcctggctctccaggaagcgggcaacgctcatcgcgttctcgcaatactgtttcatgcgcacggccagcgtttccaggccgaggttgagcaggaaggcggaatgcgcagccgggtagacgccgaaatcacgcatcagctgcatgcgcgccttgatgatgtatgctttgttgccgtaagtttcggtatagatcaaaccgtgataagattcatccggttcggtcagttctgggaaattgccattgttccagtcgaattttccgctgtcgacgatgacgccgccgacctgtacggcatggccgtccatatatttggaagtcgaatggatgacgatgtctgccccgaagtcaaaaggacggcacagcaccggcgtggcgaaggtgttgtccacgatgagcgggacgccgtgacggtgcgcgatgtccgcaaaccggctgatgtccagcaccgtcagtgccgggttggcgatcgtctcgccgaagacggctttcgtgttgggctggaatgccttgtcgatctcttcatcgctggcattggcatcgacgaagatgcattcgatcccgagctttttcagcgtgaaggaaaacaggttgacggttccgccgtaaatctcggtggtgctgatgaagctgtctcccgccttgcagatgttcaggatggaaagcagcgtggcagcctgaccggaggtggtgcacatcgcgccgacgccgccctccagttccgcaatcttgtcttccacggccatgacggtcgggttggcaaagcgggaatagatcagtgacttggtcggctcatcgaagaccgacgcgacctcttcggtcgaatcatatacatatgtggtgctctgtacgatcgggaccacacgcggttccgcgtttttcggatgatatcctgcatgcaggcataatgtttcaggtttcatttcatgaaagctcctttctttctcgtgtatcattttacacagttttccagtcagtttcaatgaagttttacagcgaagaaaaaagaaacgcggatatgcgtgatgcatatccgcgtttcagttgaatgagctaggaacggctccgttctcagccgcagcagacctgccgctgcgcccatgagcatgatgccaaacagcatgctctgcgcttctgccgcagtatctggctcctttgtgactgtgctgccagcaggatgaaggtcatcgatcgcacgctgcagttcaactgccagggcgtcgacctcctcctgagtgatgtttggatcacgggtcatctcttgcgcacgcttggccagcgcaagaaccgcatctgcggaatctttgctgtaactgagcagatcaaggctgttcgcatacgcgatgatctcttccagtgcgctcgtgtcggccttcgttctcgcattcaggcgtgcttcacgcagcgtcttggccgcttcgtcgatctcttcctgtgtcgttgcgttgctcagggccgtcttcgctgcatccagcttctcctgcagtccttctacgctgctcgg

SEQ ID NO: 1464 - DNA, 14647 bp, Unknown
  16S sequences of unknown bacteria
gctgcttgaacaatttttgatagaaatattgtctaactttttggggtcacttcaatgcggcgctgctttttgttgtgatctattttaaaaatcgatctccaggtcgtaatagcaagccttcagcagcttctccatctcttcctgggtggggatgcgggggttggtgccggtgcaggcatcgccaatggccagctcggccacctggggcagtttctccatgaactcattctcgtcgatgatgccgccctcataatccttgatgcaggaggggatctccagggccttgttcatcttcttcagctcttcgatcaggctggtgaccagctcttcggtgttgctgccggagaggtggaggaatttagcgatctgagcatagcgctccgcggcttccggattcttggcgttatagcgaatgaccttgggcaggtacatggcgttggcgcagccatggacgatatgcccgccggagaaggcggcgccggtcttgtgggccatggaatgaacgatgcccagcagagcgttggagaaggccatgccggccaggcactgggcgttgtgcatccgatcccgggcggccatatctccctggaaggaggcgatcaggtcctcatggatcatatggatggcgtggagagccagaggatcggtgtaatcgcaatgagcggtggacacataggcctcgatggcgtgggtcatggcgtccataccggtgtgggccgtcagcttcttgggcatggtctcggccagatccgggtccacaatggccacatcgggggtaatgttaaagtcggccagaggatacttgatacccttctcatagtcggtgatgacgctgaaggctgtcacttcggtggctgtgccggaagtggagggaatggcgcagaagtgagccttggtgcgcagagtggggaagttgaagggggtgatcagctgctcaaaggtggtctccggatattcatagaaggcccacatagctttggccgcatcgatgggggaaccgccgcccatagccacgatccagtcgggctcaaactcccgcatcatctgggcgccgcgcatgacggtctccacagaaggatcgggctccacattctcaaacagctgcacttccatgccggccgccttcaggttgttcaccgctttgtccaggaagccgaaacgcttcatggagccgccgcctaccacaacaatggcctttttgcctttcagattcttcagttcttcaatagcgcccttaccatgatacagatcccggggcaatgtgaatcgtgccatatcaattcctcctaagtttgcggcccgtgccgtatttgttacttttttaacactccatctcaaaaaaagaacgccgcagcgtttcctttgatttcggccttattatgcgcctttttttcccaaaaagaaagaggcaaagtggacaaaactttgatatttttttgtcaatatcgacgaaacaaatgggccggagttttcctccggcccattttaaaatttacagcactttggacaagaattcttgcaaacgggggttttcgggatggccgaagaactcctccgggggctggtccaccaacagatggccctgatccataaagagcacccgggtacccacttcccgggcaaagcccatttcgtgggtgaccaccaccatggtcatgccctgggcggccaggtccttcataacctccagcacctcgcctaccatttccgggtccagagccgaagtgggctcgtcaaagagcatcacatcgggctgcatgcacagagcgcgcacaatggcgatacgctgtttctggccgccggagagctgagccggataggcctgggcccgatcttccaaattgaccttgcgcagcaggtccatagccatgctttccgcctgggccgggtccatcttcttcaccttgatgggagccagagtcatgttctccagcacggttttgtgggggaagaggttaaaatgctggaacaccatgcccatcttctggcggtgctgatccagattgatctttttatcggtaatatccacaccctcaaaaatgacgctgccttcggtgggaacctccagcagattgagggagcggagcagggtggatttacccgaaccggaggggcctacgatgaccaccacctggcccttgtcgatggtcaggttcacatggtcgagagcggtgatctccgggccgaactttttcaccaggccctggacttcaatgagatgattagcgggcgtcgccacggcgcatcctcctttccacataacccagcagtttggaagccgggaatgtcatacacagatagagaccagcggccagcagcagggggcccatggtctgatatgtagcgccgcgggtcaggttggcgccgaacatcagctcgctgacgccgatggtggaacagatggagctttcctttaccagggtaacaaactcgttgcccagggcaggaaggatgttctttacagcctggggcaacacgatcatgcgcatgcactggccctgggtcatgccaagggagcgggccgcttcggtctggccccggtccaccgccaggatgcccgcccggatgacttccgccacataggccgagctgttgatggccagagcgatgatacagggcaggaacatggcaaagttcataaacccgaagagcatatagttgggcagctttaccgcaccgaacacaccatagtaaataatcgacacctgcaccagcatgggagtgccacggataatctcaataaaagcactggaaatgaatctaaggatcttgttgttggacaaacgcatcaatgccagacagatagcggggagcacagcaatgaccaccgtgaggaaagccagcaccaatgtgtaataaacaccgtccctgaaatagggccagtagtccggcaggaaggaaaaggatatattcaagccggtaacctcctttttttctctcttgtcgccttggaaagcgctcaagagccggacggagcgctgccccgtccggcccatattttttaatactcggaatccaggttggcctggttgaccatctcgtccatctcaccggaagaagtcacatcggcgatgacggaattgatgtgatccagcagctcggtgttgcccttcttcacggcaatgcagctgccggtggcatcatagggaacctcgaaatcagcgatcatcagatcggggttctgggcgataaagccttcggccacggccacttccacgataacaccttccaccttgccgctgctgagggacatgatctcatcgggcagcttgggcagggaaaccagcacagaaccggggaactgttctttggcgatgccctcctgaatggaaccggtctgggccgcgatctgctggtccttgaaagattccagggaagtatacttttcggcatcctctttgcggatgatgcagcactgttcaccggagtaataaggatcggagaagtccacctgctttttccgctcttcatcgggagacaggccggcggccacaaagtccacagtgccgttgttcagctcattgagcaggctgttgaagtccatatccttgatcaccagctctttgtccatctcttcggcgatcttcttggccagagccacatcgaagcccaggatggtgtctttgccgttgaccatcttatggaactcatagggagcaaagtcggcggaagtacccagcaccagctgatccttctcttcgccgcccttggagccgccatcattgctctggccctcttccttggtgcaggccgccatggaaagagtcatcacagctgccagcagcaaggctgcaaatttcttcagtttcatcttcatttcctccacagtaatccccacatggggcgttttgattgcgtgcaataattatacatcgctattcatattgattcaatagcaaaatacccatcaacttgtatgaaatcccccaatggaaagggaaaatactggttcaatgtgacggaagagtgaagggatcaatcctccgagggggcctgggccttggcttcttccatatactgatcaaacaggccctgctccttcacttctttcaccgtttcattgatctgctccagcagctgggtgttgccctttttcactgccacagcgcaggtgctttcttcgtaaaacacctcaaaggatgcctgggccaggtcgtcattttccgccagatagccgtctgcggtgtctttatccatcaaaacagcgtccaccttgccggttttcagctgcatgatcatatcgggcaccttgcccagggagaccaggggagagtcgggcatctgatctttggccacttcttcatggatggagctggtctgggccgccaccgaatgaccggccaggctgtcaggggtggtgtaggtatccacatcttccgcccgcaccaggcagcagacgccgccggtataataataatcggaaaagtccacctgctccttacgctcctcattgggggccagggatgcgatgacgaagtctacagtgccattattcagctcggtgagcagactgttgaagtccatatctttaatgaccagttctttgcccatgtcgtcggcgatcttctgggccagggccacatcgcagcccatgatggtgtcctcgccgttgacgatcttgtgaaactcaaaaggagcgtagtcggcggaagtgcccaggacgatctggtctttttcctcctggttctgggagccgttcccgctttgtccctcttctttggtgcaggccccaagggtggcggcggtgatacccgccaaaaacagggcggtgagttttttcagcagtttcattgcaattccctccatcaatctgaaaagctttcgctttgtcttcgatgggataattatacgatactccgtataaaattgcaatagttatttattcatcattctgcataaatatctcattccaaaccgtccagtgtataggcaatgagcaagtccgccatattgccgtagctttggatgccggccgtttggttctgggctttcagataggcatcgttgacggcggtacccgcagttttggccgggccttcgaactggctgagataatcgttgagggcccggatatcccggcggaggttttctcccacctgactgctgagcagggaggacagctccggggacacatcataaagggcgttggacagataaatatagccattgatgacgccgctgtaccggacaccgggatcatcgctgttcacacaggccagataggcggaaaagcctgcctcatcctcgggagccactcccagacaatgggcctgctcatgggcgatgttataggccaggtgggtgctcaccgtgggccctacggtgggctcggcggtaaaggggaagtaatagcctgcaatgcccacccagggcatcagtttccccagcacccgggcctgtttggccatggtcacccgcccggacccatagaccgaatagctttctcccagcttttcatactgggcgccggtctcctggctgagggaggaaaaatccccggacaaaaaggtgccgtcttcctcccggggcacctgatcggccagctcattggcctgctccaaaaggatcatggcgctttccatcagttcatccaccgaccggggccggacggaaaggcccagctcctccgccagggaaggggcctgatactgtacgccccacaggaaggtaaaggcaccgcctacccaaagggccaacgccgccgtacggcaaagcccccgcagaaagccccggccttttccccggatggcaccgcccagaaggaaccagagcacaagcaccaccgccaaggccagaaatacctccgacaggggaatggggatcttttcggtgcagaaggcgatggcccctgtcaccgcccgggccatggcccggcttccctcaccgaaaaagtgccccatacataaaacgatgagccagaacagtccgccccacaaagccgcaggaagagcccgacctagcagctgccgcagtttcccatagccttttttcaaaaaggccaatatgttccgccccctcatgccaaaagctccatggcccgagcgaatttggacttttcccagcccttgaggcccaggcttttttccagctcccggcgcagggcgttaaaatcctcttccgaaccttttttcagctccagctcccattcgtcaatgggagcctctttgcccccggcctggatgcagccttgatcccggcacagctccaccatcaatccctcccgggaaaacagggcagaccagcggcaaaattccatccgggccttttcctggaaaggcccgctcaaggcctcccgccagttttccggcaggtcgggacggttcaaaagagcctgcaccccctgttccagggtgtctgccttttcttcgatctccacccggcgggccacgccgtcctgcataccgccgcctttgactgtgcacaccgattctggcccttcctgacgcagacgcagggcaaagcccgcctgggcgcagccggactccggcgtatcataataaaaagcgctcatgggcgtctcctccaaaggccccaggaagggagccaaaagaggatggccaaacagatcgatgccttcctctcctttgtacttcacttcgatttccatgttctgctcctttgctccgcagaaggtctgcggccacaccgtgcctatgatacctattttatatgggtattgtatcacggcccgtcccctgtctcaagaagggggttttttcccttaacaaacagcaattcctatgatatacttctatattaggtatattatccttagaaaaggcggccaaagccgccggaaagggcgggtttctgtgaagaatcgagtgacggtgaccatcggaggcatggaatatcatcttctggccgacgacgacccccaatatgtgaaaaagaccgccgagctggtggaccgcaaactgcgggaagtgcaccagggttctgccaatctttcggctttgacagcggcggtgatggccgctttgaatattgcagacgattattataaagcccaggcctcttcggacagcctgcgcagccagatccgggaatacgccgatgaagccgcttctctgcgagccgagctggcccggctgaagcggggataaccggacccaacagacagaccaggcaaaggaggaaaacaaagccatggctttggagctgatgagccccgccggttcgatggaatcggccatggccgccatcgccggcggcgccgacgccatctattttggcgccggagactttaacgcccggcgcagcgccaagaatatttccggagaggagctccccgagcttttgcgctattgccgcctgcggggcgtgcacacctatgtgacggtgaacacccttctcaccgaccgggaactgcaaaaggccgcttccctcatcggcacactgaaccgggagggagccagcgccgtcatcgtccaggatctgggcgtgctgcgcatggtgcgggcactggcccccgatctgccggtgcacgcctccacccagatgaccgttcacgacctggcgggggccatcgcctgcaaagagatgggcttttcccgggtggtgctctcccgggagctgcctctggatgaaatccgcttcatcacagaacgctgcggcatcgaaaccgaagtgttctgtcatggagctttgtgtatgtgctattccggccagtgctatctctctgccgccatcggcggccgcagcggcaaccggggcctgtgcgcccagccctgccgcatggcctatggctttgacggcggaaaacccgccccctggctcagtctgaaggatctgtccctgtgcacccacctccaggagctggaacaggccggggtggcctgcgtcaagatcgaaggccggatgaagcggccggaatacaccgccttggtgaccagcatctataaacgagccatccagcagggaagagcgcccacccaggaggaaatgaagcagctggaacaggttttctcccgcagcggctttaccgacgggtattataccgggaacaccggctcccagatgttcggtgtccgccgggaagaggacgcccgggcggcccggggcgtttacgcccaggcccgccagctctatgaaggaaaggaaaatccccgggtgcccattcatctgtcttttaccgctctggaagggcgggagatgaagctgaccgtcaccgatggagacggcttttcctatgaagctcaggcccccatggcggaacgggccatttcccgggccaccacccaggaagaagtggcccggaacctgtccaaaaccggcggcacggtgttttatccggaaaagatggacattgctctcgaccccatgctgcgcatcccggccagcaccatcaacgccatgcgccgccagtgcctggacggcctcacctcgctgcgccgccggccgccccggcggggggaaggggagtggcagcccggtgcacggcgtctggagcaccagggagagcccggcctgattttccaggtccagcggtttgaccagctttccgcccctctccttgttctgcatccggactatgtgtatctgcccctggaggagtgcgcccggcatctgccggagtgcatcgccctgcaacaggaaaagggcatccaggtggccccggttctgcctcgaatcatgttcgacagccagtggccgccgtttctggagatgctgcgccaatgcaaaaaggcggggatcggccaggtggtgtgctccaatgtgggccatgccgccctcctgaaggaaagcggctttgccctgcggggtgattttggactgaacatcatgaattcccaggcgctgaaagagctgaaagcccaaggtctgcaaagcgctaccctgtcctttgaaatgaccttcccccagatgcgggatgtgagcaaggctttgccctgcgaggccatcgtttacggccgtctgcccctgatgatctttgaaaactgcgccatccgccggggagcgggaaaatgcgcctgcaaggaaggacagcatttcctttcggacaaaacaggccgccagttccccctctttcccgagccgggatgccgcaacaccctttataacagcgaaccggtggtgctcagcgacaaaaagaaggattatacccgtctgggtctgcgccatgtccgcctgtgcttcaccaccgaaagcgcccaggaatgtgccgccgtggcccgccgctacgaccagggcctggctacggaagggcgtttcacccggggactttattaccggggtgtggaataaatccataaaaattttctttttgttcgccaaattgtctgtctgatgcgttaagataggagtactatggaaacactaaaaatacaatgtatccctgataaaatgggccgtctggcccccgtgccccaatatgccacccccggctcctgcgccatggatctgcgggcttttcttctggagcccatgaccttacagcccatggagcgggccgccatccccacgggcatcgccattcagctgcccgccctccatgccgggctggtgctggcccgcagcggtcttgccacccgccaggggctgactctggccaacggggtggggcttatcgacaccgactaccggggagagattttgtgcagcgttgtcaatctttcctcctctcccattaccgtgcgggacggcgaccggatcgcccagctgatggtggtgccggtggtgcaggccgaacccatgccctgcgagactctggaccccacagagagagggaccggtggtttcggctcgaccggacgaaattaaggaggatctatgctgattctggcttccgcctccccccgccgccgacagctgctgcaggggttggggctctcttttgatgttcgcccgcaaaactgtgaggaagtgagcgatgccgcccttcctcaggactatgtcacccaaatcgctttgcagaaggcccgcagtgctttaaagggggccggggaaggggatgtggtgctggccgccgacaccgtggtctgcctggaaaacaccatcctgggcaaaccgggcaccttggcgcaggcccggcagatgctggagcagctctcgggccgcactcacaaggtgtgcaccggcctggtgctgatgagccacagccgtaccctgacccactgggaagagacggcggtgaccttttatcccctgtcccgggaaatgatcgattggtacctttccaccggcgagcccatggacaaggccggttcctacggcatccagggcaaaggcgctctgctggtgcagcgggtggaaggggatttttacaatgtggtaggcctgcctctggcgcccctggcccgactgttttcggagatggggcttccctgggcgggagaagggggccgcgggcccctgttagacgatccggcgtgaggtgccgcagaacatgaaacttttttcttccaaactattttgctgggctttggccctgtttttgtgcgcctcggtgctgctggggttcaacctggccacgggcaggctctcttttcttaccaacggtaccggtgtgctggtgaccccggtgcagcaggctttgacccgggccgggaatttcgtcagcgatgtgttcggctatttttatcgctatgacagcctggtggaggaaaaccaggagctggaaaagcgggtgcaggagctggaacagaaggagcgggaatattacgccgccatcgacgaaaacacctatctgcgggagctggccgggctgcgccggaaaaactcccagtttgaatatgagctggccgaggtgatcggtctttccagcgacggcgtctccaccacttacaccctcagccgaggggaaaaggacgacatcgaagtcaatgacgccgtggtcacaggagacggcctggtggggtatgtatccagcgtgggctataacttctgcgaggtcaagccggtgaccgatatctccctgaaaatgggcgctgtcatctcccgcacccgggaagtggtggtggcccagggcagctatgatctggcggaagacggacttctgcgcctgtcctatctgaaaaacgacagcgatgtgctggtgggagatacggtggagacctcgggctacggcggcatcttccccaagggcctgctcatcggcaccatcaccgaagtgctgcccgaaagccacggcatctccacctatgccaaagtgaaaccggccgcccagctggattctttgaaaaaggtgtatatcatcaagtcctttgacatcacggagtaagccatgcaagaaagaaaaaattttcgctgccggatggctctatatgccctgttggtgcttgtgtgctttctgctccagttttcccggggcacacggctgactttgtggggggcctcccccgatgtgcttcccttcctttttgcggcggtggccctgtttgaagggccctatgtgggagccatcttcggctttgccggggggattcttttgtcggtgaattctgcggcccccgaagcccttttgtccatgtattacagcctgggctgtttgggcgcaggcttttttgcctcccgctatatgcggagagtgttccccacgctgctgatgtgcggcatttttctttccctgttcaaaacccttttgtcctttttcttcttttacgccctggtttatgaagcccattccccagggctattgctgacggcggggaagagccttctgttgtccctgcctttttcccttgtggtctatctgatcgtcaaacacatccattcccgctttacagctgaggaatgacccatcccccggagaggatcgtctatgaatcgaagaagtcaactgaaacgaatggccctgctcagtggttttctggtggtggccctgggcctgatggtgctgcgccttgtggatttgcaaattgtcaacggcgctacctatcgggagaaagcccagcggaagatcctgcgcacctatgaccagccggcctcccggggagagatcctggattgctatggccggccgctggtatccaataccttgggcttttccatctccttcgattactattcctgggaaaaagaagaacagaatcaggtgatcctggacatctgcgccatcacccagcaggcaggcctggaacattatgacaccctgcccatcacaaccgatgccccctttgcctatacctttgcctcctacgaagaagacacggccaagaaccttcgctcctttatcgaggacaacgaaaagctgtggcgcattccggtggaaaaagaagagctgaaagaagccgcagacgaaaaactcccgaaagatgcggacaccgatgagcaggcggtacacacggccctccaggccctcagcgccgtggtggatcaaaccgcccccgattacatcgtccgcaccctggaagatctgtcggccccggagctgatggagctgctgcgggaaaaatacgacattgatccctctctctccgacgcccaggcccgcctcatcgccggtgtccggtatgaaatggatcaacagcaattctcctcctacaacaacctgtacaccttcgccagtcaggtggatgtggagacggtatccctggtggaagagcggagcagtcagatgcccggcgtcaccatcacggtggacaatgtgcgtcagtatgacaccacctatgcctcccatgtgctgggccgggtggggaagatctaccgggaagagtacgaagagctgaaagaccagggctatggcctcaacgacaccattggcaaagacggcctggaaaaagcctatgaatcctatctccggggcattgacggcgaaaaagcggtggaaaccaacatcaacggggatgtcatcaatgaaaccgagaccaaggaacctcagccgggaagcaatgtgatcctgacgctggacctggatttgcaggccgtggccgaggagtccctggccagcaccatccagtccatcaaagaacggggccagcgcaaccacagcagcggctgggatgtggaagggggcgctgcggtggtcatcgacatcgacaccggcggcatcctggcctgtgcctcttatcccacctataacctggccaccttcaaccaggattatcaaatgctctatgacgacccgttgaaacccatgttcaaccgggccaccatgggcgcctatcctcccggttccaccttcaaaccggtgaccgccctggccgctttggaaagcggcaccatcaccacttccaccaagatccgggacgaaggcgtttacacctactatgcctccagcggctatacccctgcctgctggatctggaatgacaagcggggcactcacggtcttttggatgtgagcggtgctctgaaatactcctgtaactacttcttctttgaagcctcccggctcatgggcatcgacacactgaactattacgccaagcagctgggtctggggcaaaaaaccggtgtggaactgcccagtgaagcggcaggcaacctggccggtccggaaagccgggaaaaaaatggtgagacctggtggcccggtgaaaccctgcaggccgccatcggccagagtgaacagcagttcacccccatccagatggcaaactatatggccaccatcctcaacggcggcacccggtaccgtccccacttcctcaagcaggtggtaagctacgattacacccaggtggtggaagaatacgaaccggaagtcctggccgagatggatatctccgaaagcaccattgaagccatcaaggaaggcatgcgaggcgtggttaccgacgacggtaccgccgccagcgtcttccgggattatcccattgccgtaggcggcaaaaccggttcggcccagaccaccgccagcaagagccaatcggcccatggtgtctttatttcctttgctccctatgacgatccccagatcgctgtattcgtcctggtggagcacggcggcagcggcggcaatgtggcccccatcgtccgggatatctatgacgcctattttggcaaacagaccaatcccgatccggcgccccaggaaaacacgctgatttactgattttctacgctaccacgattgattttccattgcatgccggcatctgatacagtataataaaatcactatggggagaatgctccgccggttttgccggcggagctcaaacgggaaggagatgttcttcggtgggaacggtgatcatcacggcctccggcaaggggggaacgggtaaaacctccttttgctgcggcacggcggtggccctgtgcgccctgggagaaaaagtgctgctggtggatgccgacagcggtttgcggaacctggatatcgttttgggcatgaccgaccagctgctgttttccttttccgatgtgatcgccgggcgggcctcgctgaaggaagcggccgtcaagcatcccattgtcaaaaacctgcgggtgctcaccgccccggcctccagcaaactggaaagctgcgtcaccaaagaaaaagtggccgcttttctccagaactgccgggcccattttacctataccattgtggattgccctgcggggcttcccgacaccatttcctattttgccgccgggggagaccgggcggtgatcgtgtccaccccggattatacctccctgcggggggccgagcaggccgcccagatcttctaccgggaaaagatggacaatgtgcgcatcgtggtcaaccggg

SEQ ID NO: 1465 - DNA, 32759 bp, Unknown
  16S sequences of unknown bacteria
aaaatattgtcaatgcctataataagaaagaaagcaaactggcagaagaagagaaacgagagccggagctgatgcctcccatttcatcgcatacccttcgtcatacgggatgtaccagattgggtgagaacaatgtcaatcctaaagttatgcagtatgtgatggggtgctggatgtccggtggacatccgttaagcaccgaccgtagcggagcgaagaccattcagatgcacagattacaatgaatgtctataatcatattgcagagaagtctcatgtggagaacgagatgtctaaaatgaacctgccggaaaccgtacctgctgtggtataaaccagaagccgttgtcgtaaaatgtggtaagaaaatcagacgaatatatttttccaagaatttgtggtaaaaatgtggtcaaatcaagaaaatcgagtgcgaaagcaagtgaaaaatccctgtgaagcccgtaaaatcaaggcttcacaaaatcttcacaaaataattagcactcacctattgacgtggctaacaacatatgttatagtctgaatataacaaaaaagttcctgcggatggaaatagaaatccgttttcatccggagttcacatatacaggcagcagcttaaagcgtaattgccttaccggatcgatcataaagcagcgatccggagggacaggtgataacccaagtggcgtgatgagcggctgcagttcatgtatctatgttatacacgaaagctgggaggtgtgctttatgaacatcagtaaatttacacagaaatcaattgaggcagtaaataccctggagaaggtcgcatatcagttcggtcaccaggagatagaagaagagcacctgctgtatggactgtaccatcaggaagacagtctgatcgcaaagctgatcgagaagatggagatccagaaggaatatttcgcagaccggctggagcaggcattaaatggcaggacaaaggtaagcggcggcagtccgtacatcggacagtatctgaataaggcactggtcagtgcggaggatgtggcaaagcagatgggagatgaatacgtatccgttgagcatctgtttctttccattctgaacaatccaagtccgtcgatgaagcagtttttgaaagaattcggtatcacgaaggagcgttttctgcaggcactttctacggtgcgtggaaatcagcgtgtgaccacggacaatccggaggcgacgtatgataccttaaataaatacggtcaggatctggtggaaaaggcaagaagccagaagcttgatccggtcattggacgtgatgcggagatccggaatgtgatccgtattctgtcaagaaagacaaaaaacaatccggtgctgatcggtgaaccaggtgtcggcaagacggcggcggtagaaggtctggcgcagcgtattgtgcgcggcgatgtaccggaaggactgaagaataaaaagatcttcgcgctggatatgggtgcactggttgcaggtgcaaaatatcgtggtgagtttgaggaacgtctgaaagcggtactggaagaggtacggaagagtgagggcgagatcatcctgtttatcgatgagctgcatctgatcgtcggcgcgggcaagacagacggcgcaatggatgccggaaacatgttgaagccgatgctggcaagaggtgagctgcattgtatcggtgccaccactctggatgagtaccgtaagtatatcgaaaaagacccggcgctggagcgtcgtttccagccggttatggtcgatgagccgagcgttgaagatacgatctcgattctgcgtggcctgaaggatcgttatgaagtattccacggtgttaagatcaccgacagtgcactggtggcagcggcaacactgtcacatcggtatatcagtgaccgattcctgccggataaagcaatcgacctggtcgatgaggcgtgtgcactgatcaagacagagctggattcccttccgactgagctggatgagctgcgtcgtaagatcatgcagatggagattgaggaggcagctctgaaaaaggaaacagataagccgagccgtgagcgtctggaagcacttcagaaggaacttgccgagctgcgtgatcagttcaacagccagaaggcacagtgggacaacgagaagaaatccgttgaaaagctgcagacgctgcgtgagcagatcgaagcaatgaataaagagatcgagctggcacagcgtaattatgatctgaataaagcagctgaactgcagtatggcgagctgccgaagctgcagaagcagctggagatcgaggaagagcgcgtgcacaaagaggatatgcgcctggtacatgagagtgtgactgaggaagagatcgagcggattatttcccgctggaccggtattccggtagcaaagctgacacagggagagcgtgctaaaatcctggcactgggtgacgaactgcacaagcgagtcgtcggtcaggatgacggcgtgacgaaagtcacggaagcaattcttcgttccaaagcaggaatcaaggatccgtccaagccgatcggatcgttcctgttccttggaccaaccggcgtcggcaagacggagcttgccaaggcactggcggagaacctgtttgacgatgaacagaacatggtgcgtatcgacatgagtgagtacatggagaagcattctgtgtcccgtctgatcggagcacctccaggatatgtcggatatgaggaaggcggccagctgacggaggcagtccgcagaaaaccatactctgtcgtactgttcgatgaggtggagaaagcacatccggatgtattcaacgtcctgcttcaggtgctggatgatggccggattactgattcacaggggcgtaccgtagacttcaagaacacgatattgatcatgacttcaaacatcggttcacagtatctgctggatggcattgagccggatggcagcatccgtcaggaggcacaggataaggtcatggaacagctcagaggctcgttccgtccggagttcctgaaccgtctggatgagatcatcatgttcaagccgctgacgaaggataacatcggcaatattgtcgatctgatgatgaaagacctgaataagcgtctggccgaccaggatatcagactggagcttgatgcatctgcgaaggaatacatcatcgatggcggttacgatccggtgtacggtgcacgtccgctgaagcgtttcctgcagaagaatgtggagacactggctgcaaagctgatcctgtccggtaaggtaggcatggaggatgtgatcctctttaccgtaaaggatggagagctgacagcagaagtcaaggcagagccggagaagattacgggataatcacaaattaccgcgtcccgtccggatcattctcatagacaaagtgaatgtaatcagatatctcctgaaaatcaatcacacaatccccgtcccatatggcgacggggatttttgcgtcaaagccatagatcacgggatatatttcggcaaagaaatcatagacgagtaccttacgctgtatgggatcgatcacccagtattcgcggacaccggcattcatatatttgttcagcttgattgtgacgtcctttttgcgcgtgaagggagagaggatttcgacaacaaaatccggggcaccgtagacacagcggcggatgactctgctgcggtcacagatgaccagaacatccggctccaccatcgtcttctgatcacagtcgagctggacatcgaccggggagaccatggggaggcaggtgcccttgtgtgcgctgacgtatgcgagaagctttgcgtaaatcagaccggcaatcagctggtgatcgcaggcaggtgtggtcatgtcataaatcactccgtcgatcagttccacccggcgctcctccgggatctggtaatagtcggtcagggtataatcgccctgctgttttgtctgataggacgaggtggattctccgatcataccggcactggtcagctcttcggtggagaatgagtaattctgtgaagcgaaatcgtgaccgggggcggtctgtgaagctgaggatgtggatgttttgccggaagcagtccggggaggcattgtccggtatgctgcatcagtggaaacctgcgggattgcccgaccagaatgcgcagctgtatcctgggcgctgtccggagcgagcaggctttcgagcgagagcagggtgccatagcggggagacggtgtggcaccgctgaaaattttctggacggtgcttaaggggacaccggacagctcggagagtctggcgcaggtgtagccgagttcttttttgcgttgtttcatttcttcgatagtcatatgattccctccttttttaccgaatgtactctcggaatctttcctgcacttgcttttgcggtcgattttctatcagttgcaccaaaatttcatcaacgtacacaccgtatacgcctcagaaatttgggcacagctgacaaaaaatcttctcacaaaatcaagcacaaaaagattccgggagtacatccgaatcaagtaccctgctgtttattgcttccagcaattgaagcaggaaacttacctgattcggttcaaattgtttcaattgtgcatatctgctttggccagattcaatttctttatgatgataatagcagatgaaattgcaaaaatcaagttaaaaacatccaaaaacggataaaatggaaaagaaaatatccattaatggatataagattaaaatcaatgggagaaagttttgagggaagaacgataataattcatctaaaattaagtctgaatattcgttttgacataacatatacatcgtgtatacctcagaaatttaagcagaactgaaaaagaattttctcaagaaatcaagcataaaaaaattccaggtgtacatttttcagaaaccaggattcgcgattgtaccatggcagtaagtttgctatactgacaatgatcggactattctatgtactctgggaatctttttgtgcttgattttgtgagaagatttttccaaatttctgaggcgtacatggtgtgtacacctcaggaattcgggtgcgactggcagaaaatcggctgtaaaagcaagtgcaggaaagactccgagcgtatatttctggaaaaaggaggggtttaccatgaagaagcaggcttacaacccatatcttccaagctgggaatatattccggacggggagccgtatgtgtttggtgaccgcgtttatgtatatggatcgcatgaccggttcggtggatacggctactgccagaatgattacgtctgctggtcggcgccggtggatgatctgggtgactggagatacgagggcgtgatttaccggcgaaatgcagatccgatgaatcaggacggtgacatgtacctgtttgcgccggacgtgacggttggagcagacggaagatattacttatattacgtgctggatcaggcgtgcgtagtttcggtggctgtctgcgatacaccggccggaacgtatgagttttacggatatgtacattatgaggatggcatgagacttggcgagcgggagagcgatgaaccgcagtttgatccgggcgtgctcacggagggggagatcacgtatctttatacgggattttgcatgccggacgatgagagcaggcacggcgcgatgctgaccgtccttggaaaagacatgcttacaatcaaagaagagccgcggtttgtggtgccgtcaaagccgtatgaaaaaaataccgggtatgagggacatgcctttttcgaggcatcctcgattcgccgtgtgggtgaaacgtactattttatttattcgtcggtgctcagccatgagctttgctatgcgacgggagaatctccgtatggaccatttacttacggcggcacgatcgtgagcaactgtgatctgtttatcgacagctataaaccggcggagcgcccgatgtactatggcggaaataatcacggaagcattgtgcagatcagaaaagactggtatattttttatcaccgccacacgaacggccagaatttcagccgtcagggatgtatcgagaaaattcgatttgatgaaaatggaaaaattccgcaggtaatgatgacctcatgcggagcaaacggaggaccgctgaagggcagtggcatttatccggcgtatattgcctgctcgctatactgcctcgatgaggcgacaatggtcggcggcccgggcgagtggatggactgcagatttccgaagattacacaggatcagccggacggagtggagggcatgggatatattgcaaatatgtgctccggcgcgacggcaggattcaaattttttgactgtaaaaatgtcacggagattgcagtgcgcacaagaggcgatgcgaacggctgcttcgtggtgcggactgcgtgggacggtgcgccgcttggcgtgattccgcttggtcgaaacaacgaatggaaaacgtaccgagcaccgattcagattccggacgggatacaggcgctgtattttacgtttgagggaagcggaaggatgtcgttttctgagtttgaattgattacaggcgggagtggtgtggagaaataagaggaaagcaactttccctcagcaaacatggcaggagaaccggaaattttccggattttttgcagatagcaggaaacgaagcgtgcggagcacttctgttctgacagaaaaatcggggattggagaaagaagaacagagttgacaaggattggatgaaagaaaagaaaggaaaaacaaaatgagtcagttaccgcaggatccgatgatccttttaagttatgtaaacacacagttgcgcgaccattatgcatcgctggaggagttttgtgcctcagagggcgcagactgtgaggagatcgtaaaaaaactccgggacgtagattatgaatacgacccggagacaaattcattcgtgtgaatattttacaagcgtatttacaaatagttcagggaaaaaaagcagcttccggaacagaaaagccggaagctgtttttcatggtacggctgcgaaattagtctgaggcaacagatttgcctgattccgttagacaggctgattacagcgtctggatcttctgacggtaaattttcaaaaacagcacaaccgaaagcaggatcgaagcgatctccgcaatcgggaaggaccaccatactgcatgaagcccgaatgcttctgcgaggatccaggcagacgggagcaatacgagcagctgtcttgcaacagatacgatcaggctgtagactccgtttccgagtgcctgaaatacggagcttaagataatacagaatccggcaaagaggtaactccagctgatgatgcgcagggcatttgagccgatcgagatcatatcctcagaagcgttaaagagcagaagcagcttgtctggaatcagctggaagacaagcaggccgagcatcatcatggcgaatgcaaacgtacagcttaagcggatcgtgtgagtgatacgctcctttttgtgtgcaccgtagttgaatgcgatgatcggtaccatgccgttgttcagtccgaaaactggcataaagaaaaagctctggagtttaaagtaaacgccgaataccgcagctgcggtcgaagaaaagacaagcaggatcttgttcattccaaacgtcatgacggaaccgattgacatcatgaggattgacggaacaccgacagaatagattgccctgacggttcttccttccagccgcatgtgtgtcggatgtacctcaatttcgtggtttcgttttacattgaaccagatcgcaaggaacattgcgacgatctgaccgaagacggtagcgagtgcggcaccggctgcgcccattttcggaaaaccgaagtaaccgaagatcaggattgggtcaaagataatattcaggattgcgcccgttccctgcgtaatcatcgtatagaaggtacggccggtagactgcagcagacgctccagcgtgatctgaagaaacagaccgaccgaaaggccacagacaatcgtcatatactgcacgccgtactcaatgatctccgtattgtcggtctgcatggcgaaaaacggccgtgatccgaagattccgaacaggcagaatgcggcaaaaccgatgagtgcaagcagaatactgttgttggccgctttatttgcctggtcataattcttttcaccgaggcttctggagagcagtgcgttgacaccgacgccggtaccggaggcaacggcgatcatcaggttctggatcggaaaggccagggatacggcagtcagtgcgttttcactgatctgagagacgaagatgctgtccacgacattgtagagcgcctgcacgatcatggaaatgatcattggcagtgacatggagatgagcagtttcgggatcggcatgacgcccatcttgttttctttttttggtttgccggaatttccggctactttggttttttccatacagttctcccttctgaaagcagatccctgtcgtaagctggctgagtagctttggacaggaacaaaaaagcagccgcattcagaaatgcggcagtctgtgtaaaatgcagtttcttctattgtaaaggggataacggaaaatgtcaattacaggatgcagaaaaacacgacaggaaaggccgtttttgccttgacaaaaaaacgcgaaccaactatactgaatggcaaagccgtgaagggaacaagtaagaacagacggaacgcacagaaagcagccggcagatgagaggcgcgcgcagaactcttttccgaatacatcccggagctccgcaccgaacgaagtccagtaggctgcggcgggtgacgcccgttatgaggtcagggtatgcagtacccgatgaggcaggcaatgtgagttgtctgtgaaataaggtggtaacacgggatttcgctctcgtccttaaaaataaggacgggagctttctatttttataataaagtcccgtccgataaatacacccgaaacacatcacgaaaagaaaaggagacaccccaatgcagatttatgacgaactcgtagcaagaggactgatcgcgcaggtcacagacgaaaaagagatccgcgatctcgtaaacaacggaaaagcaaccttctacatcggttttgacccgaccgcagacagccttcatgtcggacatttcatggcactttgtctgatgaagcgtctgcagcaggcaggcaacaagccgatcgcgctgatcggcggcggtaccgccatgatcggagacccaagcggacgtaccgacatgcgtcagatgatgacaagagagacaatccagcacaactgcgactgcttcaagaagcagatgagccgtttcatcgatttttcagatgataaggcgctgatggtaaacaatgcagactggctgctcgacctgaattacgtcgatgtactgcgcgaggtaggcgcacacttcagcgtaaaccgcatgctgactgcagagtgctacaaacagcgtatggaacgcggcctgagcttcctggaattcaactacatgatcatgcagagctacgatttctacgcactgtaccagaaatacggctgcaacatgcagtttggaggcgatgaccagtggagcaacatgctcggcggtaccgagctgatccgccgcaagctcggcaaagatgcatacgcaatgacgatcactctgctgctcaactccgagggcaagaagatgggtaagactcagagcggcgccgtatggcttgatccgaacaagacttctccgttcgatttctaccagtactggagaaacgtggcagatgcagacgtactcaaatgcctgcgtatgctgactttcctgccgcttgagcagatcgatgagatggacaagtgggaaggaagccagctcaatcaggcaaaggagatccttgcttacgagctgaccgcactggtacacggcgaggaggaagcaaagaaggcgcaggaaggcgcacgcgccctgttctccatgggaaatgcagagcatatgccgaccgcagagctttttgacgaggacttcaccgaggatgcgatcgacatcgtatccctgcttcacaaatccggtctggcaaatacccgttccgagggacgccgtgccgtagagcagggcggtgtaaccgcagacggcgagaagatcaccgacccgaaggcaacacttgcaaaagaaaagtttgagggtgacggaatcatcgtaaagaaaggaaagaagaacttccggaaagtggttctgaaatagagaaataaagaaataaagaaaccgaggggctattgcaaaacggatgagaaatcatctgattttgcaacagcctctttgtttgtccggcagaatgtgttaagataactgtggcagcagtttggtcaaagagaatattcacagatggtcagaaagatgactgcctcaaaagcaattcattataataatgtaactgttcagaaccacctccaaaatgctgcgcatttcgtcggtgtggcgtatccgccaaatagatttccatgtaaaagtgttcattcatgcaagcatgattcacacttttgcatgaaaatctgcttggctctgaacagttacataataatgaagaaacgagagaatgaaattgtgctgtaaagagattgatagaaagcggttcattcgcatatagtgatagagagatttcatcccggaggaattgcgggaatggtgcggagtattttgtggcggcttatcggctgtctttgcttctggtggagtctgggactggcgctgtttttcatttcttttggtgtaaatcggattgagaaggccgttcagaacagtgcgaacccggagcgaatattaagcaatcagagaccagatagaaatacagatgcagaatttcaggattctgttcagacaatggaaaatacaggaatggggcaatctgcagcggtgcaggtttcggaaaacagttccataagagctgagaaaacgatcaccgcaaaagttgccctcaccttcgacgatggtccgcaccccgtttatacgccacagcttcttgacggactgaatgagcgcggtgtccatgccaccttttttgtggtaggtaaaaacatcctaggcaatgaggcacttctgaagcgaatggaaacggaaggtcatctgatcggaaaccatacgtacagtcatgtgaagctttctgagcttgatattgccagagcatgtgcagaggtggagaaaacgaatgcgctgatttgtgaggtgaccggaaaagagccggagtttatccgtccgccgtttggagagtggaagaaggcaatggagtgcagctttgagatgatcccagtgctttgggacgtggatccgctcgactggacgacaaaaaatacggcactggtcgtagaacgcgtgctgaaggacacgaagccgggggacattattttactgcacgactattatcagtcatcggttgatgcggcgctggggatcgtggatgcgcttacggaacgcggatacaaatttgtgacggtggatgaattgattcttgagtaaaagatagaatgaacacagagattttttgttgacaggaaattagatgccacgtagcaggttttgtgaaagaatcgcttattaatttggaaaaaagaaatatattgtggcagatcagaaaagtaccgaaaggataacatacaaaccatggatttatttgaatacgcaagaacaaaaacaatgaaaacagaagcgccgcttgcatcgcgcatccggccacggacgctggatgaggtggtcggacagcagcatatcattggaaaggataaactgctgtaccgcgcgatctctgcagataaattaagctcgctgattttttacggaccgcctggtacaggcaagacgacgctggcaaaggtcattgcaaacacgacaagtgcggagtttacgcagatcaatgcgacggtagccggaaaaaaggacatggaagaggtcgtaaaggcggcgaaggaaaaccttggcatgtacggcaaaaagacgattctttttgtggacgagattcatcgctttaataaaggccagcaggattatcttctgccgtttgtggaggatggtacgttaattttgattggagcgacgactgaaaatccgtactttgaggtcaacggcgctctgctttcccgttccgtgatttttgaactgaaaccgcttcaaaaggaggacatcctgacgcttctctaccgcgcggttagtgacaaagagcgtggcatgggagcatacaatgcggtgctggaagaggatgcagcagaatttctggcggatatcgcaggaggtgatgcgcgttcagccttaaatgcggttgaacttggtattctgacaaccacgccgtctgcggacgggaaaattcatatcacagtagaagtggcgtcggagtgtattcagaagcgtgtggtacggtatgataaaagcggagacagccattatgataccatttccgcatttatcaagagtatgcgcggatcggatccggatgcggcggtctattatctggcgcggatgctgtacgccggtgaggatgtcaaattcattgcgcgccgcattatgatctgtgcatcggaggatgtgggaaatgccgatccccaggcattgcaggtggcagtagcagcggcacaggctgtggaacgcatcggaatgccggaatcacagctgatcctttcgcaggcagcgctttatgtggcgacggcgccgaaaagcaactccgcgacaaatgcgatttttgatgcaatggaagctgtgaagcagcagccggccgctattccgccgcatttgcaggacagccattacggcggtgcagcaaagcttggccacggaatcggttatgaatacgcacatgattttccgaagcatttttcgcatcagcagtatctgccggatggactgacggaccggagattttatgtgccatcggaaaacggttacgagaaaacgatccggcggtatcttgactggattcacgataaggaggagtaaggatgaagctggaagaccggcctggaatcaaaaagctggaaaaagcggtaaatatcaactgggtgaagattgctgtgctcgcagtgcttgcctgtctttgcattaaatattccgaccatgtgattgaaacgattcggctgatcgtttatacaatgcggccgctgttttacggacttgcgattgcatatgtgctgaatattttcatgaaaaaactggaaaaaatctattttccgaagaaaacagacgcgtgggttacaaaaacgcgccgtccggtgtgtgtgtttgccagtattattctcgtgctggtgctggctgttatgctgatcggtctggttgtgccgtccttactggatgccgtccatgtaataacaaaggatatcccaagtgcatttatacggtttcagaagtggctgtccgggattctggagaattcaccggagttgcagcagtacgttgacagccttgatatcgactggaattctacgttccgcaagatcggagattttctttcaaagggaattggggatctgtttaattctgcattttcagttgccaatattattgtaagctttttgtttaccggactgatttcggttattttttctatttatatgctctttggaaaagaacggctgcagtaccagctgagaaagcttgcaacggtctatgtggcggaggggattacaggaccggtacagcgttttctgactcttgcaaatgagacatttacaagctatatcatcgggcagattacggaggcgattattcttggcacgctgtgcggcgccggtatgtttatcctgcggctgccgtacgcactgatgacaggtgtgatcgtcggttccacagcactgattccggttatgggtgcatatatcggagcatttgtcggtacggtgatgatacttacgataaatccgttaaaagcgctggagtttttgatctacatcgcgattctgcagcaggtggagggaaatctgatctatccacgcgtggtcggcggctcgattgggctgcctggcatctgggtgctggcggcagtgacgattggcggtggcttgtttggcattctgggtatgctgatcggcgttccactcacggcgactgtgtataaatgggtacgggcggatgtgaataagaagctggcggccaggtaaaaacagatgagaatgcccaaaatccgaaaaaagcgtttgacaagcacagggggaaaatgatattatctatcaataattgaaaaaagacacctgtgagggagtagttagcatatcggatatgtgatgagtcaacatactgatcggacatcgatctggcttatcttaaataacgagactcatgtacagcatacgtagtttacgtactgtgcatgagtcttttttatgtccgtcagaagcgattcggataagctgtctgcttagctgtaaggggcagtaagccgcgagacaggcagcgattacgacaggctgatattcacgcttccacgttctgcccgcagatgagacgaaaatgtcacagaacagatatgtgtgcactcgcacggtggaaaactcaaaaagaaatggagaagcattatgggaatcatagaactgtttttgctggcagtcggactttcgatggacgcgtttgcggtttccgtctgtaaaggccttgcaatgaaaaaatgtacgatcaaaaaagcaatgacctgcggtatctggtttggaggctttcaggcattgatgccggcgatcggctatctgctcggttcaagatttgagcagtacatcacagcggtcgatcactggatcacattcactttgctgggctttatcggagtgagcatggtcatggaagcctgttcaaagaaagaagaggagcagctggacgaatccctggatataaagaccatgtttcttctcgcggtggcaacgagtatcgatgcgcttgcagtcggcatcacattcgcattcctgccggatacgaacgtaccggtggcagtgttttttatcggagcaatcacattccttctctccacacttggcgtaaagatcggaaacgtgttcggagagcgttacaaaaagaaagcagagatcacaggcggcgtcatcctgatcctgcttggcaccaaaatattgctggagcacctcggaatcctcgcatccctgttctgaaaaacaacattgtaatttgcccatgagtgttataaaatgtcatcaacagttccgggcagcagcaaaatgcactgaaagcccgatgcaggcttgcctgcgagagggctggaagtgcattttgggatggacgggacgtccatcagccgcggacagcagcaacaaagttgcggaaagtcggcgaagccgacgggtctgcggcctgagcccggaacgtagggaaaagcagcagcaaaatgcagagagcatcggacgcaggcttgcctgcgagagggctggaagtgcatttttgagcccggaacgcagggcaaaatgcagagaacacatccgagaaacgaggatccatatgccacttgatatgaaagacaacatcgcggaggcagcccgcaggctcctgatggagaacaatgtgaaaaagctgaccgtaaaggatatcgtggaggagtgccagatcacgaggcagaccttttactatcattttcaggacattccggaactgatcagctgggtgatcgagcgggaaacggaaagactgcgcagcaaggcagaggcacaggaagacccggagaagcggctgaaatttttctttgcagtttccttaaatgcaatgccatatatcaggcagagcatgctcacaaattatcgtgatgagatcggacggatccttctggcgcatttcaggaggatgatcgaagagagcgctgagggaaaggaacttgcgcatagatgcagtcaggcagagtttgatctgattatacggtatcacagcatggcgatccttgggattcttgcaagctggagtgaagaggatacgaagcatcaggatgaggttgtgcatcagatttataagatgatcgcagaaggaataaaaataaaacaataaatgattttacaaaaatgccgaagtgtaaggattttttacactttggcatttttgtctatacacgatgagaaaggtgtcagttgaaaacagcgcagaaaaatataaaatgaaggtaactgttcagagccaacctccaaaatgctacgcatttcgtcggtgtggcgtatccgccaaataaaatttcaaaaacaggcttaaaaatgcaagcattttccgccttttttatgaaattttgcttggctctgaacagttacaaatgaagacaaccattcagaaaaagaaaagcacctgtgtggtgatgaaacaaaaggatgagcgtgaacgcaagtcgtgaagcggattgcgaatgtccgctttacaaggaggaggggatcggatgagcaacgagatacttgccgtaaagctctgcgaactagatcggcgcgtaggaagaatgcatggcaggatcctgaatctggagcatgcgccgcaggaagtgctgcagcaggaaatcgaagcactgcgcagagaatatcaggaaaatgagcggatgctcaaaaataatctgcgtttttcgagagcgccgtctgtagccgcactctgtcaggcttatacagaggttgaaaaggtgttggaacggcttcgagaacagatggaagaggaaagcagagaaaataaggcagcacaaagcggcggacaaaaggaaacgtcggctctgatggaaaatgatccggtcgaagaaaaacttctctttgcggaatatgcgattgattttgcaatgcaggccgcggaccgggcactgttgatttcgatggaagccacagaagcggagcaggcgaagaaggaagagcaatgcatcaccccaaaaaggaggactgtacgatgaaagaagtaaaaaaccccagaaaaccactgatctactactacgggatcgcggttctggtcattttcttatttaatctgatcgtaacgccggttctgatgaaccgtcaggtcaaagaagtggattacggtacttttatggaaatgatcgacaaaaaaaatatcggaaaggtcgaagtcgatgactctgagattttgtttaccgataaggagaacgaaacaatctacaagacgggtgcaatgaacgatccgacattgacacagcgtctgtatgactgtggtgcaaagttttcaaaggatgttgaccagacgatgtcgccgctgctcagcggaattctgagctttgtcgtgccgttgctgatcttttttgtccttggtcagtatatgagtaaaaagctgatcgagcaggcaggcggaaaaaacgcgatgagctttggaatgggtaagagcaacgcgaaaatttatgtacagtccacgcagggtattcatttcagcgatgtagccggagaagatgaggcgaaggaaagccttaaggaaatcgtggattatctgcacaacccggacaaatacacgcaggtcggtgcatcaatgccgaagggcattctgcttgtaggccctccaggaaccggaaaaacgatgctggccaaggctgttgcaggtgaggcacaggtgccgttcttttcaatttccggatctgaattcgtggaaatgtttgtcggcatgggcgcatcaaaggtgcgtgatctgtttaaacaggcaaaggaaaaagcaccgtgtatcgtatttattgatgagattgatgcaatcggcaagaaacgtgacggtcagatgggcgggaatgatgagcgtgagcagacgctgaatcagctgctgaccgagatggacggttttgaaggaaataacggcgtcatgattctggcggcgacaaaccggccggaatctctggatccggcgctgacaagaccgggccgttttgaccggagagtaccggtcgagcttccggatttgcagggccgtgaggcaatcctgaaagtacatgcaaagaagatcaaagtggcagatgatgtgaattttcacacaatcgcaagaatggcatccggtgcgtcgggcgcagagcttgcaaatatcgtcaacgaggcggcacttcgggcggtacgtgacaatcggacagtagtcaacgaagcagatctcgaagaaagcatcgaaacagtcattgccggttaccagaagaaaaatgcagtgctttctgatcaggaacgcaaggtggtttcttatcatgagatcggacatgcgctggttgcggcgttgcaaactcactctgcgccggttcagaagatcaccattatcccgcgtacatcaggggcactcggctatacgatgcaggtagagcagggggataagtatctgctgacgaagcaggaactggagaataaaatcgcaacatttacaggtggccgtgcagcagaggaaatcgtttttcatgagatcacgacaggcgcgtcaaatgatatcgagcaggcgacgaagctggcccgttcaatgatcaccagatatggcatgagcgaggaatttgatatggtggcgatggagaccgtcacaaatcagtatctgggtggagatacctctcttgcatgctcagcagagacgcagaaggagattgacgagaaggtagtggcgattgtaaaagaacagcacgaaaaagcaaagaagctgctggaagaaaaccgcgaagtcctggataagcttgccatgtatctgtgcgagaaggagacgatcactggcgaggaattcatggagatcctgaacaaagaaggaggaatgcagaaatgagagagcgttccagatttgactgggtagaactgattgagggaattttactgatcctgcttggattttacagtatttcgcatccgggcagtgctctgaccggtgtggtactgttttacgggctggttgcaattgtcacaggaatcgcagatattgtgttttatgtaaaggtagaggagcatacgggctttggtccgacggtgtccctggtttccggggttttaagcgtaatggcaggcgtgatgctgcttgtttatccgcaggcaggcatgtggatcctcacactgctgattccgatctggtttcttgcacactgtatttccaggctctgccgtctgcgctatgtccggatgatgggctggaaaacatggtattacatttcgctggtgatcaatatcatcggaatcatatttggctgcctgatgatcgtaaggccgtggatcacagtgatgtcggcagactggctgatctgtttttacctgattttgcttggtgttgacagcattgtgctggcagtgaggaactgactcagggtattggggagaggcgtcatcatgataaaagggagagtaaggatcttgagtccttactctcccttttgacactggtgcatcattgtaaaacggacattcgcaatccgcttcgcttatctgcggtaaagcggacattcgcaatccgcttcgctacttgctcatgaacgcagtagcttcgcttatctgcgttcaaaataatataccactcacttgtccgcaaattcgattgtggaatatccgcctggctcagatgcgcactgtcatagccagtgtcagtctcttacaatcgcacagaaccggcccttgcttgccgcgatgaaatcttccggggcaagctccatctgatgcccgatttttccggcgcttacgatcatttttggcagagcctgtgcggattcatgcacgaaaacaggatactgctttttcataccgatggcggtacagccgccgcgcacatagccggtgattgcagtgatatctttgacgtggatcatcgccagcgatttgacccctgcttcgtgggcggcttttttcaggtccagttcgtcgtcgatcggaagcacgaagacgtaatactcacccgacgggcttactgtgacgagcgttttaaacatgatttcgtgtgcaaatccgagctgatctgccgtgtgctgtgcgtcggtgaattcgtcgcactcgtaggaataggtgttataggaaattttcatgcggtccagaatccgcattgcatttgtttttaattctttattttttgccatggtaaagacctccgtatgatgccgcgtataccggcttttgccggatcgggcagggttcgaagcggatgatgtagtaccgctttgatttcagtaacacagtatacaaccgggagaaagatttgtacagagaagaattggaaaaattgtgtaggcgcagatgcgggctgtgtcagctaaaatggaaggaatttcaggaaaagtacgtggcacaggcaaatggaaagccggaacagatttgccggaaagggcgcccggagacagaactttgtgaagccggtcatcatatattaaatagtagctgttcaaaacagatatttgtagtttattcctctggcggagcgtttcaggttccgtaccgaaaacagtaagaaattattaagaaagggatagaaattatgggatataataatgaaatgctgtgcagaagtacaaatatgaatttggaggacattgagcgggagcgggagatgagcggctggaatcagtatgtgggagaagaggaagagctggagcacaatgccggaaacgcacaggaaatacggacggaggaaaaggaaagaaaacgggaaggaaagccggacggaagtacaggaatgccaatggaggagtcggacggacagggatatgcagaacagctggatgcagaaatgatatggcacatcgaaaaccagaaggcagtggagcgtgatctgcgccgtatgcaggcgatgtatccggaaaccgcgcgcatcctgctgccgtatgtggaggaggcgtgtgacgagcttgaatatgagggcagcatgatgtatgatgaacgcccggattatgaaacggtgctgcgtatccgggataaggtgctggaaaaagcaaaggatgagtttgaaccgatggagccgccagaacgggatgaaatgctgacgatgcagtatcggccgggaccgccgcgcaggcgccggggcaactggcctggcgactttgcgcagatgatgctgcttgaggagatgcatcggagacgctgccggagctgcaggcggtggtaaggattttcgaatatgataaaaaacttgttcaaatctattccagatagtatactggagagcgaagcggatattcccaatcagctttgctgcccgggtcaaagcagatattcgcaatccgcttcgctacttgcttgactcggttaaatacaaatgcacaattgaaataaggagaatttcatttacatggaagaattaaaaaaactgctggaaatcatcctgagcgatgaactgcagatgatggtcttaagcgcaccgagaaagaaagagtcttatctgcgtgtgcggatccgcccagtggagcaccgcggagcgctcgcttttcaggcggcatgctgggatggaaagaaagaatttcatacaaacaatacaaaagaagaaatgatacagaaggtgctggcctggatggagacagattatcgccagctgcaggcagagactgtgagccagaccgcctccgtgctggtcagcaaaaaaggaaaagtgactgtgaagacgaagcacaggagcataccggtggcgaaggcagacatgggtcacaaccgcacgaaacagtatctgcttccggaaggtgagccggtgccgtttcttgtaaagcttggcgtgatgacgatggaagggaaggtcgtaaaggcaaagtatgataaattccgccagatcaaccgttttttggaatttatcgaggatatctgcccggtgctgagccggaaccgggagatctcgatgatcgattttggatgcggaaagtcgtatctgacctttgcaatgtattactatctgcatgaaaagaagggatttgacctgcggatcacggggcttgacctgaaggaggatgtgatcgctcactgcaacgcgctggcagaggaatttgggtatgagaagctgaaattcctgcacggcgatatcgcagactatgagggaaccgatcaggtagatcttgtggtgacgctgcatgcatgcgatacagcaacggattatgcgctggccaaggcagtcgcatggaatgcaaaggcgatcctctctgttccgtgctgtcagcacgagctgaaccgtcagatcagaaatgaggtactggggccggtgctgaaatatgggcttctcaaagaacggatggcagcgcttctcactgatggcctgcgtgcgtcgatgctggagcgggccggctatcaggtgcaggtgcttgagtttatcgatatggagcatacgccgaaaaatatcctgatccgtgcggtgaaggaacctgaaaaaatccggcgtgcaggcggaaaacagacggacggcctgcaggcgtgtatggatttcctgcaggtacatccgacgctgcagaccttacttgaagaccagaagagagtcaccgatgattttcaggtgaaaaaaaattcagaaggcaaaccggcagagcttgcagaaggtacaaagaatatgacccaggtatcagaaaaaggagctcaggcggcagaaggaatacaggaggataagaaatgcgcggaaaactgagaacagtcaaaaatgcagtagtgcatgtcgtcctgctggcggtgatttttctggcggcggtcgtgctgtttgagcgctggatcaatgaatctttgccgctggaggccgaagagatggcaagctcaacatttcctcttgtctatattcacgacaatggcacaaattacaactgcctgcacggttatgcggcaaagatggatgtcaattatatccgtgatacgctgactgtattaaatgacgatcatcagctggacattcagatccagccgtttaatatgagcgtggaaaacgtatcttacgaggtcctgacactggacggcagtgagtcactggaaaatacacgggtcgtttcgctgaaagaagaaaataattacttaaatgccacactgcagatccagaataaaatgctgatgaaccaggaatacattctgcagattcaggttacggcgggcggaagagatatttatttttatacgaggcttgtgctggaggacggactgcatcttgacgaataccttgattttgtggcaggcttctatgaaaagtgcgtcaacggaacggatgagagcacactggcggcagccgtggagccggatgagacgacagatcagagatcctcgatggcatctgtcaacattcatgattcggttgcccggttgatgtggcagaatctgaaaccgcaggtttattacaaaccgacaccgagcctcgtggatatcaatgggacgaccgcgtcgtttgtgctgaattatcgaatttcgtctgtcagcgatacgggtgtcaccgaaatctataatgtaaaggaattttaccggctgcgttatacggattcgcgtgttttcctgcttgatttcacgagaaatacggaggaagtctttgatacgaatgatgacgtgatcagcgcaaagggcattaatcttggaattgcctcctcagacatttcctatgcgatggatccggacaaaaaaatcattgcgttcgtgcaggaaaatgaactgtggtcttatgagattaacagcggccgcatgacgcggatctttgggtttccgcagaaagaaaacatggattaccgcgatttttatgataaaaatgagatcaaaatcctgcgggtggatgcggcaggcaatgtctggttctgtgtgtccggctatatgaaccgcggaacacatgaaggagaaaacggtgtcgcactgtactattatgagcaggcatcgtctaccgtggaggaggctgcatttctgcagtcgatggaaagctatgcccgcctgaagcttgatgtagatgcactggcatatatcacggacaatgaggacagcttttatattctgcttgaagagaatatttatcaggtaaacctcaatacaaaaacgtatgagctggtggctgagggaatccacaatgaatgttatgcaggctccgattcaaaccggtatttcgcatggctggaagagggagaacgctacaattcaagtaccctgcaccgcatagatctggagaccggcctggtacaggagattacgtgcggggagaatgagcggcttcgtccggttgcatttatgggagaggatctggtctacgggacggcgaaaacgtcagatctggatctctcacatgaaggaaatcagctgtttccgatgtatcgtctgacgatcgtaaatgcggcaggagaagaggtgaaaacgtatcagccagatggcgtgtatgtcatgaaggctgagaaaaccgaaaacactctgctgctcacaagagcggtaaagcagggagaagcatacacggagacaacgactgacaatatcgtaagctcggatacaaaggaagaggtagaatacggtgcggcgacgcagaaatccaccagaaaaggcggagaaacgatcctgcgtgtcggtcagagcttaagcgataaaaaagtccagaccgtaaatgcaaaactgctgaccggcggggatggtacatcgatcgcgattccggtcaaccagaagcatgagcagctgtattacgtctacgccaggggaagcctggagagtatctggacatctgcgggtgaggcgatccgcagggcagatgagcaggtaggtgttgtggtgaacgatgccaaagagtttgtctgggagcgtggaaataaagagaacacggcgcagattccagtagaaaatattccggtggcattccagagcggaagcatggatacggccgcactgacatccgcgctgggaaagacggcgatcgacttgaccggatgtactctggatgagattctctacttcgtcagcaataagcgtccggttcttgcagcggcagatggcggatgcgtgatcattaccggctatgatgattatggcaacctgatcctgctgaaaccgggagagactgagacctacttctatggaccggaagacagtcaggctctgtttgaggcagccggaaatcagtttgtcacatatctgaccggtatggagaactgaagcgggaaatgtcagaaaatagaaggaaaagtcagatgaacatgcgttttttctgtgatacggcatggaatcacaaaaatgtgcaaagtaaaattgcacaaaaaacaggaaaaatatagaaattcggatgtggggagaaaagtttataaactttctctccacagattctgtggataaaaaaggttgaaaacagagttatacaccgagttatccacattatccacattttcgggtgtggacagagcggtttacataggtatttttttagaacgaacgttttgtgtattgtgataaaatgtagaaaaagcgagaaaagggaagaacagaagtttttaaaaccgaagtttgcaaatttttgcaaagagtcagaatagccagaatattctgttggaatagttcatgaaacattttcagacacgcgctaaaataaaagcagggctctgaccggatggccagaaaccctgctttgttttgctttttaaagtttttcactgcttcaattgcaaggaacagtaaggctgtttgactttagttccagtagcgcacaatgcggatcggtgtctggtagttgtacggggaaaccttgatgcctcctcttggatacggctgagagttgctcgcgtgaacgatctgaccgtttccgatgtagatagctacatgggaagcataattgccggagccgtagaatacgaggtcgcccggtttcatctcggaaacagagacgacagtcgccggcttgtaaccgagaccaatgtaataggatgacgggccatgcatctggtcatctgccacacgaagaagcgtgatgccgaagtgtgcgaagacagtctggacaaagccggagcagtcagcaccgtttgtcaggctggtaccgccgtaaacgtaaggattgccaacatactgcagtgcaaagtttgcaatctcagcgcccctggaatcatctggtatcttaatgctttcctctgagataatgacgccgctctcattgatcgtgtatcgtttggtaccgacgtcgatcgtggtgccgcgtgcaagggttccttccgggtagaaataatattttttaccgccaatggtttgaataccggtgaccattgcaccatcagcccccacataatagcggtcatttccgctgttgaaatagagccagcggctgcggatcatattgccttctttatcaaaataatattttttgccgtctaccgtgacccatccggtctgcttctgccggtctgttcttgcaccggtcgcatcgacgtaatatttgccgacccaggtggatttcgcgagctttccggagctgtagaagtaataatatttgccgctgatgcgaacccatttgctcttgactgcgctgccgtccgcctggaaataatacgtatcatttccgattgcgattttggaattcacgatttttttcccggtggtcgtatcgaagtagtacagagcgcctttgattgcatttaatcccttgagcagggctccggagctgttggcatagtacatgttgttcagaatccatgtttttttggcaagatggccatttgtgcggatcagataataggtcttgccgtttaccgtgacaaagccgagctgccggatgccgctttcattgaagtaatagacatatttgccgactgtctggaatccggtcagcatgtagccgtatttgttgacataccgcatgccgctgcctgtgctgatccattcgtctttgacgagctttccgttgctgccgaagtaataggtgtggtttttgtaggtgatccagccggtctgctttgctcctgatgtggagaaatagtacgtgtcgcttccgacggaggtccagcctaccgcgacggaaccgtcattctttaagtattttccgctgaaccactggttacgcaggataacgcctttggccggtccggcgtagtagcgcctgccgccgatcgtcagccagcccttctggagtgctccggtagaaggattcaggtaatagagcttgccttccagctgcagccagccctttaccttatttccttttgcgtcataataataagtggaactgccttttgtgatccagccgtaattgcgtgtcgcaccggtcgctttgccgttcgcgccgacatattttccttcaatccaggtattggtggccagctttccgtcagagtagaagtaatagcttccgacccagcgggagacagccagagcaccggtcttgtctgcataatagcgggtctttttgtcggcagcggtgatccagccggtccgcatgacacccttcggactgaaataatacatgactttgtcgatcgtctggatgccggtggccatgattccgttttcgtcaaaatagtagcgctgtgccgtgccgccggaagtaagtgaaagccatccggtgcggcgtgtaccgtttgcgttgaagtagtaggtagcgccgtttgcaagcgtgtgaaaaccggtctgcataataccatttttattaaaatagtaccagttggatccgatttttttcatgccggtcagatacccgggtgctttcgtctgggtataaatctttccgttgggcgtagtcttccaggctgcatttgcagacggagaaggactgccgaacgcaagaaaaccggcaagggcaagtgtcagaaatacattcccttttcttgttttcatatgaaatctctccttgattttgcatgtgaaaaaaattacaattcttttacatcttaattaaaatactacctgatgtttgtaaaaaagtcaacagtgctgcttaatatttaccagaatctggacgatttttttgcggttttttcctgattttacgcgattgcttgccaattggaagggcgaatggtaaaatcgtagcagtgtccggaagaaaacggatcccaaagataaaatcctgattaccggaaaggcaggagcgagtgaaaggaacttctgaaaaagcggaaagtgccgccgggaaacaggagagaaacggaagcagaaagactggatacgaaaaaaagaaagcgctggagtaaaaaacaggtaactgttcagagccaacctccaaaatgctacgcatttcgtcggtgtggcgtatccgccaaataaaatttcaaaaacaggcttaaaaatgcaagcattttccgcctgttttatgaaattttgcttggctctgaacagttacaaaaacagaaaatccggtgagaaaatgaagaatagaatacgaggaggagaaaggatgcgcttgagaaatataccaggttcccgcgagacgatcgcagcgagcgaatttgtcgtacatgaggatgtgatgcgggagaaaaaaggaaactggaataccgtatttggcaatgacaatccgatcagcatcgaggttggtatgggaaagggaaggtttatcacagagctggcgggacagaacccggataaaaattatgtcgggatcgaaaaatattcaagtgtgctgctgcgtgcgctggaaaagcgggagacactgccggagctgaccaatctgtattttctccgtatggatgcggaggatctgccggaggtgttcgggaaaaatgaagtatcaaccatctatctgaatttttctgatccgtggccgaaggaccgccatgcgaagcgtcgcctgccaagccgggaatttctggcacgctatgaccagatcttaaagccggaagggaaagtcgaatttaagaccgacaaccgcggtttgtttgatttcgcgctggaagaagtgaaagaggcaggctggaagcttgaagtatgtacctttgacctgcatcatgatgaggaattgatgaaaggaaatatcatgaccgagtatgaggagcgtttttcaagccagggcaatccgatctgcaagatgatcatttcgcggtagtgcacgtctgtgaactgaaccggggcacaggaagaagcatatggcataagatagagaaaagcgatttcaaatattttccgggaacgatcagacgcctcctgtaatcggagtgcagtgatgcccggagaggcagtggcaggaaaggggaagccttatgcggattcgcggagtacggagaaaaatctaccttcttacgtatgataaaaaatacctgaatcagcgggcactgcggatcaggcgttcctttgatgaggtgcggaaaatactggagcggatctgaacgcacatcttgcagaaagcatttgtaaaacacactctaagacagaaaatatggagccggatgaattaatcatccagccccatatttttgattgcatcgtcgactgctttttcagaaatgttctttttattaagccgaaactgcaggtagaggtcaagcagataatttaagatcgcgacaaccggaacaccgaggaacataccgatgacgccgaacatgcttccgccaactgtaatcgcgaaaatgatccacagcggtttcatgccggttgactcgccgaggatcttcgggccgaggatcagtccgtcgaactgctgcagacagagcaccatgatggcaaagaccagagccttgaccggctgcacaaacagcaggatcaggatgccgggcactgcgccgataaacggtccgaaatacgggatcatgtttgtgacgccgacgatcacactgataaacagggtatatggcaactgcaggatcgtcatcaggatgaagcacagcacaccgatgatcgcggaatcgataaattttccggttacgaagctgctgaacagccggttgcattccgagaggatctcatggcaggccgggatgtgcttctgcgggagaaatgcataaatgattttccagcagctgcgcatcagacgtttcttatcatacagcatataaatagaaacgatgatcgtgatcagcaggttgacgatccagtttgcgatccacatggagaccgaataaatggcaggaaccatgtttgtagcaaaattacgaagcgttgtgatgaggtccgggaccgcatcggtgatcggtttggtgatcgcttcgatgtcgagatccgggaacttctgctgcaggtctgcgatcagcttcagcagcgaactgtaagcgccggggatgaagttgacgaaatcaacgatgttgttcatgacctccggaagaatgtagacgaggatcagaacagcaaaaccgagcacgatcacgtaggtaatcaggatcgcgaggatcttgtggacggctttgttgaggcggaatttaaacttctttgagagcagctccattccgtgataaaatacgcggaccatcggatttaaaatataggcgagcagtgcgccgaaaatgaacgggctgagtacgcctgcgatctgaccgaaccatgcctttgtcttttcaatatcaataatcgctttgaagataattgcggatgcgaccagcatgatcagtccgtaaatacagatcgtaaaataacggttgttcttgatgaaacgctggctttcaccaggcggagtatcatcggaagggtgaaagacagagtggcgtggaacctctccctctgctttggaggaggctgattccggtataaaagcggaagtatttcttgcagaatcgtgaatagctgcagctgtgttattgtgtactgttctgccggatccggcagaacgggaagatgatcgtttcataaatagtgaattagtcctttcctgtagactcttcctatgattataaccacttgccagaccagatgcaagcaaacagagggtaaaaaaagcgcatagaattatgaagaaaatataaactcagggacaaattgaagcaattgaaaaaaatttaaaaaaattaaaaaaaacacttgcatttcaaaaaatctgtgctataataagtcttgcttgtgagggaaacaaagaaacaaacaaaacgagcaagggaaaattgaatatgcgcgattagctcagttggtagagcacctgactcttaatcagggtgtccagggttcgagcccctgatcgcgcactgaaagcactgtttttgtggacatggagccacggggacggtgttttttttgttcatctttcgggaaataaaagaattgatttcattatagtgttgtgggataaagcttgttaataaaagaagaatgcggtatttttggcagtttggttggacaataacgcaaaaataataaaaaggataagcaaatttctgtacatattggataacatacgttaaaatagataccagacatcgttgtaaagcggacattcgcaatccgcttcactacttgctcatgaacgcagtcgcttcgcgacctgtcagtgggagctttcaactcccactgacataagcatcccccttacccaccgcttagtgctccgcgcacttgaagcgggggaatgcttatctgcgttcaaaataacgatataccagaactgtgattcacgatggcactgccagaggaaagtgagcggaaaggaaaagaaaagaatggataaatttgtatgtgcggcagattacccggtggtacagaccgaggcgggaaagctgcggggatatgtgtggaacgatacctttatttttaaaggaattaaatatgcggatgcaaagcggtttcggagaccggaaaaggtacagccgtgggagggaatcaaggatgcgcagtcgtacggcatggtgtgtccgctgcttgagcaggataagccgggaatggagcttttggtaccgcatatgtactggccgatggatgaaaactgccagtatctgaatatctggacacagagtattgacaaagaggcaaaaaaaccggttatggtgtggctgcacggcggcggattttttgcaggttcttcgattgagcagatcgcgtatgacggtgaaaacatgagccgtgagggcgacgttgtggtcgtatcgttaaaccaccgcctgaatgtgctcggttatctggatctatctccatttggagaggagtacgaggcttcggcaaatgtgggaagctttgatatgatcgcggcgcttcagtgggtacgggacaacatcgcggcattcggaggtgacccggacaatgtgacgatcttcggtcagtccggcggcggagcaaaggtatggaccctgatgcagatgcctgcagcagacggtctgtttcataaaggaattgtacagagcggcatttacgagatgctcggggatgtcgaaaatcaggacggtacgcagattgtggaagcaattttgaaggaacttgggcttggacgcggtgacgtaaagcagctggagacgatcccgtacgatcagctggcagcagcatacaaaaaggcagctccggcgatccaggcatcaggcggatatgtcggcaatgaaccgcatatcagcaaagattatgtgggtgatccgatccatcatggattccgcgagcatgctcagaaaattccggtactgatcggtacggtgcttggcgaatttgatttccggatgccgcttgcgggcaaaagggaatttgacagagaaacggcactttcatatgtaaggcagcgtttcggtgacggagcagagcagatcatggatctgtttgcgcagatttatccggagaaatgttcggtagatgcaagatcggtggattttctgttccggggaccgacgatcgactttatcaaagagcgttcaaagacaccggagagtgttacatactcttatcagctgacgtatgattttccggtatttgacggcaaactggcatggcactgttcggaaattccgtacgtgttccacaatatggataaggttccggtatgtgcaggagcaggcggggaacagctgcaggagacgatctttggcagctggatgcgatttgccaaaacagggagt

SEQ ID NO: 1466 - DNA, 1688 bp, Unknown
  16S sequences of unknown bacteria
caggctgcgacggccttcgcgcacgctgcccagaccggcaaggagcattttgcaccctttgcgccgttgtttataaatccgtccacatcctcgggcggatagccgaggaaaagaccgatttcgtgaggaaattcatttccgctttttatgcgcttcataagctcaacaatgcaaagctccgagcttttaacaggatattcccttttctttaaaatatccttggcacggctttttttcaggtcgttttccaatctgtcgggacggtacatatacacaagcgcccttccgtttcgataacgcatcggcaaaaatctcacgccctttggcacaagtcggttgttaaaatcccgaaccgagttgtttagctcctcacgggtctttgcgtcgcagcaaaaaagacttcccgtttttagacccgccatggtgggagagcagttttgaataacctgacgttcggacattttgtcacctcaaatctcggttagcttatactaaccacattttaaaaaatataaaacttaaaatagaaaaatcgcattcgaaacagttagcatgcgctaacttcatcgtgatgttaccacaatcattctcttttgtcaatggtttttttcaaaaagacttgaaaaataaattcggctgtggtatatttagtaaaacgcattgatgaagttcaagtaagccatgcggttaaatcacaaagagaatggacggcgggcaaccgggtgtgaccgtcctgtggtttcgtgtgtgccgaatttcccttcggagcggtcgggctgaaactttcagtaggctcggacggttgacgccgttatcggtcgaacgagtgtttgctctgttacggatatgtccgtttttgggcaaaaatttgggtggtaccgcggaagttttcggctttcgtccctttttcgggacggaagtcttattttttgtgaaaggacgaaacataatgaaagaacaacttaaggccataagcgaaaaagccacaaatgctcttaaaaacgttacggctcagtccgagcttgaggagcttcgcgtggcttttttgggaaaaaaaggagagctcaccggaatacttaaacaaatgggcaaactttcggcagaagagcgtcccgcaatgggacagctcgccaacacggtaagaagcgatatagaggcgaaaattgccgaaaaatccgccgcaatcaaaaaaatcgagcaggcaaaaaagcttgaaaaggaaaccattgacgtaactcttccgggtaaaaaatccgaaaaaggcggacttcatccccttaacaccgttcttaaggatatgataaacattttccaatccatgggatttgatgttgtggacggacccgaggttgaaaccgaatattacaactttgaggcgctcaacgttcccgccgatcaccccgcgagagatatgcaggacacattttatgtcggcgacggcctcattttgagaagccagacatcggcaacacagattcgtacaatggaaaaccgcaagccgcctatccgcatgatctgccccggcagagtttaccgtgcggacgatgttgacgccactcattctcccgtcttccaccaaattgagggacttgtcgtcgacaagggcattacaatgtgcgaccttaaaggcacacttgaacaattcgcgaaggaaatatacggttccgacaccaaggtcaaaacacgct

SEQ ID NO: 1467 - DNA, 2427 bp, Unknown
  16S sequences of unknown bacteria
tgtcaggtcgaggaatttcacttttgtttcgaccgtttcggcgatttttttcgatgtattatccgccgcgcgcccgattacggcgatgcctgtgcatacggagtgccatttgccggagagctctgtgagcgtgcgcacggcgtcgccgcggtcacgcggctttccgagagcttttacaccgtcaggagtgacgatggtgtcggagccgatgacgacggcgtccgggtcgttcagccgctcatatacggcttcagcctttctgagcgcgagctcgcggacgagatcacgcggcgcgagaccggtgatgttttcgtcgcagtcggatgttatgacctcgaactgtgcgccgagcatttcaagaagctcgcgtctgcgcggcgattgtgacgctaaaaccatacgtcttttcatctcgcgattgccctcccgataagcagagagagtattatgaatatgacggtcgcgagcgtgaggtcgacgcttattccgaaagtcagcctgagtatcccgagatcgagcaccataggcgactcaagtccgaaatcgactccgaacgcgagccatgagagaaagctgatcccgcggcagatgctgctgacaaagctcccgagcacgatcccgatcaggacgagaaacgcgttatatattctgctgtgtgacatcatgtcctccgatcacttgtttcctgtggagccgaacccgccgcttccgcgctctgtctcttcgaggctgtccgaggggatgaggctcgcgtggaagaccgggacgaacatgagctgcgcgacccgttcgccgggctcgatcgtgtacgcttcaccgctgagatttatcattgccgccattatctcaccgcggtagtcactgtcgacgacaccgattccgtttgagagggcgagacctttcttcgacgcgagaccgcttctcgcgcagactatcgccgcgatgttcatcgtttcgggcgcgatggcgatgccggtcggcacgagctttctctcgcccggcgctattgtcatcggctcgtccgcggcgtatctgagatcgagagccgcggagccgtcggtcgcgtaggcgggtatctgcgcgccggggcgcagggtctttatttttacgtttatttcgttcattttggaatcctccggatttttttatctgttgttgagccgtttttccacgcgtcaatgacggcggcggcttctttctttttttcatccgtgaatatgaagtgcgcagcgcctgagcagccctgaagctcgctctttctgtcgcacatccagagcggcaccgagttgtagagtatatttctgtgcctgaagcatcgtctcagcggaaacgcggtgtctctcctgtcgatgagaggcaggaatccgcgtccggcgcattcatcacacgaatagaattcctttatgcagcacttctggagcgtcatcagcggtatccgcccgtagaccgtaaaaggcagaccgagcgtccggagctgcggtatagtgagctccggcgacgcgatgaggtcggcgaaaccgagatcaagcagcgcgtccgccgtgtatctgttatagatattgagcctgtgatctccgtgcggaaccattcctgcgtccgtggcaagtttcaggtgtccgaggtttgacacgagcgcgtgacgtatcccgttatccgccgcttccctgagcatcccgcgtatctcgtctgtctccgagtcgaacacgaccggcggtacggcgacgccgttcacgacgtccctcagccacgctttgtcgcccatagcgtaataaagaaaatcatgaaagctctcgagagggatgaagacatactccgcgacctcgcgtatattttcaggtatttccctgaaattttcgaagcgcgcgctgcctgccgtatccgggatatcgcggtgcgcgggcggtccggaattgtctttcggagggcgcggcgggaagagcttttcggtgagctgtcctacggcgtcgcggcgcagtgcgttcagcgcggatatcggcagaatcgggtctccggatattgatatatcaatatttttcgccatgaacggcgtcccgccgagctttgtcagattcttcgcggcggtctcctcggtcagcgggcggttcagcgctttttctggagcctgtccggtgacggagacctcgttatctccgcagcgcattgtcagcattgatggctcaccgacggcgaatgacgctctgatatcggtctcacgtcgcctgttttccatgagatttgtataatccggcgcctgtgtcttcccggctgcggtgagcgccttgtcggcgtccgtgcgcactccgagcatatcatggtttatcttcttcacgaaatacccgtcggtgaagccgctccgcgagaagagcgcgcggagagcgttcatctcctccgccgtagcgtttcttccctcgtcgagcagccgtctcc

SEQ ID NO: 1468 - DNA, 6765 bp, Unknown
  16S sequences of unknown bacteria
tgtgccggaatgaagagcagtgggtggacactttgagccggctgatcgaagaccaagcgctaagacagcggattgggcggcaggcgtatgaatattgtaagaagcgctgcgtgacgatgtacaccggccgggggctggcagagtttttgcagagccgccgcacggaaaacatcgcgtttgtgctgccgtcgctgcaaatcagcggagggatcatggtggcgctgcgccacgccacgatgctgcaggatgcgggctatgatgtgatgctggttgacaatggcacgacggagggctggtgccagtatgaggggcatgagttcccggtggtgcaggccagaaacgtgcggtttggccggctggataaggcggtggcgacgatgtgggtgacggaggcagtgttggaggcctatccgaacatccgcgacaggtattaccttgtacagaattttgagacggatttttatgagcccaaggtgccgctgcgcatcggcgccaatatgacctatcgtccgcatgtgccgatgcagtttgtgaccatctctaaatggtgccaaaactggctggcggaggattatgggcagcaggcgcgctatgcgcgaaacggcatcgataccaagcagtttgcccccaaaaagcgggatttttcgcagggcaagatccgcatcctcatcgagggggactgcggcgtatattataaaaacgtggatgagagcttccgcattgtggacaagctggatcctgataaatacgagatctggtatatgagctataacgccaagcccaaggcgcattaccgggtggataaatttttgcaccagatcccctatgaaaaggtagcggaggtgtatcatcaatgccatatcctcatcaaatccagctttttagagagcttttcctacccgccgctggagatgatggccacgggcggctatagcgtggtggtgcccaacggcggcaaccaggaatatctgcgggatggcgaaaactgcctgttgtatccctgtggggacgtggatgcggcggtggcggccatcgagcgcatcgtaagcgacgaggcactgagagacaagctatatgaaggcggcgtagccacggcgcaaagccggagctggcccaatttgaaagcagagatcggcaaactgtatgatttggagctttcgtaaagcaaaaggccctgcaaaggcggggcctttttgcgtaataaatcgaattttgcaggccgcggaatatggtataataaactgcggctatacgcgaaaaacctgccgccggcaggagggggagagaaaatttgcaagggataaagcgctttttacacgactatgccaggtggattgctgcagcgctggcaatcctttttctgggattgacggtgtattatgcaacagcgcagagatttgtagcttcaacggttagcatgaccagacgacatgatgcgaccaacttagccgagggtgacgtgattgagcagatggtatgctttacacaagaggaccttgaattaaaccaagcacaggtacaggtgcaggttggcacctaccaaaacaaataccataccggaacactgacaatttccttgttggatgaaaatggacagacggtgagccaaatttccaagccctgttcagagatttcggacaatgcatatgttgggctagagatgacaaatctacaacctgacattttatatacgctgcgaatcgagcttcatgggtttgaggaaacgctgggcgtgttggcaatttggacgggggaattgctgcctgaagaggagctgcctgaagaggagaatgatgctcaagagcaagtcaatagcgaactggtaggcattgcaaccaaaaacgggcagcccttgatggatgtgcaggatgagaaactgtatgtaacgataagggggctggaaacggagttagggattcaacgtgcatactatccgctggtggcgcttgcaatcgttggagcgatctttttcctgctgccgtctaaacagccaaataaacaagagggggagacgcgccaatgagccaacaatgggagagatggaaacgctggatgttgacaccgtggtttcggtttgtgctcgtgccactctgcctggcgggattggtggtgttggcagagctgctggtatttcatggaggacagctttcgctgccggccgcgcagcgaagcgaggccgatgcagtgctggaaccggtgagaagggaagatctaaccgatcaagaacgcggctttacgatgacggaggagcaaaaacagcaggctaggcaaatggagccctcagaaaacctctatcgtattcgcgtggatcaggggtatacaaacaagctggctatccatttgaaaaacgaaaagaaagagaatggatatgtggaatataccattaaatatagaaaaattggaagcagcccaaccgatgggttggcagaaattgaagccgaggcgctgttggagctggagcaggactatacctacattggagaaagcgtagatttgcttttgatagagattgcggaccccaatgtagaggtggtgtcggcaacgctggacaatcgcatcgacttaaacgggcgacggatgctgtgtatgtatgccgcggtgttgacggcgtatttgctggtggtatgcaggcgtgtgattgggcgtaaactggagatcgggtatttgatcattgggttggcagccggccttacttgggtgctttgcttgccgccggtgacatcggatttaagctgggatgacggcatccattataacaacgcaaataccctaagctatgggcaaaaccacattgtatactccgaagcggagcacctagaactggtatttgcaatcaacggtgtgtttgatacgacagaagaccaggcagcgtatgtggcttgggccaatgaacaaagcgaggattatagccagcacagagagagctaccgaagctgggaattgagcgacattggctatacgacgcaaagcttagggatttggctaggccgcgtattgggacagccgttttccgtacaatttatgctgggccgaatggggaacatgcttttgtttgtgggggtatgttatctggcaatcaaaatggcggtccggtttaaagcggtgatggctacgattgcgctgtttccaacggtgatgtgtatggcgggcgcttatgcctatgatcctaccgtcattgcgttttcgcttttgggctgttcgctgttcatagcggaaatgtcgcggccggataagctgatggattggaagcggggggcgctgatgttggcagcgttctgtatcgcaagcttccccaaggctgtgtacattccgatgatcctactgctgctgtttttgcccaaaacaaaatttgcggacagaagagcgcacattagctttaaggtgggcgtaggattgatcttcatcattatgatgtcctcgtttgtggtgccggtattttttgtaaagggcggcggagatgtgcgcggaggcaatggagtaaacaccgaagcacagctaaaattcattttgagcaatccagttgcgtatgcaaaggttttggtaaagagcgtttcgaatgtgttggatagctttgtgatcaacgatacgaggatgttcttaccatatctatctcgtggattaacagagcaatctccgacatatttgttggggactttgaatttgatttctacgggattgatgttttatgtgttgtttacggacaagcacaaggagaagggaaccaaggagctgaaaggcagcacgaaatggtggatgctggtggccgtcggcggcattgtggtcttgatttggacggcgctgtatctatcgtttacgcctgtggctcatgacaagatcgccggggtgcagggccgatattatattccactgcttttgctggcggcggcgattttaagcccgcggcacatcaagaacgagacaaacccagttcggtataacggcctggtattgggcctaaacgcgctgatattgtttgggtgcatatggatctaccagattacaaatttctggctataaagaaaacgaaaaaacggcacgaaacggtgccgtttttttgatacagaagcatgatttgcccgggcccaatacaggttagagcttgatttgcgaacgaaggaaggccaaatattcggacagctgtttatgctcttcctctgacaaagggccaagaaaaaggccggccgggccgtcgggggaagctgcggagcggcgtcctagcaaaaaatccatagacacgttgaaatattccgcaacgcgcaggactttttctacggagggcgcattgacatcccatttggagatcgaacttttggaaaaaccaatggtcatctccaggcgatgcaaggagatatgctgcttggcacaaagcattttaatacgattcactaaactcatgagacaacgcccctaacgaaaaaaaattcgaaaaaaggagaaagacccttgaaaataagaacaaatgttcgtataatatctttgcggctaagagtagcaggaacaacatgagagagtggatctcgaaaccacaatgtttttttctattttatcatgtgcatggataagaatcaatgaagcggagagcaagcggacataagaaaaaaagacggcggcgccgtctttgaaagggggattagaggtaggttttcatttcctctacgttatcccgctgcatttgcagcaagcgctcccccaaggagagcacgggggcatcggcgtccgcgttttggcgcagcgccttggtcatatcgatgacgcccatggtattgccctgtaccatcatgccggcaaggtgggaagggcttttgtccttgatggtctggaaattgatcatcatattggtggagagtttatcaatggttttttgcccttttagctcgtgatccgccatttgaatgacctgatcgtagacatcttggtagcggttgcgctgggcgatgaggacggaaagaaagggtttgtcctctacgagctcaatcaagcgctgggtagagtccacgcccatctgcgcgttttggtagatggtattcaaaaggcttgtggtttggctggtttgcatagatggttcacctctgatttttttccttagtatggaattttatgcaaaaagaaaggatgggagcaatgacgctggaacaattaaagcaataccgagcttggcgcatttcgctgcaatccatgcgcgcagagctaaagcaaaggcactgcgagcttttgcagatggaaaacacgggggtattggcgcaaaatgagcaggcgcggcaacggctgtatgcgctggaggcgcaattggcgcaaagctatctggaaaaggaggcggcgatccgagaggtagagcaatggatagcgcagctgcccggctttaaggaggcaattttccggctgcggtatttggatgggctgccctgggagcaggtggcgcagcgcacaggatacagcgaaaagcaggtattttggatacagcgaaggacgatggaggaggacagacaacgcacggccaaggcccatgcgaccgcctagcacactggcaaggcggttcttttttttggcaaaaagagaacaaatgttcttattcgtacgccatcgcacccgaggccatggcatgataaccatgcgagaagggaagcggccggatgaatgaaacacaagggccggcgctgggggcgcaggtgctaccttttgacaaagggcgctgggggcatagcacaaaccataggaccgcaacggcgctgagcggcagcgcggttaaagataaaatcgattgcgggaggagagaacatggaatttctaaaaccagtactgggagacgcgctgtacgaacaggtacaaagaaagctggaagggcaaaaggacatcaaattggccaaccttgctttgggacagtatgtggacaagcgcaagtttaaggccaaggcggcggcgctggagaaggcggaagagaggctccaaacgttggaacaggcactaaaggacagccaagcacggtatgtacagacagagctgatctgtgcggccgagggccttttgcaaaaggcgatgaaatgcttgcaggcgcggcaggcatgaaaggaagagcaagatgcagacaaaccagacaaaagcgcagcagatggcagccgacctgctggcgtacaggacgcattatgcagcgctgttttccgtcattggtacgcgatacggtatgggagatggaagcacgactttcaatgtaccaaatctttgtgggcgtgtaccggtaggggcggacagcacctatccattggcgagcatggggggtgaagcgatgcatacgctgacagaggaagaaattccgtccttttccgggaatatcgagatgcacaacagcaataacggaaccaacatatttggcttgagcggcatatttagcggagtaagagtttctgggtattatcgtgacgggggaacgagaagcgggggcgcaaacagctatggcacgatcgatctctccttcgggggcgatgaagcacataacaatatgcagccctatatggctctaaattatatcatcaaggcataaggggagggaaaccatgcagcagatcaaaagagggagccgaggagagctggtggcgctggtgcagctgatgctgaatgagaaggggtatagctgcggcacagcagacggcatattcgggacaaagacggaaagcgcggtaaaaagctatcaaagggccaagggcctgtcggcagacgggatcgtggggacaaatacctatgccaagctgtttacagactgcctattgaaac

SEQ ID NO: 1469 - DNA, 7900 bp, Unknown
  16S sequences of unknown bacteria
atattttcctacatagaggcttttttgtgctgtccgcacaatcgggggcagttcattttgcggaaatggcttttcttttttatccttccatatgatccagctggaacagggtgtgcagcagcacatcacatccggcggcacaatcctcccaccgggtgtattcctccttgcaatggctcaaaccgcccacgctgggcacaaagatcatgcctgacctggtcacctgggacaaagtcatggaatcgtgtccggcgccgctgaccatccgcttgtgggaaaggcccagcatccgggccgcttccgaaatggcatccatcacatcgggatccatgggatgggcctcttcctgccaaaggagccggaaggaagaaacatcctccccgcactgctccatcagccgttcataggccttgtccaccatccagtcctcccgggcccggatctccaggctgaggcgcaccttttccggcaccacattggtggccccggggaacacctccagccgccccacggtgataaccatatcctcgctgatcagtttggccacaggagcacagaaagagatcagccgggcggccttcaccaaggcatcgtcccgcagatccatgggagtggttcctgcatgattggcttttccggaaaactccagctcatacagcttctgggatacgataccggtgactacgccgatggaaataccctgggtgtccagaacgcccccctgctcaatgtgcagttccagggagaaatcaatgggatttgtctcccggcaggcctccacatcctggcttgtcaccccgaactgggcgatcttttcctgctgcagtggctccaggggcaaaccgcagaaggcccggctgcccaccagactgctgatggtggcaccctcctcttcggcaaaggccaccacctccaccgtatgccgcagacggatgcccttttcatgaagggtccgcaccgcttcaatggcccccatcacgcccagacagccatcgaacattccgccgtttggcaccgaatcgatgtgggagcccagcacgatgcgccggtcggtctctccgggatagatccccaccacattgcccagctttccccgctggacggtcattcccgcctgctccatcttctcctgcacataatcgcaggagcgggcgtaggccggggtaaaggtcaggcggcagataccctccggcgtacgggccaggtcggccagcccctccaggctctcccgcaggcgggaagcatcaatatgaattccttctttatacattggcatagagtttcttggtattctgttcgtttttgctttcgtcccgcacacccaccggtgccatgtacacggcaaattcctccttgccgtccacctgcagcagcttgtcggtgtcctcctggcggaacgcagcaatggcgcaggtgccgcagccgatggcctgggcgctgagatacagattctgcaccacatgaccggcatcgatgagcatcacccgatgggcattgatgttataccgccactcgccccggtaggctacggccgtatagacaaaggtcaccgcggccttgcccgcccacttttggtcgcaggcacagtggatggccttttccgccatatccccttccagggagatgggctccaacgcgtgctccataggcagatagtgatagaccccttctttcagcccttccacccggctgaccagcagataggtttcaaaggcatgccgggctcctgccgagggcaccggacgcaaagcggcgtagttcttgccacggatggcccgcacaccctgggtggaccacagcagaaaggccagctgatccagggtcatggggtcctcggcataaaaccggttgctcacccgatcccgcagcagagccacataatcgtgctcttttaccacttccccgaactccatggtcagaggaatgcgctcctcactcctggccgctttcaccagaggcggctgaggcagcagtttctgctggtcagacacatattctacatggccgaagttgctcttcataaaatcccgattcttggcgatggtttctgcaatcattttctcgtccattccagtgttctcccttcttttttcagcggataaagttcatgccgatctttttctctttttccggttctcccgcctgccgcccggccatgtcacgcattttcagcatccaggccatgttctttcccagaaggcgcatgatctgctgtccttccaggtcctgctgggcctctcccggcttggagccgtggatcacattccagtagttggaggaaaccaccagcatctcggaaatggtgaaaaaccggttgatgtcctccagagcggtcatgccgccggtgcggcgcacagcggccacggccgccgccactttgtggcgcatcttccgtccccggctgtaaaaggcccggtccagaaagcacttcagcgtgccgttcatcccggcataatacaccggtgtacccaccagaatgccgtcggcctgttccagctgatccacccattcattgacaccgtcgtcaaaaacacaccggccggtctgggcgcagccgccgcagcccacgcagccatggatggccttgccgcccacctggatgacctgggtctcaattccctctttctccagctcctccagcaccaaagacagggcgtaggccgtgttcccctctggtttggggctgccgttgatggcgcatactttcatcttccccttctcctttccttgctgcaattcatccgcattgatacccctatcataccccaagtaggtgtcctttgtctacgccctcccaacaggttcgttctttctccatcggcttgacaaagggaaaaagatgtactatcatccaattagttgatagtacatcttttaattggcggtgatacaatggatatctctcagcggaaaatcacgaaaattgcccgggaggtgggggcctttacagcccgtaccatgaaagcggatggggtgggcccggcggaatttgacctgatccatgtggtcaggaagcatcccggcatcacacaatcggaaatctgccgcatcctgggtgcggacaaaggggccgtggccaagcagacggccaacctggaatccaaagggtacctgcggcgggagaaaaatcccgcagatggccgcagccagctcctctaccccacagaacaggcccaaaatctgaaaaactccaaagcccatattgagtctgtattctatgaatggctgctttcctctctggatgaacaggagcagcaggaatttgcccgcttgctggatgtgctctacacaaaatgcaaagaggaaagcagagcaggctttccccatatggagcgtcttttggcgtcccgtgattgatctgtaaaaatccaaaatggctttgggaggtaacattttatgtggacgatctttgcttttggctctgctttttttgcaggcgtcacttcgatcctggccaaatgcggcattcggaaaaccgattccaccgtggccacggccatccgcaccatcctggtgcttctcttttcctggctcatggtgtttatcgtgggttcccaggaccaaataggctccattggaggaagaacgctctgttttctcatcctgtccggcctttgcaccggggcctcctggctgtgctatttcaaagcgttgcagctgggcgatgtgaataaggtggttcccattgacaaatccagcgtggtgctcaccatcttgctggcctttctgtttctgggagagcccatcgggctgttccaaggaatgggcgccctgctgatcggcgcaggcacctttttgatgatcgagaaaaaagcggcagtcaacaccccggcccagggcaaaagctggctgctgtatgccttgggctcagccattttcgccagcctcacctccatcctgggcaaagtgggcatcgcaggtgtggagtccaacctgggcaccgctatccgcaccgccgtggtgttggtgatggcctggggcatggtgctggtcacaggcaaagcgggtgccgtgaaagaggttgccggaaaagaactggtgttcatctgcatttccggtcttgccaccggcgcatcctggatgtgttattaccgtgccttgcagatgggaccggccagtgtggtggttcccatcgacaaactgagcattctggtcaccattgccttctcctggctggtattccgggaaaagctgacggcccgttccggctggggcttggcgcagatcacagccggaaccctggtgatgctgctctgacgcaaggcgatataccagcagacgcccttcgattgacaagttttctttatggaattaaaataaatcataagaaacaacttcatatctgaaaaggggggatgcgctttgagacgcgtctttcactacctgcggccccaggcgggccgcatcgccttggggctcagcttcaagttcaccggcaccatcatggacctgcttctgccctgggtactggcccacatgatcgatgtagtgattccgcagcaggatctgtccctggtgctccggtggggggcggccatgctggtgttttccattgtgggatggtgtaccagcatcctggccaaccgcatggcctcccgagtggccaaagaaaccacccgacgcctccgccacgatctgttcgcccgcatcgcccggctctccagcgcacagatcgaccgctttaccatcccctccctcatctcccgcatgacctcggacacctataacatccatcaggtcatcggcatgatgcagcgcatcggtttccgggcgcccattttgcttctgggcggcattctcattaccctcaccctggacccggtgcttacactggtgctgttgtcccttcttcccttcatgggcctgctggtctttctgatctcccggcggggcaccggccttttcacccaggtgcagcagtcggccgaccggctggtacgggtggtgcgggaaaacatcgccggtgtccgggtcatcaaggccctgtccaaggaaaattacgaaaaagaacactttgaaggggtcaaccgccagatgatggagcgggaacagcgggccgcccggaatatggccgtgatcaacccttcctccaacctgatcatgaacctggggctggtgctggtcattctcaccggcgcgttccgggtcaatgccggcacttcagaggtgggcaccattgtggcctttctctcttacttcaccatcatcctcaacgccatgatgtccatcacccgggtcatcaccatgtattccaaagccagcgcctcggctcagcggatcgtggaagtgctggacactcccccggatctgcttcagatggaagaggcccccgcaggggatagcggcttccgggtggtttttgaggatgtgtccttctcctataataagaaggaagacaacctgtcccacatttcctttgccctgcgcccgggagagactctgggcgtcatcggccccaccggcgcgggcaaatccactctggtctccctgctgcttcgcctgtatgacccggatcagggccgcattctggtggacgggcgggatgtgcgcagctattccctccatgctctgcggcagaaattcggcgtggtgttccaaaacgacgctttgtttgaagacaccatcggagaaaacatccgcctggggcggaatctttccatggaacaaatcgagaaaggcgcccgggccgcccaggccgccgaattcatcgaaaatggccggggctatcagggagaagtggccatcaagggcgccaacctcagcggcggacagcggcagcggctgctcatcgcccgggctctggccgcagggccggagatcctgatcctggacgattcctccagcgctctggactacaaaaccgacgccgctttgcgtcaggccattgccaaagactatgaaaacaccacatgggttatcattgcccagcgcatcagctccatccgccatgccgaccatatcctggtgctggaagaaggaggagtactggggtatgggacccaccagcagctgatggagacctgcccggtctatcaggaaatcagccggattcagatgggagatgatttggatgcctaaaatgggaaatgcccctccctcctttggctcggccccgcaaggtacggcccatcaacgagtgacccccggccggaaacgggccactttgctgcggctttgccgctatgtgatgcgcttccgcttctgggtgatcctggcccttttgctcactatcctctccaactatttcggactgatggggccctatctttccggcctggccgtggacagcatcggctcgaaagcaggcgccgtccaattccctctggtgtttcgctactgtctcttcatggccctgttctatgtggcctctgcccttctgtcctatctgttgtccatgatcatgatcaccatcagccggaaggtcacctatcagatgcgctcggacatcttcaacaagctgtcctccctgccggtggggtatttcgatactcaccaggccggagacatcatcagccgtatctcttatgacaccgacaccatcaactcttccctttccaccgacttggtgcaggtgctggccagcgtcatcaccgtgggcggctccctgggaatgatgatcgccatctctccccggctggtgctggtgttcctcatcaccgttcccctgtccatctgcatcacccggttcatcacctcccgcacccgtcccctgttccggctgcgttccctcaagatcggccagctcaacggcttcaccgaggaaaacatcaccggtctgaaaaccctccagtcctattgccaggaggaacacaccatccgcaaactggatcaggtgaatgacgagacggtcaacgcctattataacgccgaatattacagcagccgggtgggccccagcgtcaacttcatcaacaatctgtccctggccctgatcacggtgttcggcgccatcctctttatgcaggggaaaatgagcgtgggcaatatttcctcctttgtgctctattcccggaaattctccggccccatcaacgagatcgccaacatcatcggcgagctgcaatcggctctggctgcggcagagcgggtattccgtctgctggacgaacagccggaaaaggccgactccccccaggccctcccccttcacgaccctcagggagatgtggaacttcaggatgtgagctttggctatgaagaaggaaaaaccatcctccatcatctttcccttcacgcttcccctggcagcatgatcgccatcgtcggccccaccggcgcgggaaaaaccaccctcatcaacctgctcatgcgtttttatgacaaggatagcggtgaaatcaaggtggacggccattccatctacgacctgcagcggaaaagcctgcgtctggcctattccatggtgcttcaggacacctggctcttttacggcaccatttacgaaaacatcgcctatggcaaacagggcatcaccagagaagaagtgattgaggccgccaaggccgccaagatccattcctatatccagcgtctgccccaggggtatgacaccctgctcaccgacgacggcaccaatatctccaaaggccagaagcagcttctgaccattgcccgggccatggtgatggactcccacatgctgattctggacgaagccacctccaatgtggacacccgcacggaaatgcagatccaggaggccatgcgccgcctgatggagaacaagacctgttttgtggtggcccatcgtctgtccaccatccggaacgccgatctgattctggtggtgcgggacggcaatgtggtagaaagcggcacacatgaagaactgatgaagaaacgaggattctatcgggagctttatgaggcccagttcaaataagcgtctatcccaaacgca

SEQ ID NO: 1470 - DNA, 28166 bp, Unknown
  16S sequences of unknown bacteria
ttatccttatgttgagcctttcctcaactgcgcgattgcgctgatatatggcgtcgttcaatgtatcgccatcagcttcctctactgtcagctgcatatgattccatgattgtgtcacattcgacggattcgagaacctgaacacatacccgtcgaaatccctcggctcgagacctgtggatattctttcttctgtcgtttcgattgtggtgtctgagacgctctctgaatcaccggttgtcgtatcggagggagtttccgtgttcccgcaggacgccgacgtcagtatcagcgcggtgagacagagagtggctgtgagtcttcgctttgatgatttcatttgtcaagttccttcctatttaatatattatttgtgctgaccatgaagctgtctgtattcgctcggagtcatgttctccgacgcgcggaatacacgcgagaatgtcttcggttccgggagacctgtcttctcggctatcgtctgtatcggcagttccgaacccgagaggagctccttcgccgcctcaatccgccggtcgttgaggtacttgtggaacgagaccccgaccgcgcgcttgaacagttggcagaacctcgtcttctcgtacccggacatctccgccgcgcggacgacgtcaatctgctcacggtagttcttgtctatataatcaaacgcctgctgcatcgagagcatatcgtcgcgtatctttctcgatctctccccgagcccgcgcattctgaccgacagcagtatctccgcggacatggagaagagcagcgaccgcgcgcggaactccatcgcggtccaccccttctcgtccttcggcggtgcgccggaatacagtgatatgatctcgtttattatcccggcgagccgcgggtaactgtcgagccttaccacccgatcctcgaacgtcattccggtgaacagcgtgaatccggagcccagcagcttgtacccgacctcgatgacgagcagcagcgtgtcattattgttcttatcaagcgaatgtatctccgcgcttcctatgaacgccgcctgaccctcaatcaggtgcaggctctcgccgtccgctgtaatatcggcgcttccgcgaatcacgtacaatatctcaatttcgccatgccagtgcgcttgaaacggcgcggattttgagagcgatatctgatatggtttgttaccggcgagcgggctctgatagaacggtctcgcgctcataggagtgttttcaggtgcgcgatgctcatgagcgcgcattccatcggcgtctttccgggcgatggctcatcctgctcgacgcagagccacttgacgccgccgctttttgccgctccgattatcggcgcgaaatccagcgctccttcgcctatcgcgcggaagcccttccttccgccctccttcacgcagtctttgaggtggagaaccggacatctcggcgcgtatcttctgacataatcgagcgggtccgctccggcggtgtatatccagcaggtgtcaagctcagccccgagaatgtccggcgcggtgtcggcgaggagtatgtcaagcttccgcacgccatccagcggctcgagatcgaagtcgtgattgtggtataccagacgtattccgtgcttctccgcgagagccgagaacctgccgattgcctcaagcgtcacggcgtagagcttcccgcccgggagcctgtcttccggcagagagcctatcggcatcaccgtgcatccgagagaggcgtagagaccgagacgcttctcgtctgcagccattacctcgtctatgcacgtgtggatcgagaagacctccagtccggctttcttcatctcttccgcgaggtattccacgctgtccccgccgaaattcacgagctcggcgccgtcatatccggcgcttttcagtgctgtgagctgcgggagcgtgtcgttaaggatggtgtttctgagcgtgtagatctgtagtgctgttttcattccgctttatcctccgcttgttcgcttttgttttgctgtaaaaattataccataacgtggagattatggcaagtacattttgtgcgtaatcatacccggaaatttatgaattttatgaaaacagaaagagaatacggcaattatgcgttcattgatttttcgcactgatttacaaaaaatacattatatttatcgcagactaatttgacgcaaagcgtttcgtggccgcacttgctaattagtcaaatctgacaggaaattgtcctgattttttatgtccttgctgttgactttttttgtaaattgtgatataatgtttataatgaatgaatattcgggtttgaaggaacggaaagaattgcgggacagggaaaaaatgatgatcgtcgccgacggaaagagaagcgcgctcgatccggacaggatactttacgtcacgatgttcggtaattacgcggagatacacgcgcgtgacggggaggtcttcagggtgcgcatgactctcggagagctcgagagtgagctcggcgaccggttcatcaagatacatcgtggatgtatcgtttcggctgaggatatttataacgtggcggaccgcgttacctcggaaacggcgaggcgcttgattatacgaagcgaaagaagaaggaaataacggacggtctgaaggagcggcagaagcggctcatcgacagtctcacggatgacggcgggaaaatgactgccgccgggtacagggagttctataacagttttgagaagcttccgttcgccttcgcggatcttgagatagtgtttgacgacgagaggcgggcggtggactggatattccggtacggaaaccaggcgtttgcgagacttgagaagaagactctcgacgaggtgatcgtgatccggttcagtctgctgtttgataacagcgacatgaagtggctgaggtgctgcgagagggcggcgcttcacggggagacgctcgagatgatggattattcggtggagatcggggcgcacatcaaggttatatgttttcagacgttcagggggcattgcgggtgttttctgttcaaccttgacgagatatcgttcattgagacgagcgagagctcgcggtcgacgatcgggaagtatttcgatggaaggatcggtcgggaccggtgttttgactgaaagcggcgtgccccggcgtggattgtcgttttatcgcacttatttgattactcatcacttatctattgacaaatgggacgatgaatgatataatggtatcgttccttggattggtgaaaaactggaaaaggaaatagcggaaaagtacatatgaaatcgaaaactaagagaattctgagcgcggtcagtaccgtgcttgtggctgtggtggttctgtttgccgtgcttctcgttggagtgaggctgatcgggcttcaggtgttcacggtgctgtccgggtcgatggagccggcttacggtacggggtcgctgatttacgttaagaaggtcgacccggaggatataaagaccggggacgtgataacgttcatgctcgacgcggacacggtggcgacgcacagggtgattgaggtcatccctgacgaggaggatccggaggtgatccggttccggacgaagggggacgcgaacgattcgccggacggcggggcggtgcattgtaagaatgtgatcggcgagccggttatgtgcataccttatctcggatatgtggcgaattatatacagaacccgccggggatgtatatcgcgatcgcggttggcgcgttgcttctgctgctggtgtttctgccggacgtgttctcggaggacaagaacgggagtatgctgcggagccgactgaatgagctgcgcgggcgggagatgactgacgcggagatggacgagcagatagacgcgatgactgagcggctcctgacaaaggatgagatcgcggcggtgcgcgggcggctgagggagaagccgatcggctccggggatgagtcaaagatcctcgagcggatgaagaggcggcgcgggaagaccggcgccggtaagatgtgagggcaataccgaaaggttccctatataaaaataatcttaggaggtttttatgaaaatgaaagcaagaaacaagatcctgctccttgcgctatgcatggcagcgctgatcgccgtctcggtgctcgggactatggcgtatctgacgtcgacggataccgttaccaatacgttcacggttggtaaggttgctatcaagcttgacgaagcgaaagttagtacggatggtgctttggttgaaggtgctgatcgtgtcaaagaaaacacctacaaactgctccccggtcacacctacaacaaagacccgatggtcactgtgctcagcggaagtgaatccagctatgtcaagatgactgttactttcagcaaggcaagcgagcttgacgcgattttcgctccttctggcgcagacctgaccagcatcttcaacggttatgatgctgccaactggatttctaagggcaatacaaaggacactactgctgatacccgtacatacgagttctggtataaggaatctgtcggtgctcctacggctgatgtcactcttgacgctctgttcgattccatcactgttccgggaacaatcactggcgaacagctcaagactatcgaaggcatgactatcactgtcaacgcatatgcaattcaggctgacggattcgccaccgcagatgctgcatgggctgcatttggcaactaatgaggtactgaacaatgagacgcaattctaacggcataagcgcacgcgtgcttgttatggctgtcgcgctgacactcatcatcggcggtatcatcggcgggtcggtggcttggctgacggctaagactgagccattggttaatacgtttacggtcggtgatattaatatcgatctgacggaaactacaacggactacaagatggttccgggcaatacgattgcgaagaatccaaaggtcaccgttaaggcagggtctgaagcttgctatttgttcgtgaaggttactgaatcggataatctgaaagacttcattacttattcggtgataatcggagaaggcgcatggactaaactcgataacgttgataatgtttattatcgaatagttgatgcggtaacagccgatgtttcattcgacattcttacgaacaataatgtttcggtaaagaacacggttacaaaaacagagttgcaggctgtcaaaacagacaatcagccgactctcaccttcaaagcttacgcagtccagaaggacaatatcgctgatgcaaaggcagcatgggatgttattcccgatgctgacaaaaactaactccgtatgacctcggcacacgccggtgtacataaaatttatcattataagaaggagatcttcacaatgaaaaagaagattctggcgctttccctttgcgtcgtcatgctcgcgatagttatcgtgggcggtacgctcgcgtattttacggatacgaagagcgctaccaacacgtttactgttggtaacgttaagatcgatttgatcgagtccagactccatcgtgagaacgcaggttacgcgaatggcgcaacggaaattgatcctaagaacgcggaactgtggtctgatgttgataagaaaggtacgggcaataccagtaagtacaaggctggcgatactttctataccgatgatcagatcaaagctgatgcagctcagtatacgtgtgagaatgtaaagctgaatccgggtcagtcttaccacaagatgccgtatgttcttaacactggtaagaacgacgcgtatatccgtatccgtgttatgattcctgctgatctggataccgctattctgaacagcagcatgtacacatctactgccatgaataacaaagagtttactatggcttatgattccaccggtactgtaacccgtactgtgggtgaaaaggtaatcaagttcaatgtctacaccttcactcgtatagacacacttgctccgagcgaaatgacatactggaacgtatggggaactatccatatggacgcagatgtcaacaatgatgagatcgccactctcttcggtgagggcaggccgtatgctgaaggcactttcccggttcttgttgaggctgacgctatacaggcagatggtttcgcagacgcaactgctgcattcgctgcatttgacaaataatttctgctaatctctctcctttcattactaccctgcgccccacggggcgcagggcatacaaggatatccgaggtttcgggtctccttgtatgccttgcgttaaggcagaataaagctttattttaatccactatcggaaggagttttcctatgaaacgaaaaatactgtgtttatcggttatcgcgataatgctcgcgatactggcggcgggaaccatcgcgtacttcacggcggagggtcgcgcacacaacgtcattacgaccggaagtataaatattactgtggttgaacaacagaagggcgagaacggcacgactgtcgagtacccaacggagccgatcacaaacgtggtgcccggagccgagatctccaagatagtgacaataagaaacgacggcaagtccaccgcgtggatccgtgtgaaggtcggcacggagattaaactcgtcggtgaaggcgtagctgacacgtcactcatcgtgctcaactttgacgataagaactggacagagaaggacggatattattactataataagccggtcgacccgaccgaatcgaccaccgcgctcttcgacacggtgaagttcgacccgcggatgggcaacgagtaccagaactgcacggttaacataaatatatacgcgcaggcggttcagaccgcgaacaataatcccgagggcggcgtgactgaggtcaaaggttggcccgccgagactacgaaaggggaataaccgatgatgaaaaagagaattcttgcgctgctgctcagcctgtcgctgatggtgtcggtagtcgtgccgggaacggtcgctatggacggcggcgacacggtggacgatacatacattgagctcgccattaacggcagggagacgctccacgcgtctcatttcgggatcaacgccgagccttatcagtggcagatcagcattggcggagcatggataaatatcagcggcgaaacgtcggacagcataaccgtgtcctacgcgatgctgtgcaacgccttgagcggcgacactgcgcaggtgcgctgcgtcggatacgactccgagggcatgctgatcgagccggatgcgatgacgatcaggattactgaggaagtcgcgccgacacctgtcgagcaggatgggacacatcccgccggcaccgtgcttgagcaggcgaaacctctcggcgacccgataatcgaaaaaatcgagggtgagtcagaggacatcaaggatcagatcaaggaaaaattcgacgaattcaaggataacgccaaggacgcgctcgaccagatcaaggatagcgccaaggaaaaactggaagagctgaagaacaagatcgacgagaagaacgatcccgaaccgatcgatcagacggaggagacgtccgccgaaacgaccgcgcccgccgagacaacggctgaaccggcatcgactgacgattccgccgcgactgacgattctgtcgttacgggcgggtccgaaacgacaaacgtcgagactgataccgctccgacaactgatgaggatgccggggatgacgacgtgtcggatcagcctgaaatgaccgagactaccggcgaggctgagcctgagaaacccgcggattctgaggataagactcccgcggcggaagagccggctgataccacgaccgagcaggaagtgacgacctccgcgccggagactgaagcccctgtaactgaagcgccggagactgacgcgcctgtcgcgactgagccgtcagagggttcggacgaggatgagacggaggatatcgtgatatccgcgccctccttcgcgtccccgctgacagacgaagaaccgtcggctgaaaataaggaaaatgatccccagacaccaccgccggcgccggcagaacagactcccccgacatcaccgtcggatcctgtaaccccggcagcccccgaaaagcaggaagaacagaccgggaacaccgaaaacaccgatgaagaccagaaagcttccgagaatgaagtgcaaaaggacgtcccgtctgacgaacagaacaatgtcccgacagtaaccgactccgcgaacgctgtaccggcatcggatcccgtcctcgcggacaacgaagagcagaacagaaatgctgaaaacggtcaggagaacgacactcccgcgggagagacgaattcgacttatagtattattataaactatgtgttcgcgggtggtaagcaggcagccccctcgtggagcgcaaccgtcgcgaccggaagtaactatactcaggatattcagagccctgtggtggtaggatatgcaccaagtgaagcaatagttcatgtaaatacttccgaggctaaaacatacaccgttacctatcagcccgctgaggtcgagttcacggttaagcactaccagcagaacgtttccaatgaccagtatacactggtggaaactgagtcaaagaagggattcaccgaatctcaggtcggcgaaaatctcgcaaagacggactataccggtttctactctctgctctatgataccacgaccaagatcgcggcggacgagagcactgtggttgagatctactatgaccgctattactatctgatgaacttcgatctggacggcggacatggcgtggagccgatttacgcgagatatggcacgaaaattgatgtcgatgagactgcgcttaaaaagcctggatatacgtttgataagtgggaaggcgagaagcaaattccagaaacgatgcctgcggagaacgtatcttttaaggcaatttggaaagttgcagaaaaggcaaaagtcaccgttgttgtctggggagaaaacccggatgatgaagattatagctacatcaagagttccgaaattcaggtaaaacccggaacgaccctgacaaaagatgacttgacccatgttctgacttgcggcaaggaggagcatgatcatgcagctgccggatgtacgttggcttgtaaccatgtgcatgacctgacttgctacggtttgagtgcgaatgcccaaagttctagtcccaatgatgagacagcaaggtggtgcgaaagcaagcctgaaacctattttgcacagctcggcattgaagatggctacctttaccacgacgacgaaaacgcagaattagtatctaaagataattactacctgcggcttaacggagcatattataaactgtcttggacgcagttcaaaaaactaaaagatgatctggttggtagcgccagtgacaatacgttgtacaaccctgactactattacaagtacaaaatcaaagccagtggcataagttgtacacatacccatactgattcctgttatacctgcggcaaagcagctcacaagcataatgcaaactgctatacttctccgctggatatggatgggacgctctggaggctcgtaaaatgcgaggaggtaaccgtagccgctgacggtacgtctaaactgaatgtgtactatgaccgcatgaaattcacgcttcactttagaaaggcgtatagcaacaacgacgattacgatacaattcagaaaaagtggggcgcgaatatccgcgaggaattcaataaaaaatgcagtgatgccggtacttctaactggagcgaaaatacgaatgcaagtagtccatggacttcatatttggatatcatgccaaaagaaaatcgcacgtattacgccaatacggatggttatggcacttccacagcctactactatgtagagggacttgacggaaaagataaacttttctataaaaatgagtccacaggcacaggttatactgttacagaggaagagtttattgaaatccacggctttaccttcaatgcggagagaagttccaaggttggcgattcattcaacaatgcaaagttctactatacgcgcaacagctacgatctgaatttccacaaccacaatacggagctgacagataaagcaactactgtcaaattcgaagcaccactgaagggttactactttgaaccggaatatccatctgaccttaaaccgaatgcttatgacttcgccggatggtacaccacatcaggttgctttgatggttctgaggcgaatttgaacaccatgaccatgcccgcctccaatgtgatactctacgccaagtggacacctaagacacacactgtaaaggcatacctggctaaggaagagatggaaggcggtaaagccccattgtatacctatgacaatgtccctaacggcacaactgtaccgtctacaccggaagaccctacacgcgatccctacaaattcgtcggttggttctacatcagtgacactggtgaggaaatagctttcgatttctccatgcctgttaaccgcgacctgaacctctacgcaaagtggagttccaacacactgatggaatacaccatcaaatacgagttgaaggacggcacgaagatcgcacctcccaccaccggcagtgatctggcgggaacgaccaagaccttcaacgccaagactggcacggaactgaacgagggctatcagtctgggtatttccccgaggttggcagtcactccataactattgatattgacaatcccgctaacaacacttatacattcgtgtatgtggctaaggcggaagtcgagtacaccgtcaagtatctggaaaagggcactgaaaaacagcttgccgatcctaagaccgtgacgaccagggacgccgttgtgaccgagacattcaagcagatcgcaggctacgctccggacgcataccagaaacagcttgtgcttgccgcggagggtaacgagatcatattctggtacaccaaagacgacgttcacgcgccggttcagattatccactggacgcagaacattgcgggcgaagaatacaccgaataccagaacagtacaaacctgaacgccgttatcggaacggaatattctgagactcctctgacgattgcgggattcacctacaacgtaacgaagagtaccgcctccggtactctggctgaagccggacttgtcctgaatctctactatgaccgcatcgaatatccttatgagttcagattcattgaacagggaacagacaaggagctcgcagaccctgttaccggtaaagcacgttaccaagctcaggtaacgcataaagcaccgactatccccggctacacacttgtgagcgcggagaatcaggcgatcaacattgctattgaggatggcgagacagcggtcaagaatgtcaagatcttctactacaccgagcagatggttgacatcaagtatcaggtagtcggtccgaatggttgcggtacactggatatctatcaggaaacacagctgaaggtatttaccggcaaaccgaaaggctcgaccccgacagcaaatgaaggcttcaagttcgtaggttggttcaaggacgaagcttgtaccgaacctgttgacaacgcatgggttcagaacaatatgatcacacctaaaaaagcagaaactgaaatctggacagcagtaacctactacgccaagttcgaacaagatgtagccgacctgacaataacaaagaacggatgcgatttatccctcgacgaacaccagagcttcatcttcaccgtaactggcccggacaatttcagtatgaaggtaacgattgagggcaacggttcggtaacaatcaagggcttgaagatcggcacttacaccgtaagggaagagaccggttggagttggagatatggtacgacgcagcctgacccgattacacttgaggcgggaaaaacaaacaccgtaaccttcactaacaatcgtaatgaagtcaagtggctcaacggctgtgcctacgcacccaacaaattcggttctaactaaaggaggcagacagaaatgaacaatgcaaaaaattccggcggcaagcgtacgccgcggcatggacgtcgcctcggattcggcaggcaggttctcctgcttgccgccctcgcggtgatagcgatgggagttgtcggcggcaccgtggcgtatctggtgacgaagacgggttcggttgtgaatacgtttgaaccgggttatgtgtcgtgtcggatcaatgaaaaaggtccagatggaaaaaaagactttgaaaacaacgttgacaccgaaaagaaaaatgtcaccgtgaccaacactggtaatgttgacgcttttattcgcgccgcgattatcgtgacatggaaggattcggcaggaaatatcgctgcaactgttccggttaaagatacggactactctatggagttgaacgaaactaactggaaaaaacaaggtgactattattactataatagttctgtcgaatcaatgggaacgacagagaatttgataaaatcttgtactgttctgaaccccaacggtgattacaatttgagtgtggaaatcctcgcagacgcgattcagagtacgcctgcaactgctgtgatagaggcttggggagtaaatcccgtagctggaaactaaggaggcgagcacatgaaaagcaacaaattcaaaattatgactgctctggtgctcgtcgcggctgtgctcgtcggcattttcgcggttaacgcgttcgctgacaccggcgtgccgaccgtgaacttcgactactcgaagcggcagttcacgttcagcaacgtcagcccgtatgggggctcggaatatcccgacctcttcaccgacctgaaaaacctcatgccgggcgactcgagaacccagaaaatcaagatcaccgcgtcctctctcgagggcggcaccgccaatatgtatctgcgcgtcgacaaaaaatccgaaaacgcggactacatcgacctcctgacaagagaaggcgtcaccctgaccgtcagcaaggacggcaaagtgatagccgccggcgacctcgaaaacggcgtcttcctcggcaaactcgagggcaaagacgcgctcaacctcgacgtcacattcaacctcccgctcgaggcagggaacgatctccagaacaaagtcggcactgtcgactgggtcttcaccgccgagtacatccccgcgccgatcataatcatcccgcccgagaatcccccgattcccgagctcgaaaagggtgaacactacgcctacataatcggccgtgacgacggtctcgtccaccccgaggatcagataacccgcgcggaggtcgcgacgatattcttccgtctgctgaccgaggactcgcgcgactacttctggactcagaccaacccgtatagcgacgtcgcggagacagactggttcaacaacgccgtctcgactctctcgaacgccggcgtgatcaacggcagaccgggcaacgtctttgacccgacagcgccgataacccgtgcggaattcgccgcgatcgcggtcagattcttcggcggcgagtatgacggagccgaccagttcagcgatatcgccagacactgggcaaacagcgagatcaaccgcgcgtacatgaacgagctgatcaagggctacccggacggcactttcagacctgacaactacatcacccgcgccgaggcgatgacaatagtcaaccgcgtcctcgaacgcaagccggacaaggatcacctccttgaagacatggtgagatgggcagacaacgccgacaccgaaaagtggtactatgcggacgtccaggaagcaaccaactcgcacgacttcgagatgcacacgaagagcgccgtagacgagtatgagctctggaccgaactgagacctgtccgcgactgggcggctctcgagaagacctggtcagagaacaactcctcgacgaacccgggtgaggttatctcgtcaaacaagaactcggttttcaagaagtaaatatccaaagatgggactgccgcgagagcggcggtcctgtttttgtgtgcagtatgctgtccggcggcggctcgcggcgggcaattttgtcgcttgttatcccgaccttttaggcgttagctattgcaaactccgcgtgattgtgctataatattatatagaaaaaatagtggaatggcggagcatcaaaaggcttttgtatcaaatggttagcatgagctaacctacatcggtgcgtctgccggaaaggcgagtaaaatgtcaaggaaagcgactgagttccagaaaaaggaaatgagcaaaatgtaccgcggcaagcagatattcaaaccgatgaatacaggctggatcgacgaaaacgtcgcctgcgtgcgcgagtgggtggcgaacatcttcttctaccgcaaaggcgacacgacgataatgatcgacgcgggctacaattacgaccggctcgcggaaaagatgagctggctcggaatcgacccgaagagcatccgccacatcctgataacccaccaggacaccgaccacgtaggagccgtcgaggcggatagtcccggactgttcaaaaaggcgaagctctatatcggcgagacagagaaccgctacctgaccggcgaggtgcgcagaaaggtcatatatcatctctacaagctcccgcaggtcacgataaacaataaaaaggtgctcctgaaggacggtcagaccatgcgcatcggggacatcaagatcaagtgctttctcgtccccggtcacacgtgggggcacatggtgtacctgatcgacgacaggtatctcttcaccggcgatacattgtggttcggcgcggacggcggttacagcttcatctcggctctcgcggaggacaacaaactcgcggtgaagtcgctcgcgatactcgagacgaaactgaaaaagatcggcgtcagaccgctgttcatcacgggtcacaccggatggacggataacttcgatttcgcattcgcgcacaaggacaagctttgctcgccgttcagaaagcgcgtgccggacccgaccgctccgtatgacgcgtatgacgagtcgaacgacacaaaggagaactcggagtccggtttcattcccggcgttgggaggagctttacaaaatgagagtatacaccttcggcgacgagacatcaccggctataatgctgctcccaggcacctgctgccactggaagagcaatttctgtcatgtgataccgctcctcgcgaagaatcaccatgtgctctgtgtcagctacgacggctttgacgagaacgaggacagtgagttcacgactatgaacgacgagaccgaaaagattgagaattacataaaagagaagtgcggcgggcatatccacgcggcttacggctgttcgctcggcggctcgtttgtcgggctcatggcggcgagacggaatatacacatggactacgggatactcggcggctcagatctcgatcaggcgtcaccgctcgcggcaaagatgatgggcgggctgatgattccgatgatctatccgcttgtacacgacggcaagttctcgtcgcgcttcctcgaaaagagaatcgagaagcaaaagcggcggatgccggaatattacggcgcgttcatggatatgttcggcggtgcaagaccatatgtcactaaggaaagctgtctgaatcagttcgtgtctgaccttgtgacaaggcccctgacaaaatcgacattccggggacagagatacacatcttctacgcgaaaaagatgggggcgaagtatctttcaaggtatcatcagcatttcgcgcacccggtgatacatgagcaggatcttcagcacgaggagctgctcgcctgccgcccggctgactgggcgagacttgtctgctctataattgacgcgtgaattggaggacatatgaaacacatacattttgacacagagaccgccggtttctacggcgcgtattgggagaataaggtaagctcggaccatgcggtgatcgcgatgataggcgacgacccggaggacctgcttgcgcgctccgcggtgaagtggctgcacacgcacggcgtgaacgtgatgacaatgtcgcccgcgaaaaaggactacggacaccacaactacccgctcgagcggatagaaaccgcgataaaccggctgaaggcggacggcaacacaaagatcggcatcgcgggggcttcgacgaccggaaccctcgcgctgactgcggcgtcgttcttcccggatataacgctgacaatcgctatgacgccgagcgacttcgtctggcagggcttcatgcagggaaacaaagacggctgcaaggaatggccgatcgagggcgagtcgctgttctcgtggcatggcaagcctctgccttatatgccgttctgctacaagcacccggactactggcatatcgtcgcgtccgaatcgaagcgcacgggtgacatggtgaactcgcggaagctgttcgacgattccgaaagggcgcatccgatcacggaggacgaaacgataaaggtcgagaacatccgcggcaagctgatactcgtcggcgcggaggacgacgcgctgtgggacgccgcgaagtatatacaccgcatggagaagcgtctcgcgaagaagccgcatgaatgcgaggtcgaggcggtcgtctatgagcactgcacgcatttcgtgtttccggaggggctgatacggacgatgttcccgataggctccgggcttttcgttaggctggcgttcagcgcggctaagaagtactcgaaggaatgtctcgcggcgagaaaggatatagaccgccgtgtgacgcgcgccatcgacgactggaagggagggctcgtataaatgaaggacagcgagctcgttttcgaccgcggctgccatgtgatctactcgaaggcgtgcaaaaagcagatacaggataagatagcgctccactacccgccggatagaagggaagaggtctgggaaaaggttcagaagcagtacgaaaaatttctgagcgactaccgtaccgaccttggcggtaaaaagaactttcacaacggcgccgggggaacttatgactgcatcgcgctgatttcatactacgtcgtctgccgggaggtcacgaatctcgacgagatcgggcagatggagggcgacctttttctgcccgcgttccggaagatgacatttgtagatatcaacaaaccgttctggaagaggctgatgtacaaggcattcctgaacgcgaagaaacagtgcgacaagtggggcgactacaaaatgtacgtcgcgccttacgagaaggacaagccgatatactacgagttcaccgagtgcccggtcgctgagttcgcaaagagccacggtcttacggaggtcatgcccgcgctgtgcaacccggatttcgagtcgatggagtgcataaaggcgcgcctcgtgcggcagactacctgctcaaacggatgccggtgcgactacacgatctgcggggacaaggacgggtatctgaaagatcatccggaataccgtgacgaggcagggtacaggcggaataagtaaatggtgaaaagtcaatagttgaaaagggagccggcgctcccttttctttcttgagtcgttacgggtctgactgaagtatttatatcagctgtacttctgataagcgacacaccgcagccggtgaagaagctcatcgcgttccacgggtacatagacagtccgaacctgtcctcggcgtcggtcttcgtgtccccgttaaggtcaagcgcggcggagcgcatacaggaatacatcgtgtcaagcgtccatttcccgctttccacggtgtcatacaggtcatcaattccgagagactccgcgagggtcaagttcgctacgaccggcatatagcactcccagagcatcaggtgtatgtccccgaacaggtaatatgtcgcgtccccgacacgtatcgagtcgtttgccatccggttccaccacggctttgtgaggtcgactgtgcttattgtccctatgtcggtgaacatccccggctcatacgccagggcaagtgtcgagacctcgtcaaagcatatgtcatacccgtcgtcacccgacataatctgactctttatcatgtcgagagtttcgtcccagccaaggtcggtcacgctgatcttcactccgagtctgtccccaacactgcgtgtgcgttgataaacggcgtcgtcgagcacgtcgcccgtctctgattcaaggtccatcgatgtgtacgcgaaattgcttatgctgttcagaatcttgaactccgccccgccgtaattaccggtcgggagggatgagtaaatgtctgtttcgggtgtgtccgtgggcgcgtcagctaaagcgctgtccgtttgaaccggaccggtgtcatcgccgcaggaggcgagcgtaccggctgtaatcaacgcgaggatgagagagatgtgtcgtttcatgtcttcgttcctttctgtattttatatgagtccggagagaacccggaagcgctccataaaagtctggtacccgttcggcgactcatagttccatgttcgttccgcgagggcgggaagatttctcgaggttattccgaagtcggctgctttcccggcgctctcccagacacagagctctgagccgaggaccattttccggtccggcacgattatcttttcggagttgtcgactgcgtcttcgagcagccattcgttgtacttcacattgtaaatatcctcaggacgccagaacttcggtcttgacgggacgatatacagcggctgccacgaggcgttgacaactctgaacccggcgtcagtgagccgttttgcgtcaaagtatgtcgactggtagaccatgacgatgagctccttcggcagaaggctggtccgttcgtccccgaagccttcccagacaacaggagtccgcccgagcgagagtatgtaccgggctgtgtccgccgcgaagtaagtgtagagctccgccgacgatttcagtcccttttcacgcatgaactcatggcactccgcgcagtcgtcccaatcctcgtacctcgcctcgtcgcacccgaagtgtatgtacggagaatcgggaaacagcccgcagacctcgtcaatcagcgcgtgaacactttcgtatacgcctttatgccccggacagatcatcccacggtgcgtgccgaacagctccggatatctcgtaggcagagcttcacagtgcgccggaacctcgatttctgggacaagcgtgataccgcgctctgacaggtattcgcgtattctcctgatgtcatccttcgagtagccggaagatgacgtgagaagagggaaccggtcagacggaagcttatacatatccggtgaggggccgtcggcaaaatgcagatggagtgtgttcatacgatatatgtagcacaaatcggcgtaggcgaggatatcgtcaaccgtgtagtgaccgcgggcgaggtcaagcatcattccgcgccagattgtgtccggcttgtcatatatttccgtttccggtatgacaagtgagccattatcgcccccgagagaggtcaggagcgcagccgccccgcgcgaggcacctttgtcggttgacgagagaacgtgcgtgactccgttccgcgtcgttatcctgtattcctcatcttcaagcgaaaagtcgtggtcaaggacaatgcaggcgtcgtcgtcggacagactgacatttgtgtcaaaatagcgctttatatacccggcaaggacagctgccgccttgccgtaagcgctgtgtgcggctattttcggagtgtcaatcttccgggtttttccggttgatgcgacggtttttgggaacggtattggcgttttgtcgagggatatgttcattctttctttttcctttgtcttgtgtttgtctgttccggagcgcagggtgtccgggcggactccgtagtacttctcgaacgccttgatgaaccctgattcggagaggtatccgacgtcggagctgattttctttatactgaacgatgtgtatctgacgaggctgaccgcgagattcaggcgcagggaagcgagatatgacgagtagttctccccggtgtgccgacgccaccaacgcccgaagtaatcgggagacatccccgcgaccgcggcggtatcgtctatactgatcggctttgtgaagtttgagcgcaggtaagccgtcacgcgtgagattgtgtcgtccggcacggcgcgtctgtctgcctcgcccgacattccggaggttatagcgaggagccgcattatgtcggcgcgcaagatcatctcacagagccgatcctggcagtccccgaagtagcgagaggtcatgtcgtcgaatatccgcacgatctcatcccggcgtccgccggagcagtcgaccataaccggtccgcgggcaaacatgagatccatgtactcgtccgggatgaattttccggagaacccgactctgattatatcagcggaagagttatccgccgtgtagtagaagtttttcgtgtacggcagatagaagaaacatgccgagccgcggaccgtgtggtcgactgagtcaatgatattgtgaaaattctcaccggtgacaagctcaatctcgtacatttcgtggctgtgaagcggataggacgatgccctgaatgagcgcacaaagcaaggaatgtcacggcgtttcgaagcgtcgcgcaactctgtcacccctttcatttattctgcaaagatatgataacacgattcagcccgtatgtcaagacgatgtcgaaaaagagaacggaactgtcggaaaattccgggggaaaaatcccttatgccatcgcacggtggatcttcatacttattcacttttcgcttctttccaggctcccggtgccgctccgtacttttccctgaacttcattataaagtaggacggcgacgagaacccgcactcatagcatatctcgttcacgctgagagatgagctcgcgaggagtccggcggcgaggatgagccgcagttcgtttatgtacgccgggatgctcttgccggtctcctttatgaacaggctgcccatatagtgcggattcagcccaaagcgcgcggcgaggtcggagacggtcagctttgcgcggtaactgctcccgatataccggatgatctcttttacgtgccggtcacggacattaccgtccgcttcgtccgctgtggcgtgtcgtctgacgaaggggataagtatcgcggcaaacagcgatctcatcattgacaccgaataagcgtccccgcgccgtatctccgctgtcagttcctccgccttcgtgataagtggcggaagctcgttctcgtcgaacttcatgtgaaaggcgctgccccctgccataagccccgcgggtattccggacggtatgaagtcggacgtgaatcgtatgttgtagctcttcagccggtcgcctgggtcctcatgcgttgtatgcggattcatcggtgtcctcagataagcgcatccgcgcgacatatcaaaggaggaacggtcgaggagctgtactcccctgccgccggtgattatctcgaactcatagtagctgtgcgtgtgcagagccgttttcaggtgcttatcgcctattccgtcgaggcggtgcgtgacggcgagcatggattcgcctgacctgtactcggcgatatcaaatttatcggtgatgttgtcccggtcgattgtgtcaatacgcatgacgcgcagcgtcgccttttcactcttcatttttcactatttactccccagcattgtcattttctacttaattatatcacacccgcacgcagatgtcaaacaaaatctgcgttttgttatattcccggtgcagttcatgtattgaattccggtcgcatcaatggtataatatatacagaaaaacgcgaaaggagtaaataaacatatgctgacaaagatatatgacaactacaaagtgaccttcaccgacccggaggtgtttgtcgacaacttcaagaggcgtcgcagcggacacatgacgcacgcgatgacaatccttcaggacgggagactgcttgacttcaactcgagctgttcggcggtgagatgctccggccactcggcttacggcttcgtggagtacagatactcgtcggacggtggaaagacctatacagaccccgtgccgctcggttactcggtggacgcttttatggacggtctcttcacgatatctgtcgagaaagcagtaacctgtccggacgggagcgtgcttgccttctgcctccggaacaccatgctcgaggacgtctgttgtgagccgtggctgaccccgacggcggtgcggagccgtgacgggggcaagacatgggaggagcccttcgaggtttcgccgtacaagggcagaatttacgatgccctcgtcgccgacggcagggtgatcttcctcgaaaacaggaacgagaattttataggagagacgccggagcacggttactcggtcttcctcagcgacgacagcggacggacattcagggaggtgagagtatctatagacgggatcggcagaggctacggttcgatactctatgacagtaaaggaatcctgcacgcctatggctacaacgtgaacgatgagcggcacatggatcacgcgataagtcgtgacaggggcgagacatgggaattgcttgaaccctgctggctgaatcacggcataagaaacccgcagacagccgagataaacggtgtatacgtggtacacggccgcgaggagcatctgaacggtttcgtcttctatttctcggaggacggtcagaactggacggaagctctttacgccgcggaaaagttcgggagctgctactactcgaacaacctgaacataaccgtcgacggacgcgaaaagcttctgatacagtactccgaggtcacgggcggcgagaacgtttgtcaggtcaacgtgatgcaccgatatctggaggtcgaccggatatgagcgtactcagggaaaagcttgacggtgacggaatactgctcggtacgcacatattcatcggcgacccgtcgataaccgagtgcatggcgatggtcggctacgatgtcatgtggatagacaccgagcacacggcgattgagaaggagaggctgataaacaccctgatagccgcgagagcgggcggcaccccgtcgatggtccggataccgtggaacgacaaggtcctcgcgaagccggttctcgacatgggctcggacgcgatacttttcccgaacgtcagaacgccggatgaggcgagggaagccgtcagagcctgcgaatacccgccggacggggaaagaggctacggtccgctgagggcgctcggatacggtgagatacggcagtcggagtatgttacgaagagataccgcgagacgctgcgcttcattcagatcgaggacataatggcggtcgaaaggctcgatgagatctgtgaggttccggggacggacggcttcatagtcggcccgaacgatctctcggcgtcaatgggacatctcgacaacacgctgcacccggagatgctgccggtctacgacaggataggggagatcacgcgccgtcacggaaaggttctcggtgtgtcggtcggctacgacagcgcggtagtgagggcatggaaggcgaggggcgtgaagctcattttctgcggcagcgacatcagccatattcacgacggagcgaaaagaacgctcgaaaaaatgaaacttgacacgggagggaaaatatgagacacataagacagatatcgttattgaccgccattctcatccttgccggagcggtggcatcctgcgggaacagcgaaacgggcggtgcgcagacaacagacgacaccggcacgacggcgaacgagaccactacatctccgcttgaccccggaatagaggcggtcgactgcggagggcgcgaatacaccctgctcgcccgcgtgaacggtgacagcttctgcttcccctacgccgagtttttcgcggaggaggagaccggagacccgctgaacgacgccgtgtacaagcgcaacaattatattgaggaaaagtacaacctgaaactgaacatcgagacggttgaaaatgtctccttcgccgcggcagcgtcgataatggcgggggacaacgagtatgatataatcttcccgagccatcaggaagccttcgagatgatgaagaaggggcagctgctggaggtttccgactttccgcacgtcgacatatcgaaaccttactggatgcgcggcgtaatggacagcacgtcggtgatgggcagcagattcttcctgaccggcgacctgaacctccagtcgctgaactcgatcggcgtcatatacttcaacaagaagctcgcggaggacaatggtgtcggcgacctttacggtatggtgagaagcggtgaatggactcttgacaaattctctgagtgctgccgcggagtgaccgccgaccttgacggagacggtcttgacgcggacgaccggtacggactgacgacaaacggcttcgcgtggcagcccttcctcgccgggtgcggcacgacacttataggaaaggacaaggacggcagcttcacattcgactgggacagcgagaagaacgtcgggataatcacacatgtcataagccttctgaacgaccacgagtcggtgatgctcgtcaatcagaacgccgagctgcaatcgaagtacggcggaatcggcgaggcgtcgatcgcgatgtttcgcgaggatcgggcgttgttctggatagagatgatttacgcgtcagcacagcagagggatatgaactcggatttcggtttcctcccgatgccgaagtatgacgacaggcaggagagctatatgtcgtatatgcacatgggctggtcgacgacgagtgccgttccggtgacaaacgacgatcacgacctcacgggcaggttgctcgaggacatggcgtggaaatcatctgagacggtgagaccggcgtactacgacaggaccttgcagggcaagatatcccgtgacgacgactcgggtgaaatgctcgatatcatttattccggactaaacattgacccatcgataataatggcggcatcgctcccgatagacgcaaagatgcgcggtttcctgatcgatggaaaagattccttcatatcagaaatagccgcgaataaggagaagtgcgtcggacttatagagaagataaacacgacagttgaggaggtgcttcagacacagggcaagttagccggatcacctcgcgtaagataaaacccgaacacaataagcgaaaaaaacttgacaccgggtctcatatgtgctataataatcaaaaccacccgaaaggagcacacattcatgcgaccaacacatccgcgttatccattacttgagcgcttcgaccgctattctcagtatataaccccggcgataaacagaggcatcgccgagcaccgcaggggcgtcttttcccttagcttcacagaccgcgagggaaacgccgtcactccggacactgtgagtgtccgccagatgtcccatgagttcggcttcggctgttcgctgttcctgctcgaccagttcaggacgccggaaaacgagcccgacacggagaagaaccgcgcgtaccgcgaggcgttcgcgaagctgttttcggtcggcgtcgcgcccatttactgggacgctcttgagcctgtacgaggaaaaccgagattttcgccggactccgagtacatatggcgccgcccgccgctcgacaccgtccgcgactactgccgcgagaacaatatccgcatgaaggcgcactgccttgcctacaactcgttcaaccccgactggctcccgaaatccccgcgggatgtcgacatagccctgaccgagcgcgccgaggcgctgtccgaccgctaccgctatgatttcaccgatatggacgtgattaacgagatgtcgtgggtctacaagaattgctacaagcacagcggaaacggaaaacgcgatctgccgaccgtcgacgagccgttccacgagcggttttgctttgacctcgcgaagaggtgctttccgctgacgcgtctgttctggaacgagggctgcttcgagacgttcggcgccggaaattatatcggaccgcgcagtcgttactatctgatgcttgagcatcagatgtcgctcgggacgaaaatcgagggaatcggaatgcagttccacgcctttacaggaaaggacagcgaggtgcagagcgcgggaccgctgtatgacccgttgcggcttatcgacatctttgacacctactctgatttcggtttgccgattcacctgtccgaggtctcgattccgtcatggtcgaacgagccggaagacgaggagatacaagcggagcttgtcgagcggcttgtgaggctctggttttcgagaaagaatgtggaggctgcgatctggtggaaccttgtcgatggcacggcgtatggcgacgagaacagattccacgcggggctgctcagaaacgacatgaccccgaagcccgcgtacagggtgctcgaccgcctgataaaccatgagtggcacaccgagtacgagacgggaaacgccgaccgcgtgatattcgagggcttctacggagactacgagataaccttcacgcacgacggaaagaaatacacaagaaaagcgcacctgttccgcgacactaccggatatgacaacaggctggcggattacagaactacgagagtagaaatataagttacaaaacgcccacggatttcccgcgggcgtttaactatttacttaatatcatatccaccgtcaatcattacggtctccccgatcatctgcgtggcttcgtcgctgagcatatacatggcgagggagctgacttcctccactgtgaggtatcttccggtcggtatgcgtgagtggtccatcggatcgccctcgtgccagccgttcatttcggtcgctaccggaccgggtcctatgccgtttatcacgattccgtacggggcgaactgctttccccatccgcgcgtcagaccgacaactcccgccttcgacgtgcagtagggtccgtagaagggttcggtcgccgccaccgacgctatgttcaggacgttgccgcggattttgttttcgtacatatgcctgaccgcggtctgcatcatgaagtacgcgccgcggagattcacgttcatgacgttgtcccattcctccggcgtcagctccagcatcgacattccccactcgtgcgcgggagtgagcactccggcgttgctgacaagtatgtcgagtccgccgagcatttccttcgcccggtcgaatttcttacgcgtaacgtccgtgtccgcgatgtcccagacgatataatcggcgccgatccgctcagccgcttctctgagcgttttttcgtttctgccggttatgacgaccttcacgccgtcgagggtcaggcggcgcgctatgccgaatcctatcccgcggctccctccggtgacgagggctttcgttcctcttgttttcattgctgtaatccctttccgccccgcgaataattctctcgccgggcgcgtatatattttctcgtgtttataaattatatcatcgccggaaataaaagtaaatgtccgccgcggatattttttgttcctgtgaatcagatatgtgaacatcatgtaaattgcgggaaatcgcggctcgaaaactgtcgaatatgtcgtggctgacaatgttttaatgataacttaacatctttttgatgtgcaggcgattgacgaacttgcccggatgtgctatactttattcggatcatgggggtgaaatacacacctgtcgatcgatgttccaccgcacggattgataaaacttctactgttggtttttgtcggattttgtcacgcagttttatccggaccgcaaatggaccagagaagatactgcacagaggcagaacgtgggcagtcggaggcaccgctgcccgcttttttgcgggtaaacgacagaataaaagaaaggatcacgctttatgacagacaatgagctgcggcgtctgagccgcgcggagctgctcgagatactgatcaggctcacaaacgaaaacgaagaactgaaaagaaatcttaatgacgcagagggaaagctgaacgacagaaagatcatgattggtgagtcgggttcgatcgccaaggcggcgctcaagctgagcgatgtgttcgccgccg

SEQ ID NO: 1471 - DNA, 3585 bp, Unknown
  16S sequences of unknown bacteria
tatgcgcagactctgtcgtcgtggccgtagccgagaaccatggagcggtcaaaaccgagctcgcgcgcacggcccgccggcacgacctcgagctctgcggagaggaagtcctcttcggcgacatcgtatttctcggcgagaatcttcaagacgttggccttgacgggctctttctcggcgagcttttcccatgcgggcctgtcgtcgtctccgtcggcgtctttggaggcatccgcgtcgagtacgagcggcttgccgccgacgagcaggtcgagcgcctcgccttcgacgaccttgctcgcgtccttcttcatctgctcttgcgccaggtggatgagcaggtcggtgacgacgaacacggggtcggacgggtcttcgcccaccgtgacgggcacgacggccccgtcggtcttggcgatgacgccgtgaatggccagcgggagcgtgacccactggtacttcttgatgccgccgtagtagtgcgtgtcgagaaacgccaggtcggtggactcgtagagcgggttttgcttgaggtcgaggcgcggcgagtcgatgtgcgcgcccaggatgttgaggccatgctcgagcggctcggtgcccaggtgcacgaggatgagggccttgccgtgcgtgtgcgcccagaccttgtcacccgccttgagatgaccgccgttctcgatgagttcgtcgagagagacatagccggcgtcttcggcctccttgatggcggcagcggcgatctcgcgctcgatcttgttatcggatatgaagtcgatgtagcgtgcggcaagctcgtctaccttggcgagctcgtcgtccgaataggttttccaggcattctggtgttccatgcgcttcctcctcggtctgcgttcgtcgaaacattgactgcccgctacactagcacgcgcgcttttgcccgcccggtttcgcaaccattttgaaaccgcctcctgccgtgacgcgagaggctacatctcgagaagccttttcgggcacaggcacacggcgtagctgttgtcgccaaagtagacgcccaccaggctgcacagccagccgaccttgtccgtccggtacaagatgccctccgcgtcgagccgctcttgcacagctgcgatatgctcgtctgcatttgcgccgcaaaacctgagctcgggggtgtcgtggcattcgacgtattccgcaacgagcttgacgagctccttgtactgcgcctttgtgccgcgtggcttggagatgatgttcacggcgccgtcgtttttgcgcagcgtgaggatgggcttgagcgaaagcccgctgtccgcgccctcgccgccttcggcgatctttccacccttgtagatgaactcgatgctctgcattcccacgaagatggcggattcttccacaatctgctgcatgcgagccgcaacggcttcgagtgcgacgcccgcgtcgcgcatgcggcacgccgtctcgatcatcatggacatgacagccgccgtgctcttggaatcgatgcacgtgatgggaatctcgaggtcgtcacagccctgggcagcgacgacgctcgagttgtaggtgccggacgacgcgccggtgagcgtgatgcacaagatgccgtcagctccagcggcagccgctttcctgaaagccgcctcgaacgcgcctggggaggggcaggcgcttttcggcagctcgggatagcgctcgtggagcatcttgtagaaccgggcgggcccgagctcgaagccgtcgacgtagacctcgtcgccaaagctgatggtcaacgggacgacggagactccgagctcgtcgagcctggtcagggggatgtcgctcgtactgtcggtgacaatggcaaacataatgctccttgctctattcgtgtccactggggtgggttggcggtacatatggatgcaatagtggacaacgcgacgaggctcgtcggggagaatctttattttgcgcaaagaacaggtgaagacgtgtcgggcactggtagaatcggcgctgttttgtatgacgcctgcgagggggacgcatgggatttgtggagctgctgctgatcggcgttgggctgtcgatggacgccttcgcggtctccatctgcaaggggctcggcatgcagcgcgtcaactggggccattcgcttgtcatcgcgctgttctttggcggtttccaggccctcatgccgctgttgggctgggcgctcggcagtcagtttgccgcctacgtgacgcccgttgccccctgggttgcctttgcgctgctcgcgtttgtcggcggcaagatgctgtgggacgccttccatgaggatggagaggacgaggccgggcgaagtgcggacaagctcgacgtgaaggagctgttcatgctcgccatcgccacgagcatcgatgcgtttgccgtggggctgagcttcgcgtttttgcaggtcgacatcgtctcgtcggtcgccatcatcggcgtcacgacctttgcgctctcgcttgtgggcgtgagcgcgggcaatatcttcggctcgcggtgggagcggccgtcgacgatcgctggcggcgcgatcttgatcttgatcggcctgcacacgttgctcgacggcctgggcatcctgccgttctagccgctacatcgcgcggcgcaccgcgtctttccagccgtccagcagctcgtcgacgcgcgtctgctccatcttgggctcgaagacgtcgtcggaagagcgcagcgcgcgcagctcgtcggtgccttcccagaagccggatgcgagccccgcgagaaacgccgcgccgagcgcggtggtctcgatgttttgggggcggcggatctgcacgcgcgagatgtctgcctggaactgcatgagaaagtcgttcgacgaggctccgccgtccacgttgagctcgcgcatgggcttgcccgcgtccgcttccatggcgacgcacaggtcgttgagctggtaggagagggcctcgagcgcggcgcgcacgatgtgcgcccgattggtgccgcgcgtgagccccgtgatgatgccgcgcgcctcggggttccagtagggcgctccgagcccggtgaacgcgggcacgatgtagacaccgcccgtgctctcgaccgtggaggcgatgtactcggtctcggcggcgttctgaatcaggccgagctcgtcgcgcagccactggacgagcgcgccggccacaaagacgctgccctcgagcgcgtactcggtatgcccgacgcccggggccgatgccgcgatggtggtgaccaggttgttcttggacggcttggggtcagagccgacgttcatcagcagaaagcaacccgtgccgtaggtgttctttgcctgcccttcctcgaagcagcattgcccgaacaaggcggattgctggtcgcccgccacgccgcagatggggatgcctgccgggatgttgggataggcggtcacgccaaagtctcctgccgagggcctgacctcgggcatcatgcaggcggggatgccgaacagctcgagtagctcgtcatcccagcagccctcgtagatgttgtagagcatggtgcggctcgcgttggtgacgtcggtcgcgtgcaccttgccgccggtcagggtcc

SEQ ID NO: 1472 - DNA, 8038 bp, Unknown
  16S sequences of unknown bacteria
atccgccgcaggcggcagtcggttgttatgctccgccaataccaccccagtgttcttaaaaatagctttttaagctatttttcgcttacaaggtgtttttccgccgcgcatgtcagcggaaaaacagagatgcggcgtgaacgccgcagaaataggatttggggtttattgacagactgtaaatataatattcggaatgcgtaatgcggaattaaatgaattttttgacggctttttgaatattgaggttaaaaagcaccaaatatcatacagagagacaaaaaacttgacaagagtaccgcgcagaatgtaaaatatacagtgtatgtaaggtttattgatatcggtaagtgagagccggtatttttataaaaaattaaaaagaaaaaattcggaggaaatctatttaatgaatgaaacaaacgaaaaaaagaatgtaggtaagagtacgggaacaagcggaagatacagaaagacccccgccaagaaaacggcggaagacaaaacgacggtagagaccaaaagggcatcggaaaagcctgcggcacaaaagaccgtgcagaagcgcacgggtaccgcagccgcagccaaaacaagaagctatacccccagaaaaaacaccggcgcaagaaataaaaagccgcttaaaataataccgctcggcggtctcggtgagataggaaagaacataaccctgtatgaatatgacggcgatatgttcttggtggactgcggtatgtccttcccggatgaggaaaccccgggtatcgatattgtaataccagatttcacctatgtgcttgaaaacaaggataagatcaagggtatggttgtgacccacggtcatgaggatcacatcggcgcaataccgtatttgctgcgcaactttaatgttccgatatacgccacacgcctgacaatcgggcttatagagggcaagcttaaggagcaccgcctgctgtccagcgcaaagcttaacaccgtagctcccggcgagacggtgaagctcggcaaattcacggtggaatttatacatgtgaatcactcgatccccgattcggtcggctttgcgataacctgcggtgcgggtactgttgtgcaaacgggcgactttaagattgacactacaccgatagatgattttgttatagatatcggaagattttcggaactcggcaagcagggcgttttggcgcttatgtccgactctacaaacgctgcaagacccggatatactccgtcggagcgcatagtcggcgagtcgttttcaaagcttttcggtcaggcaggggacagccgcattatagtagccaccttctcgtccaatattcaccgtattcagcagataatcgatgaagcggtgcgctgcggcagaaaggttgcggtttcgggcagaagcatgataaatgttgtcaatgttgccgcaaacctcggatatctcaatgtgccggacaatgtgctggttgatatcgaaatgataagaaattaccccgcaaatgaaatggttatcgtaaccacgggcagtcagggcgagccgatgtctgcgctgcatcgcattgcattttcggagcacaggcaggttgaaattataccgggggatatgataataatttcggcaaatccgattcccggcaacgaaaagcttgttaataaggttataaacgagctcatgaagcgcggcgcgaatgtcgtgtatgagagaatgtacgatgttcacgtttccggacacgcctgccaagaggaattaaagcttatgatgagcattatcaagccgaaatactttattcccctgcacggcgagcagatgcaccttgtaaagcatgcgggtcttgcgcggcaaatgggcatacccgaggataatattttaatagcctcgaacggcagcgttattgaggttacagataagagcattaaatccaccgaaaccgttcaggcgggcagagtactggttgacggactcggagtcggcgatgtcggcagcatagttctgcgtgacagaaagcatttggcagatgacggtattattatcattgccgtatctatcgacagcgtgactcatgcgataatttcgggtcccgatgtggtatcccgcggatttgtatatgttaaggaatccgaaagaatgatgaacgacataagccatttagtctgcgatacggttgactattcaatgtcggcgggtattcacgactgggcatcggtcaaaacaaaaattaaagagcgtgtatcgcgttatgtgaccacaaaaacgcgccgcgcgcctatgattcttcccataataatggaggtttaaagcaaatgaaggtagtattgttacaggatgttaagggtcacggcaaaaagggtgagctctgcaatgtatccgacggctacgcccgcaatttccttttcccgaaaaaattggcggtagaggcggataacaccgctttaaatgagcttaaaaaccgcgaggaggcaaaggaacaccaccttaaggaggaaattgccgcggcaaatgcgcttgccgaaaagctgaacggcaaaaccgttacaattacggcaaaggcaggctcgggcggcagacttttcggttctgttacctcaaaggaaatagcggctgaaattaaaaatgccttcggaattgaaatcgaccgtaaaaaaatgagcgtggcggatataaaggctttcggtgagtacactgcagagataaagctgcacaagggcatttccgcaaagctgacagttaaggtaacggagtaaaaaggatggctgacgaaaagcttatctacgaccttgacggggcacggctgccgtattccgttgaagcggagcaggcagttttggggtctattattatagaccccaaatgccttaatgatgttgcaacatctattaaagccgagtatttctatattccgcagcaccgcgaaatatatgcgaccttggctgaaatgtatgagctcagccagaccatcgattttatatcactgcttgaaaagctgaagcgcgacggcgtttatgacgaggcgggcgggaaagcatatctcactcaattggtgcaaaccgttccgtctgccgcgaatgtgcttacatatgtggcaatcgtaagggaacgctataccgcgcgttcgcttatgacggcggcgcaggatataatcaaggatattaacgataacgcgcttgattcctcccgcctgcttgacagcgccgaacagcgcatttacgaaattcgtcagggcagggaagtgaccggtcttacgcacattaaaagcgtaattgaaaacgagacctatgaccgactttccaaaatggcagaccccgagacccgcgcggactatgtgggtataccctgcggtataggcgagcttgacaggatgataacgggacttaataaatccgaccttataatcctcggtgcgcgccccggtatgggtaaaacctcgtttgcgcttaatattgtgcggaatgtggcggttaataccggcagaacggtctgctttttctcgcttgaaatgacccgcgaccagttggcacagcgtatgctttcaagcgaggctggtataaagagcgaaaagctccgcacaggcgagcttgatgaggacgagtggacaaggcttgcacaggcgggcgatgcgctttcaaaggcggatatatatttcgacgaaacctcatctataaccgtgcccgaaatgaaggcaaagctcagaagaatgaaaaaggttgaccttgtggttattgactatttgggtcttatgcactccgcgaggcagatagataaccgtgtacaggaaatttcggaaatcacccgtaaccttaaaataatggcaaaggagcttaaggttccggttattgcctgcgcgcaactttcgcgcggcaccgaggcaaagggtaaatcgcacaagccggcgctttccgatttgagagattcgggctctattgagcaggacgcggatatagtgcttttcctctaccgcgacgcatattacgatagtgaaaaatccgatgacgaggatctgagcgatcaaacaaaatcggaatgcattgtggctaaaaaccgccacggtgagatcggtacgataccgcttcactgggacggtcagtttaccagatttacttctgtggatgtgttcagataatggaagaaaaggttttaagcgccgtaaagcgcttttcgctgctctcgggcggggaaaaggttacggtggcgctctcgggcggggcggactcggtatcacttttgttcgcgttgctgcggctgcaaaaaaggcttaatatcaccgtttcggcggcgcatttcaaccatatgatacgcggcgctgaggcggacagggacgaagcctttgcacgggagctttgcgagaggctcggcgttccgtttattgcggggcgcggcgatgttccgaaatacgcggcggaaaataaaataagcgaggaaaccgcggcgcggcttcttcgctacgcttttttggaaagggcagaggggcttgttgccacggcgcacaccgcgagcgacaattttgaaaccgtgctttttaatttaacgcgcggtgcggcgctcggcggactgtgcggaataccgccgaaaagaggcaaatttatccgcccgctgcttttttgtacacgggaggatatcgaggaatactgcagagataatcatctcgaatttattaccgacagcaccaatttatccgatgattatacgcgaaaccggataaggcacaatgtaataccgattttgaaggagataaatccgtcggccgaaacggcggttatgaggacggttttatcgctttcggaagcaaacgactttatatcgggtattgccgacaaatttttgtcggacaatataagggacggcggactgtgtgtagcctcattgccgcactccgcagccgcaaaggcggcaatcaggcgctttgcggaaatatgcacgggtcttcagcccgacaatacacacacagaggctttgtattataccgccctcaacggcggaaggacgagcctgcccggtgatttcgagtgcgtttgcaaaaataaaatactgaagattaaagatataagtgccgaaaagggtaaaaaatacctatttgaggttaaaacggagcgacgaattaacgatttatttacaaaaagcgaaaaagttaataatttgttattaaaaaattcgcttgcctgtgataaaattataggacaatctgtattgagaacaaggcagccgggcgacagcataaggcttgcgggccgcggctgcaccaaaactctcaaaaagctttataatgagcttgccgtacctgagaatatgagggagcaacttcccgtcatggcggacgataagggcgttatatggatatacggcataggcgttgccgaccgctgtgcggtcacacaaaaaacaaaggagattacggttattaccgcttcggcggtgcaaaatattacggattaaggggttgaacgaattgtcgcttgacaaggatgtggaaagaatactggtgacagaggaggaggcaaaagcaatctgtaagcgcttgggcgagcagatttcaaaggactacgagggcaagcgcctcttgcttgtgagcgtgcttaaaggcgcggttgtgtttatggcggacttaatgcgctcgataacctgcgactgtcaaatcgattttatggcggtatcctcttacagcggaaccaaaaccacgggcgttgttaaattcaaaaaggaccttgatattgacccggacggctgcgatatactgctggttgaggatattctcgattcgggcgttacgctggcttatctgaaaaatgttttgatggacagaaacgccgcaagcattaaggtttgcgcgtttttggataaacccgcaaaccgccgcgcggatattcaggcggactatgtgggaaaagtaataccggatgaatttgtaatcggctacgggcttgattatgatgaaaaatacagaaatttgccttatgtcggggttttatcacctaaggtctacgccgacaaataggaaaggagccttaactcttgaacaagaatttaaaaaatgtgcttttgtttataggaatccccattgcgttcataatcgcggtgctttcggtttcctatctttcaaaaaacacggtggaaacaaagtattatgaaatcgttgaaatggttacggaaaataaaatttccgagttcagccttaacctccacagcggtcagcttatctacacaaagcgcgacgacggcaaaagctaccgttatacggtagccgacccatcgatattttataacgacgtcaacgattttgtgctgaaaaacaataccgaaaacatcggaaccgataaaataatcaagtacgattataaatccggcggagagaccgcatggataatgaatctgctgccgactcttataaccctcggagttatggtgctattctggatattcattatgaagcgtatgaacgcctcaatgggtacggataagaccatgggcttcggaaaagcaaaggtacgcaaggatgacggcaggcgcaagaccacatttgcggatgttgcgggagcagacgaggaaaaggaggaaatggctgaaatagtcgatttcctcaaagacccgaaaaagtataacgagctgggcgctaaaatacccaagggcgttttgcttgtgggccctcccggaacaggtaaaactttacttgcgcgcgcggttgcgggcgaggcgggagtccccttcttctcgatttcgggctcggatttcgttgaaatgttcgtgggcgtgggagcttcgcgtgtgcgcgaccttttcggcgaggcaaagcgcgaggctccggccattatatttattgatgaaatagatgcggtgggcaggcagcgcggcgcgggtctcggcggcggtcacgatgagcgcgagcagacgcttaaccaactgcttgttgaaatggatggcttcggcgctaatgagggcgttatagtaatggcggcgaccaaccgccccgatattctggataaggcgcttctgcgcccgggtcgtttcgaccgtcagataaccgtaaactacccggatgttaagggcagggaggaaatactcaaggttcattcaagaggcaaaccgctcggccccgatgttaaccttgccaccatcgcaaaatctacctcgggctttacgggagcggatcttgcaaacctgcttaacgaggcggcgctgcttgctgtgcgtcacggtaaaaaggcaatcacacagcaggagatcgaggaggctacaattaaggtggttatgggtgcggagaaaaaatcccacattgtatcggataaggataaaaaggttaccgcataccatgaggcgggtcacgcaatcgtttcttacttcctgcccacgcaggatcccgttcatcaaatctccattattcagcgcggcatggctgcgggctatacaatgtatctgccggttgacgaaaagggtcatacctccaaaaatcagctttccgagcagatatgctccttgctcggcggcagagcagcagagcagctgacgcaggatgatgtatgcacgggtgcttcaaacgatattgagcgcgcaacctcgcttgcaagacagatgataaccaagttcggcatgagcgacagactcggtctggttacctacggtcatgataataacgaagtatttttgggccgtgatttctcgtccacaccgaactattcggagaagactgccgccgcaatcgatgaggagatcgaggcagtcgtaatgaaacagtatgcaaaggcactggagcttttgaataatgctatgccgaagctgcacgccgttgccaaggttttgtttgaaaaggaaaaaatttcgggcgatgagttcagagccataatggaacagtaattttaaatcaaggaaccgcaaaccgcttttcaagaacggctgcggttctttctgtgttttgtgagatgctttaaggttttgtccgtttttttattctttgaattaaaatgtaggttttgcaacactcatctgaatcacacacaggcaaaacggatgtgacagctccggtttcctgtgtgttttctatgtaaccggttgccc

SEQ ID NO: 1473 - DNA, 6704 bp, Unknown
  16S sequences of unknown bacteria
acgctcccgccactccggaaagcagcatatactttggctcgacatgtccaattgcaagaaaactactccgatccgtgaaaatccatgctgccagacaggccagcagcgccgtaaactgcacaaaagcagacgatacccacaggctcgtctgtctcgtcacctcagtattaaacaccccctgtacgctcatcagcacaccggaaagcagcgcgatcgacattcccgacattttgttccgtcctcctgatccacatagcttattgacccgcaaacaccgaaaagaggtgttttaggattgtatcatagtatgcgcgcatggctttattttattctgaccaggatccgcaaaatccatgccccacaaaaatgatgaaaaaatacagtccccggaaaacctcacccggagactgtacttctgtggatattgtatttctatgaattatgaatattgtatttctatgaatatctccttacccatagtatcacgcaagcgcacgctcaagtctgcggatcatctcgtccacatcctccttctcgattacaagcggcggcacaaaacgcagcacatccgagccggcgctcaaaacgatcagccgctgttccagtgctttttttacaatctcgccaaccgggcggcctgtgacaacgacgccctgcatcagtccttttcctctgcgcaggctcaggcagtcgtacttgcccaccagctcatcgagcttctgctccagatatggtgcgatatcctgtacatgcttcacgatctgctgctcttcaaacagatcgaatacctttgagaccgctgcgcacgccaacggattgccgccataggtcgtcccgtggtctcccggtacgagcgatgccccggccaccttctcatttaagacgaacgcgccgaccggcactccgcagccaagtgcctttgcgcaggtcataatatccggcttcacaccgtactgctgccatgcaaaatagctgccggttcgtcccatgccgcactggatctcatcaaggatcagcaggatatctttttcttcgcaaatcgctttgatgccctgcagaaattccggatctgccggataaataccgccttcgccctgcaccgtctcaagaataatcgcacaggtcttgtctgtcacctgcgctttcacgctggcaagatcattaaagtctgcaaattttacgcctcccatcagcggctggaatgcctcctggtaatgcgggttgcccgtcacggaaagcgctccgatgctccggccgtgaaaggaatggcgcattgcgatgatctcatgatccgtgccgccatccttcaaaaaggcatactttctggctgccttgatcgcaccctcaatcgcttccgttccgctgttcgtaaagaacaccttatccatcccgcttgcctttaccagcttcttcgccgcctctgccagcggtacattatagtaaagatttgaagtgtggatcagctgatccacctgcgcttttaacgcatcgttatacgcttcatttccatagccgagtgcgaatactgcgatcccggctccgaaatccagataatcatttccatctgcatctgtcagatagacaccgtgcccctcctttaatacaaccggaagccggttgtaggtgtgcagcacatactgctccgtctgctccatatattctttactgttcattgaaaaatggctcctctccgtctccgataatcgcagttccgatacccttattggtaaagaactccaggagcaggcagtgctcgatccgtccgtccaaaatatggacgcgcgatacgcctgactcaattgcctgaatacagttctgcagcttcggcagcataccgccgccgacattgccgctctttaaaaactcctttgcctccgggatcgtcagctcactgatcagactcgtgcgatccagcggatcacggtatacaccctcgatatctgtcaggaacgccagctttgccgccttgactgccgtcgcaatcgcacaggccgcatcatctgcattgatattgtaggaatgaaactcatcatctgaaccaatcgggcagataaccgggataaaatcattgtccagcaacgtctccaaaagcgtcgtatcgacatgcctgacctcaccgacaaagccgatatccttaccgcctgccagcttcttatcgacctgcaacaccgatccgtccttgccgctgatgccgactgccttcaatccgaccttttccatcatggaaacaaggcctttgttgatcttgttgagcaccatctcggccacttccatcgtctccgcatccgtgacacgcaggccgttcacaaaattcgtctcaaggccaaccttattgatccactttgtgatctcttttccaccaccgtgtacgatgatcggccggaacccgaccagcttcagaagtgccacatctctgatcacgctctttttcagctcgtgatccaccatcgcacttccaccatattttactacgattgtttttccgtgaaaacgctggatatacggaagcgcctcaatcagcacattcgccttttccagccacatctccatcatcggttccatttttgtcggctccatttcgtcacactctctttcttttttcaggaatgcctctgcattcttgctgcaagatacgcgtcatgcaacgcaagacatacttcttctgcgcatcttagcaatcctgccggaggctatatcagatgagggattgactcccgccactgataccgatttgtttatctgatatattgatatatgctcaggatcgataatccgcattgatcttcacatagtcaaatgtcagatcgcagccccacgccgtcgcggatgcctcacccatctttacatcagcgatcgcggtcacttccttctcagagaggatcttcgtcgcttcctcctcgctgtatccggtcgaaacaccgttttcgatgattttcagctttccggctgcgctctcgaaccagaggtccaccttttccggatcaaactgcacaccagagtatcccatcgcacacaggattcgcccccagtttgcatcatggccgaagatcgcagccttcgtcagattcgatgtgatgacagatttgctcagagtcaccgcatcggccttgctcgccgcaccggtcacctttacctcaaaaagtgcgcttgctccttctccgtctgccgccatatgctttgccagatacgtattgacctcatttaatgcctttacaaatgccgcataatcctcattttcctctgtgatcttcggattcccagcttcaccgtttgccagcagcagtgcagtatcattggtcgacgtatctccatccacagatatcatattgtatgtatcctgtacgcttgcactcagtgctttctgcaaaagctccttcgaaatcgccgcatcagtcgtcacaaagctgagcatcgtgcacatattcggatggatcatgccggaacccttgcacataccgccgatcgtgaccgtctttccgcctaaggtcacctcgacgaccacttcctttttcaccgtatccgtcgtcatgatcgcctctgccgccagcgtcgccgccgcctgtgtatgtgccagcatcggctgcattgtctcaatgcccgcacggatcttattaatcggaatctgcgcgccgatcacgcccgtagaagccacaagcacctgatctgccctgatgccaaagagctccgccgccttttccgccgtctgtttgcagtagccaagtccttcttctccggtacatgcattggccacgccgctgttgactaccaccgcatggacgctgccgcctccatatacgactgactgatcccatttgaccggagctgccttcacgacatttgtcgtaaatgtaccggccacctcacatggtatcctgctgtagatcagtgccatgtctttctttccttttttgataccggctgctatgccgatcgcctcaaagcctttagccgctgtcacgccgccatctgtcttctttatcattttctcttctttccttcttcctgtatgtattcgcaaaagggtatcaagccttactgtctttcattacggaaataccggcggcatccgaagtccttccgcctcgtcctcgccaaagagcagattcatattctgcacagcctgtcctgccgctcctttgaccagattgtccattgcccccatcataatgatgcgatgtgttcgcggatccagcttaaatccgacgtcgacgtagttactgccttccacccactttgtctgcgggcagacgtccttcggcagtacacgcacaaaacgctccttctcataataccggtcgtaaaccgcctttacctcttcataggagacatcctttttcaaagacgcataagccgtcactaaaatgccgcggttcatcggcaccaggtgcggtgtaaaattcagccgtaccggacggttcgccgcataggagagctgctcctcgatctccggcgtatgccgatgcgtcgccacaccgtatgccttcatattttcattgacctcacagaaaagattgtccgtcttcgctccacggccggcccctgatgtgccggactttgcgtcaataataatcgtatccggatcaatcagctgctcctttacgagcggataaatggagagtgtgctgcaggtcggatagcagcccggattcgcaacgatacgagcgcctctgatcttctcccggttgatttcgcacagaccgtatactgcctcttcgatatactgcggcgctttgtgctccatcttgtaccactcttcgtatacttttacatccttcagacggaaatctgcgctcaggtcgatcacctttgcatgtgagagaatgtcttcattaattaaggaagcacacagtccctgtggcgtcgccgtgaaaatgacatccgcctcttttgccagctcatccatattgtcatccatgcactttgcatcgacgagctgaaacatattctgataaatcgacgcatacggctgatccacatagcttctggagccgtaccacacgatttcggcatccttatgtcccagcagcagacgcacaagctctgcccccgcatatccggttgctcctatgattcctgcttttatcatcacacttctcctcctcgttttttcccaattctataccaaatgtgaaaataagtaaagaggttttatgcgcatatttatacatttctcattaaataacattcaaattccgctgttttctgaacggatggaatggcttttatatttccgttttttctgtcatttcacagaattttgaaatagggcttgcatatttatgattcttgatgtatattaattgcagttcagaaatacacacagaggaggaacctgttattatgaaagaaaaagtaattcttgcctattcgggcggacttgatacgaccgctatgattccgtggctgaaagacaattttgattatgaagtcatctgctgctgcatcgactgcggacagggaaatgagctggaaggtctggatgagcgtgcaaagctttccggggcttccaaattgtacatcgaagacatcaaggatgagttctgcaatgatttcgttatgccgtgcgtaaaggcaggcgctgtctatgagcacagctatctgctcggcacctccatggcccgtccggccattgcaaagcgtctcgtagagatcgcccgcaaggagggcgctaccacaatctgccatggcgcgaccggtaaaggaaatgaccagattcgttttgagctcggcatcaaggctctcgccccggatctgaaggtcatcgctccttggcgtatgactgatgtatggaaaatggaatcccgtgaggatgagatcgaattctgcaaacagcacggcatcgtgcttccgttcgaccacagccacagctacagccgcgaccgcaacctctggcacatcagccacgagggacttgagcttgaggatccggcaaacgagccgaattacgacaacatgcttgttcttggcgtgacaccggaaaaagctccggatcagggcgaatatgtgaccatgacttttgaagcaggtactccgaagaccttaaacggcaaggaaatgactgtctgcgagatcatcacggagctgaacaagctcggcggcaagcacggcatcggcatcgtcgatatcgtcgagaaccgcgtcgtaggcatgaagtcccgcggcgtctatgagacaccgggcggaacgatcctgatggccgcacatgaccagctcgaggagctgatccttgaccgtgagaccatggagacaaagaaaaagctcggcagccagttcgcacaggtcgtttacgaaggaaaatggttcaccccgctgcgtgaggccattcaggcattcgtagagtccacccagcagtacgtgaccggagaagtaaagttcaagctttacaagggcaatatcatcaaggccggcacaacctctccgtacagcctttacaatgaatctctggcaagcttcacgaccggcgacctttacgatcaccatgacgcatccggattcatcaccctgttcggacttccgctgaaggttcgtgcgatgaaaatgatggaagcaaagaaaaacgcggagagcaaataagctttctgttccaatagcaaaagccccctggcaaatccaaatgtttgccagggggcttttgtattcgtttatctgaacagctgcttcgcagcctcaccacaggagtggctcgtatcagttcgaccgtactt

SEQ ID NO: 1474 - DNA, 1891 bp, Unknown
  16S sequences of unknown bacteria
cttgggacccgccaaacatgagaaagtagcgatttacgtagtaaatcagcggatttcgaatgtttgcagaattgcgggagctgcttcgcagcggagcaattcgtaggcatcagtttgggtcaaaaggtattttgacccttagatacacggtaatacagatatggagaatgcgtcaacaggaaaacaaaatcattataaaaaattgtgaaatatagacaaaaatcacctgcatgaactgtgcaaatattaactagaaaaactttgcattttgtgaaaatattcgatatatttagaggagaagatctggttaacagaaaacataggagagatttgtaaaggagaggacagaaatgaagacgtttatggattcggattttttgctttcaacgataacagcgaaaaagctgtttcatgaatatgcggaagggatgccgattgtcgactatcactgccatatcaatccgcaggagatcgctgaggatcggaagtttgagaatatcacgcaggtatggctgggtggggatcattataaatggaggcagatgcgttccaacggcattgacgaatattatattaccggtggtgcctctgaccgggaaaagtttcagaagtgggcggagacgctggcgctcgcaatcggaaacccactctatcactggagccatctggagttgcagcggtattttggctacaccggctatttgaacggagacacagcagaggaggtctggcagctctgcaacgcaaagctgcaggaggatgatctgtctgttcgaaatatcattcgccgttccggggtaaagctgatctgtacgaccgatgatccggcagattctctgcaatggcataaaagcctgcgggaggataaaagctttgaagtgcaggtgctcccggcatggcggccggataaggcgatgaatctggagaagccggattatccgtcttacattgcgcgtctgtcagaggtgagtggagtggcgattcaggatttttccggcttaaaggcggcgcttttgaagcggatggactattttgcatcgtttggctgccgtgtatccgatcatgcgctggagtatgtcatgtcatcaccggcatccgaagaagaggttgatgcgattctgaaaaaagcactggcaggcgaaacagtcacaaagcctgagacgctgaagttcaagatggcgtttctgcagtttctcgcggcacagtaccatgagagaggttgggtgatgcagctgcactatggctgcaagcgggataataatacgcggatgtatcgactgcttggtccggataccggatatgactgcatcagcaactatacgccaggcagcgagacggcggactttctggatgcgctggagctgcagggaattttgccgaaaacgatcctttattctctgaatccgcaggataatgaggtgatcggctcgatcatcggctgtttccagggaaccgaagctgccggaaagcttcagcacgggagtgcctggtggtttaacgaccacaagaccggcatggtggcacagatgacttcgcttgccaacctgggcctgctctccaattttatcggtatgctgaccgattccaggagctttttatcctatacgcggcatgagtatttccgcagaattttgtgcgagctgatcggaggctgggtggaaaatggggaatacccggcagattaccggatgcttgagaaaatcataaagggaatttcctatgaaaatgcagtaaagtatttcggatttgaacgcagataagtattcccccgcttcaagtgcgcaaagtgactgcgaatgtccgttttacgctgctaaaaaatcagaggatatcagcaaaaatttttaatatgaaaaagagaaaatttataattctggccattgcaataatt

SEQ ID NO: 1475 - DNA, 1811 bp, Unknown
  16S sequences of unknown bacteria
ccgccgctgcagccgcccgggcatgccatgacttccacaaaatcaaattcggcctcaccgcggcgcatcgcttcgatcagctttctggtattgcctaggccgctgaccttggcacagcggaccgaagtcttgcctaaatcaaagtggaatgctttccaggcatccatgccgcgcatctgctgataggcatctgggtcaggatccttgccattgaccagatagtacgctgtgcgcagcgcggcttccatcacgccgccgctggcgccgaagatcacggccgcgccgctggcttcgccaagcggatcatcaagcggcagatcttgcagcacgctgacatcgatgtgttctgagcggatcatgcgcacgacttccctggtcgtcagcacgaggtccacgtcccggaatccggaatcattcatcgccgggatatcgatctcctgtttcttggccacacagggcatgatcgagatattgaagatccgggaaggatccacaccgagccgctgtgccagccatgtcttggtcaaggtgccgaacatctgatgcggagatttagaggtagacagctgtgagaccatgtccgggtattgggatttcaagaagcgcacccagcccgggcagcaggaggtgaacatcggcaggggggcgccggcgcgcatccgctccagaaactcactggcttcctctataatggtcagatcagcgcccagatcggtgtcgaatacataatcagcacccatccggcgcagcgcgtcgcccagcttgccgacggtcgccgtttcgcgcggcaggcccagcgattcgccccaggccgcgcgaacagccggtgcaatctgcacgatggtgatccgatcaggatcgctgaacgcgtcgatcgcgcgttcgctgtcttcccgcacatgcaaggcgttgaccggacaatgggtgatgcactgaccgcacaggctgcattccgcttcctcgatgctgcggttgaacgaaacatttacggtcgtgcgggaaccggtcttctgcacgtcccatacgcgcagatcctgcactttatcacagatctggatgcagcgcatgcatttgatgcatttattgctttcccggataagaggaaactgttgattccaggggatataggtaacttttttctcataaggcagagcggtgatgcccagctcattgctcactttctgcaattcgcaattgccgctgcgcgaacaataggcgcattcgcagtcgtgctgtgaaagcagcagctgcacattgcagcggcgggcatgacgcacctttggcgaattggtgtagatgaccatgccttcctgcacgagcgtattgcatgcggtcaccagccggtcttttccttccagctcgaccgcgcagatacggcaggcaccgatgtcattgatgcccttgagataacaaaggtgaggaatttcgatatgtgctgttttggcggcctccaggatggtcaagcggccatccaccgcgatccgctgattatctatcgtgatcgttaccattttgtcgtccttcctcccttgaatacgccgaagccgaaatggtcgcagcgcaggcatctgccgcattcctgctgagcctcttcttcgctcatgccgaattcgatcggctcgaagtctttgccgcgttcgctcgtctcccgctccttgagctggatgcgtccacattttggacgatccgcatagttggccggcggtatctctacatcgcagccgatgacatgatgacagccgagatagtcatcgatattcgcggccgcgaccttgcctgccgcgatggcgcggatgaccgtggctgggccc

SEQ ID NO: 1476 - DNA, 7480 bp, Unknown
  16S sequences of unknown bacteria
cagactttctttctgtcccccgggctgctcttttttcgcttctttcgacaaaggtaaaatttttctgtttctatttacaaaatgtttattgacccctcgatttcctttggatatgataggaactgtccgtatgacaccctgtcataacaaaggagaaaaacatgccgaccagtaccttttatcacctgcccgagcaaaaacggcaaaagctgattgacgccatccggcaggaaatacttcgcgttccatatgagaaaatttccatcaacaaaatcattcaaaacgcaggaatcccaagaggaagtttctaccagtattttgtagataaaaatgacatgtttcagatgattttgggagattttcataaaaaaatggaggatatctcaaaagaaagccttagaaagcacaatggagatcctttcgccttgacacaggatattttcgatttggtctgccagatttcccagcgcacggatctgtacttattatatcaaaacctgcttagtgggatgaaagtaaaagatgagcgtgcatcctacctccccttcttcctaccgcaagaaagaggcagagaaatgatctcctttatcgatctttcccggctggatctgcggcaggaaaacgatttgttcgattgtgcggatatcttagcaagcctgctgaaatgggcgatcgtggagctgtttgccgaaccggcgcgcaaagcagaaatcagcgcaagttttcaaaataaaatcgccattctgcgccgtggaatggacccgaaacaggaggaaaccggatgttagccaaatttagtgtaaaaaagccgctgaccgttttggtcgcggtaattctggtgttgattttgggctttgtgtcctttaccagcatgacgcccgaccttttgcccaacatggacttccccatggctgtgctgatgactacttatcccggcgcttctcctgaggaggtggaagccaccctcaccaagcctttggaacagtcgatggcaacgctggaaaatatcagtaccgtaacctccagttccagcgaaaattattcgatcctttttttggagtttaacgacaatgccaatatggattccatttcggtggatatccgggaaaaaatttcgttgatcgagggcgcgtggcctgaatcggtaggcaccccctatctgatgaaaataaatccgaatatcctgccggttatgatcgctgctgttgatctggacggcgcggataccacggaattgaccagctttttaaacgatacgctgatgaataagctggaaggcgttgccggggttgccagcatatccgccagcggcactgtggaaaaacaaatcaatgtcctgctctcgcagcgaaaaatagatgcggtaaacgaaaaaatgcaggccgccctcaatgacaaattcgataaggccgatgccgaactggctgacgccaaagcagaactggaaagcggcaagcaggaactgcagaacggccacgagactcttcgggaagaaatgggtaaagccgaaagcgaaatttattccggaaaagcccagctggaaacggcggacatggcgattgacgccgtattggaacaggcagatgagcagctgccagagctcaaaagtcaaaaaaagaaaatggaccagctgattgccacactggatcaactggaagcggcccaagccgctttcgacgagcagattgccgcaatcgaagcgcgggaagattggacccaagagcaaaaagacaccgctatcgcccaaatcacctccagcgtagaataccatcaggtgcaaatcgcgctggagcaaattgacagcgcactggacgaaatgggattggatcgtcagacagtccgcaccacagctgcggcactggatcagagcattaccggcatggaagacgccatggtatatctggaagacacccaagaggagttgagcgccggtaaaattacgctggaggatgccatcagccagatgaacgagaaaaaagccggtgccgaatgggaaatttacagcgcactggtcaaaattctagtaggcgaaacctccttggacagcgcccagcaacagttggacgacgcccgtttagaagcggaaaaaaccgatatgggcgatacgctgacaatggatatggtttccaaaatcctgacagcgcagaacttttccatgcctgctggatacataactgaaagcggtgttgattatctggttcgggtaggcgataaaatctctgatttggaagagctgcagaatctgatgctgtttgaccccggcgtagaaggaatggatcccatttacctgcgggatgtggccgacatcttcgtttcggataacgcggccgaaacctatgccaaaatggggaaaaacgacggcgttattctttctttcaataaacagtccaactacgccaccgccgaagtgactgaaaatttgcagaaccgctttgaacagctctcgcaagagtacgaggggcttcatttcacctctctgatggatcagggcgactacattcatatgattgtcaactctgtactggaaaaccttgccttcggtgcagttctggccattatcatcctatttttcttcttaaaggatgtgaagcctacctctatcattgccgtttccattccgattagtgttatttttgcgattgtactgatgtatttttccggtgtgacactgaacatgatctccctgtccggtctggcagtcggcgttggtatgctggtggataactcggtggtggtaatcgaaaatatctaccggctgcggggaaagggctacacggccgcccaagcggctgtttccggcgcgtcgcaggtggcggcggccatcacttcctctaccctgaccacggtctgtgtcttcttgcccattgttttcattgagggaattacccgacagttgttcaccgacatggcgctgaccattgcctattctctattggccagcctgatcgtggctttgacggtcgttcccgccatggcgcagcggactctgcggaaaaacacccccaaggaacacagatggtttgataaagtacagcatatttatgaaaaggctctgcgctggacgctgaaaaagaaatgggtggtattgtgcggatcgctggcgctgttggtactcagcttcgtctgggctttaagccgcggattttccttcatgccaagcgtggacagcgctcagatcagcttggaactgcagatgccggaggacgctactctggagcagacagcccaagtatctgacgatatcatcgaacgggtcagcgccatggatgaagtggaaactgtcggcgctatgctttccagcggcaccagcagcatgcttgggattggcacaggcagtgaagatgtgaccaatgtcagcatgtatattctgctgcgggaagatgtatccgtttctgtcagcgaactgtcccgtcggattgcagatgcctgctccgatctggagggcgaagtgacggtatccggctcctctgacatgagcaccatgatgactgccatgagcggttccggcgtcagcgtcaacctgtatggagacgacctggatctgctgcaatccaccgccggggaaattgctgctgcattgggacaagtagaagggattgccgaagtggacagcggtattggagacgctaccccggaacttcgtattgctgtggataagcaaaaagcgatggagcacggattgactgtggcccaggtgtatgcggaaatggccgccgccatgaaaagcgagactgcctctaccaccctgaaattggaaaacagtgacgtcagtgtggtaattgtagatggctcggccaccgaaatcagccgggaagaaattgaaaatcacgcctttactgtaaccaacagcgaaggagaaacatctcaggtttttttgaaagatattgcctcttttgccaatacccaatccttgagcaccatccagcgcgacgcgcagcgccgttatttgaccatttctgctaccctgcaagacggatataacgtcagtttggttgccgccgatgcccaaaaagcactagctgattattcgcttccttccggtttttccatggaatttgccggtgagaacgaaacgatcatggaatccatcaccgaacttttaaaaatgctgttgatggcggtagcctttatttatctaattatggttgcacagttccagtccctaaaatctccgtttatcgtgctgtttaccatcccactggcctttaccggcggtttgctggggttgatgatctgtggcatggaagtcagcgtcatttccatgatcggctttgtgatgctggcaggcataattgtcaacaacggtatcgttttgattgactatgtcaatcaactgcgcgctcagggagtttccaaatttgaagcgctggtagaggcgggtattacccgtctgcggccgattttgatgactactctgactactgtactgggcctgtctaccatggcaatggggatgggaaccggtgcacagatgatgcagccggtagccattgtctgcattggcggacttttatacgccacgttgatgactttgtttgttgtccccgctatgtacgatattatgaacaaaaaagaaattcgcactattcccgaagaagagctgcagctcgttgaggaataatcgcattatttttcactggcaaacggccaaccggaaatccggctggccgtttttactgaaagtttttgtccatggtattttttcctatcttccgcgccaaaatatgcttaaaaattcactctgattctatgcgcttttccagtttcccgcattttcagccgaataaacttgacaaaaacagtagaatatcatagtatatgactaggagaaatccattaaaaggaatccaagagcggttgccgccggcagacgttgcggctgctctttcaaaatacaggaaaaggagacaaaatacatgcttgtattagagcatattgcctggaacttaccggatggcgagccgattttaaaagatatcacactgaccgttcccgatgggaaattggcggtagtcaccggtcccaacggcggcggcaaaacttcccttgccaagctgatcgccggtttggaaaaaccagcggctggccgaattttattggacggcgaggatatcaccggattggacataacgcagcgagcaaaaaaaggggtggcttatgcgtttcagcagccggtacggttcaagggactttcggtgcgtgatttactggagctggctgccggcaatcccctttcagaccaggaattgtgtacgattttaggtcaagtggggttgtgtgcgcaggattatacagaccggcaggtggatgccagcctttccggcggcgaaagcaagcgtattgaaattgccactgtgctggcccgcaaagacgcgaatcttctaatctttgacgagccggaagccggcattgacctttggagcttttctggtctgatcgacgtattccaacgcatcaaatccagaaaacaggactctgcgctgattatttcacaccaggagcgtatcctgcaaattgctgatgagattatcgtcatcgctgatggagaggttcggtctgccgggccgcgggaacagattcttcccacgctgctgggggacgaaaaaacgggccgctgcccgctggaaggaggtccgctgtatgaataaaattaccgagacgctgctggggcttgtttccgactggaaaggggtattcaacggcgcatacaatatccgcgaggatggggcctgcgctggaaggcagtcctccgaacacattcaaattgaatccaaagaaggggctcccggtcttgtgatccatattgcgccggaggcccaaaacgaaacggtttacattccggcctgtgtaactcacagtgatgtcaacgatctggtctacaacgatttctacgtgggcgaaggtgcccatgtcaccatcgttgccggctgcggtgttcattccgacggcgaggaagaggcccggcacaacggcatccatcggttttttgtggaaaaaggcgcatatgtactctatcaggaaaagcatgtcggcaccggttccggcgcgggtatccgccgcattgacccggtcagcgacatccatctggccgaggacgctgtattggaaatggatacggtgcagattggcggcgttgaccgtacagatcgaaaaaccactgctcagctggcagatcgggcgcggctgattatccatgaaagcattctcaccgaaggagaacaaacagccagaacagacttttccgtttcgattgacggggaagatgcgtcggtggatctggtttcccgctcagtggccaagggcaattcccggcaggagtatcattcccggattctgggcaacaaccgctgtactggccattccgaatgtgacgcaattctggttggatccggcaaagtcaatgccgcgccggaactgtttgccggacatattgacgcttctttgattcatgaagcggcgatcggcaaaatcgcaggcgaacagattatcaaactgcgtactctgggcttgaccgaggaagaagccgaagagcggattattcagggctttttgcaaggctaaacggatttttttcaggagggatcagcgatgcagatattgttatgggcggtcggcggcgccggctttcccttccttatgactgcactgggcgctgcggttgtcttctttttcaaagagaggatcagcagcaatattcagcgcatttttctcggctttgccgcaggggtgatgattgccgcgtcggtgtggagccttttgattccggccattgaggaagcagagtccgcagggcagatcggctggattccggcggccggcggatttcttttgggcatcggctttctgatgctgctagattacattttaccccatctgcacccggatgcagcagagccggaggggccctccagtccttggaagcgctctaccctgctggtgctggcagtaaccctacacaacattcccgagggaatggcggtaggcctttcttttgcactggcagctcagcatgccgatccggctatgtataccgctgcattggctttggccattggcattggtattcaaaacttcccagagggagccgctatctctctgcccttgcgacaggaaggactcagccgcggacgggcatttttgtacggcggcctgtccggtattgtagagcctgttttcggtattctggctgtgctggtggccggcgggattcagccgttgatgccttggcttttatcctttgccgccggcgcaatgatgtatgtcgttgtagaggaattgattcccgaagcgcatttgggagagcactccaatgtcggcactttgggtgtaatgggcggtttcgtcgtcatgatgatcctggatgtagcgttgggataaaaacgtggaacgatcaaaatgatatgtacccagaattctggacacataaaaaattgaattaggtgcacatggatgcctctctgaattttgtaggaggcatcca

SEQ ID NO: 1477 - DNA, 7650 bp, Unknown
  16S sequences of unknown bacteria
ccgagcaggcccggcatgagaaaatcgaagatgctccagagctccgacaggcggttttcgatgggcgtacccgtgagcgcgaagcggtgcttggaggggacgctcttcaccgcctgcgcggcaagcgtcgcgtggttcttgatgtactgcgcctcgtcgagcgcaacgcacgaaaactcgatctgctggtacacctcgacgtcacggcgcatcaggtcgtacgaggtaacgagcacgtccgccgtgcccgtggggttctcgccggcgtactcgatgaggatgtcgtcgcgctcgggcttggagcccgccacggcgattgcgcgaagtccgggggcgaacttctcgaactcggcgatccagttgtagacgagggacgccgggcagacgatgagcgcgggggcacagtctgcgcgagcttccttctgcgcgagcaggtacgagatgagctgcacggacttgcccaggcccatctcgtcggcaagaatccccccaaagcccatgtcggacagcgtgcacagccactcgaagccctcgacctggtaggggcgaagcgtcgcgtgaaggccggcgggcacctggtagtttgccaggccgcgctgctcgaagttgttcacgtactggacgaacgacgcgtccttttgctcgtcggcgacgaggtcgtcgagctggagcgcgcgatacgcaggcagcacggcactgccgtcgcgcaggtcctcgggcatgaggtcgaggtcgacgagcaggtcgtcggcctctgccaggtcggcgttcgcgagatcgacaaacgagccgtccttcaggcggtggtagcgtttgcgtcgacggtagctgttgagcagcgcgacgagctcaccgcggggcaggtcgtcggccgagaccgtgaggttgataaggtttgccttgaacgagatgccaacactcgcatgcgggtggcgtctgctgatcagcccgtcgaactcgggggtcgtgagcagcgtcgcatgggctctgagctcgcgcaggccctcgaagagcagccgcgttatgtcctcttcgtccgaaaggcgcatcggcgagtcctgcgtgccggtcgtcttgccctcgaccacggggaaataacgtgcgagcaggcgcctgaccacacgctcggcgcccaggtcgcgcaagccgtagctgagcttggtgcgctcggccttggcctcgaacagcccgcagcgctcgtcgtcgtactgcgcgtacgcctcgcaggagatgcccttgcccgccctatcgaggcacacgatgacctcgcaggggcgtgggcgcatgacctccatctcgggcggctcgatgacctcgagatgtttctcgagcgaaggcagcacgttcgagcagaaggcgggcgcatcttgctcgctgatgaactgcacctcgtttttgttgctgtagacgtcgcggaggaactcctcgacctctgcgtagtcgggcgtgcagcggtagaacgcgccgttttgccagatatagcggctgttgccgcttgccacgagcgtgatgggctcgtcgcggtgcatctcgaaaccgccgtcacccaccgacgtgaactcgaccctgatgggtgggttgccatcaatgacgtgtgcctttcgcgccttgtgattgagcttgttcaagtcgtcgacgtagaagacgtgcctgtcgagcaggtcgagcagctcgaccagctcgggcatggaaaggaacaggtcgtgctccagatccttcgggcgcaggtggtaggagctgagctggtcgttttcgagctcctggcggatggacaccgcacgctgcagaaacgcgatgatgtcgagggcgtggtccgtgaacatcgccttgcggtgcgcaaacgagagcttcgtgccgtacgagtaggtttcctgcttgtcgacggcatcgagaaacgcgggcaggtccttgatgacgtagcgtgcggtggcgccggagatcctgaacttggccgaccagcgttgcgtgtcatgtgtgagcagcacgcccaggtcgatcgtgccgagatgctcggtctcggggcgcttgccctcgcccgagcccgccgtccttctgtcctcgacggacttgagaagcttggagatgccatcggacgacttggcgttgcggttgaggtcgtagcctaaaaacgtgtccgggtgctcgaggaagacgagcgcaacggccgtcacgtgcttgcacatgcccgaatgggacagcgacgaggggcaggtgcagtcgtagtcgagaacctcgccctcgctttcgtccaccttcaagataacatcgtagctcgtgcgccagtcgtcagcgctcgagacgtttgcgtggagttgggttgcgggcttctttccgggcttgtactggcaacgacggtcgaagatggatgcgtcagccttcaccaggttgcgcgcacgcctcaagacccttgaatcgcagtgccggatgatatccttttcggtgagcaaaacgcttccctacctcgtcgaatgaatcacttaactataccatctctcatggcgaagacttgacaaatcctcggccccatctgccagaatcgtcaaatacgctagactgtacgacgcttgaaacaccaaccgacatgcgtcgacgaccgaaaagagtactcatgagcaacgaaggcaagaaagtcaaagtccactacacgggcacccttgacgacggcaccaagttcgattcctcctacgaccgcaaccagccgctcgagttcacgtgcatggcgggccagatgatccccggcttcgaccgcgcggtaaaggacatggaagtcgggcagaagctgaccgtccacctcgagcccaaggacgcctacggcgagcgcagggatgacgcggtgcagaccatcgcgctttccaacatgcccggcgcagagaccctcaaggcgggcgagaaaatcgtgctgagcgaccccatgggcaaccgcttccccgcgctcgtctccgaggtgaccgacaccgagatcacgttcgacatgaaccatgagcttgccggcaaggcactcaacttcgaaatcgagctgctcgaggcaaactagcgttttttcggcagcgagaaaccgccgaacgcagcgcagcccgggtcatggcgcctctgccatgcccgggctgcattggttttggctgaaggcagccgagaggctgtcctagcgcccctcttcgggtgatggcggctcgtgcggcacgctcacgttcatctgggcgccgcgcaggctctgcgcatgggtgaacctgtagctctccgactcgatgaagaccttcgtcgtctgcgggtagtgcgcgacgatgacaccctctatgtcatcgatcgcgtcggtcacctgatcgcggtcgagctcctccgaaaacgtcacgtccatgttcatgagcatgtcgtgcgggcccatgtagtacgtgaggatgcggccgcactcgacgacgcgcgggtcgctctcgacgagcgcctcgagatcgcgcagttcagatgccttgagcccctcgccgatgagcagccccttggtctcgcgcagcaagatgaccgacacgctcgcgagcagcagcccgacgagcaccgaggccgcaccgtcaaggtaggggttgttgaacaggtggctcaagaagacgcccagaaacgcgaacagcaggccgagctctgccgcggaatcctcgagcacgaccgtgaacaggctcgggtcctttgcctcacggatgaactgcgccggccgcacgtcgccgcgtgccttgttgaagttgcgcacggcgatgaacagcgaggatccctcgatcgcggcagcgacgagcagcaccacgtagttcacggtggggtcgccgagcaccgtgtccggcccgacttcgcggatatgggagatgccctcgtagatggagacgcccccgcccagcgcgaagatcatgatggccacgacgagcgtccagaagtagagctcctgcccgtagccaaaggggtgctccacgtcgggcttgcgcgacgacttcttgatgccaagcaagatgagcaggccgttgccggaatccacgatggagtgtataccctcggagaccatcgccgaagaccccgagatggcggctgcgatgaacttgacgatgccgacgagaatgttcgcggcaaccgcggcgatcacggaaccggtgctctcgacagcaccctgctcctgctcgggccgaaacccctgaccatcgggcaacgtggaatctgacatgcggtttccttcctgtcgcttcgctcgacactgaaactcgttccattatacggatggtgctcgcatgccatggtgctcgcaaaaacaacaaaatcgaaacaagcgcggtaccgaatgcgcaacttgctattattcagacgacaaacgcatcggggccacacgggctccgcgcacgatgcctgaagagagaggatgctctcatttttaacaagaagcttgacgatgtcgtcgcgcgtatagagaagaactactacgattccgaagagatcttcttcacgaaccccgactggcattttccgtcgcgcaacgcgatcatcgaagttatcaacgacgtgcgccgcatcatgttcccccgctacttcggcgacgaggtgccgaccgaggccggccccaagtacttcatcggcgacacgctgacccacatcgaggagaacctccaccacgagctcaccgaggccttcctgttcagggacgaccacacgcgcccgctcgacgagatcgagacgcaggtgagcgatatctgctcggagttcttctacaagatcccggaaatccagaagatcctgctcaaggacgtgcaggccgccttcgatggagaccccgccgccgacagcaaggaagagatcatcttctgctaccccggcttcttcgccatctacgtctaccgcatcgcccactatttcgcgatcaaggacgtccccctcatcccgcgcatcatgaacgagtacgcgcacagcatcaccggcatcgacatcggatccggcgcagagatcggcgagtacttcttcatcgaccacgcctcgggcgtcgtcatcggcgagacgacgaagattggcgaccacgtcaagatctaccagggcgtcacgctcggcgcgctctccacgcgtgccggccagaagctcaagggcgtcaagcgccaccccaccatcgaggacaacgtcacgatttactccaacgcgagcatcctcggcggcgacaccgtcatcggcgaaggctcggtcatcgcgggcagcgcgtttgtcacgcagtcggtcccaccgggatcgcgcgtctcgctcaagaaccaggaggtcttcgtgaaagaccccaacaaacccgaagacccgtggtgctgggtcatctagagaccgggcagcagctgcaaacgaatcgaggtccccgaacaacacgccggggacctcgattcgttttggagaatagaagccgcctactgaatcatcgagtagtaggcggcaccgagcaagttggcgctgttgccgagcttgcccggcaggatttccgtctcgcgacacggctcgatgacgctttcggaaaacacctgctggaccttggacaggtacacgtgcgcgctcccggccacgcccccgccgagcagcacgacatccgggtcgagcaccgtgcagacctgcccgagggcaaaccccagggacttggcgaacacgtcgaccgccttgaccgcgcggaaatcgccttcctcgtaggcgcgaaacaccgtcaggctgtccgcatcgtgcttgggcatgagcatgtgcgcgagatggtcttgctggtggtcgagcgactcgtagacagacggggcgttggccccgacctccctgaacgtgcggacgatgccacgcgccgacgcatactgctccaggcagccgcgcctgccgcacgagcagcgcctgccgcccttcgcaacggagacatggccgatctcgcctgccgccccatgcgcgcccgcgatgacctttccaccgatgacgacaccggcgccgatgcccgtgccgatcgtcacgtacaagacgttgcggtagccgacgcccgccccgaatgccgcctcggcgagcgcgcccgcgttggcgtcgttgaggtaggcaaggtcggcgttgggaaagtagtcgcgcagcgattcgagcaggagctgcaggtcgagttggatgttggggagcaactcgacttctgcgccgagcacggtcccggggatggcgaccccgatgccctcgatttcggcagggtcgtagcgcgcctccacgacgaaggccttgagctggtcggaaaactccgcacaggcagccatctcgtcgaggggacgcgaacggtagatgaccttgtcgacgatctcgagttcctcgtcgacgagccccaccttgaccgtcgttccccccaggtcgattcctagtctgagaccctccatgtcaatcaccccaatcgacattgcggtagtatgcccatgtatctacctacatgatacccattgtcaaaggattagttccgccggttttcacgcagcaatgagggcacatgaccacttcgaacacgcaacgcgaacaagacgccctgcgaaaaaagactcgccttctggcgggcagaacctcgtggcgcacgcattccgatgcctcgctgggcatcacgagcatcgtgatgtccgatgggccgcatgggctgcgcaaagaagtcccgcaggcaggagccgaccacgcgggcttcaacccgacgcttcccgcgacctgctttcccacggcaagcgcccttgcctcgagcttcgacacccagctcgtctgggcagtcggcaaggcgatagcggaagaataccgccgtgcgagcgtgaacatcctgctcggccccggcgtcaacatgaagcgaagccccctgtgcggcaggaacttcgagtactacagcgaagacccctacctagccgggaccttggcctcgtcgtttgtcaaaggcgtgcagcagcagggcgtgggcgcctgcctcaagcactttgcctgcaactcgcaggagctcgcgcgcctcacctcggattccatcgtcgacgagcgggcgctcaacgagatatacctgcgcgcgttcgagctcgtcgtcgaacgggcagacccctggatggtcatggcggcctacaacaaggtcaacggcgtccatgcgaccgagagcaaggcgctgctcaccgacaagctcagagacgaatggggttgggacggtgtggtggtcacggactggggcgcgctcagcgaaagcgtcggctctctcaaggccgggctcgacctcgtgatgcccggaccccaggaatgccatgcgcgtgcccttgcgcaagccgtggaagaaggcgtgctcgacgagggcgtcgtagacgctgcgctgcaacgcctggcgcgcctgtccgatagatgcgagaggggccgccagctcgactttgtctgcgatgacgatgcgcacctgctgctcgcggcgcaggcggctgcagagagcgccgtcctgctcaagaacgacgaggcactgccgtttgccacgaccgaccacatcgccttcataggagcatttgcaaaagagccgcactatcaaggcggcggttcctcacaggtcaaaccgacccagctcgaccgcgcgtgggactgcgcccgcgcgcagcggctcgacgtcgagttcgcgcccggctacgaccccaagacgggcacgaccgacgaagaggcgct

SEQ ID NO: 1478 - DNA, 8149 bp, Unknown
  16S sequences of unknown bacteria
gccggaggtcatagaaaagctccacagcgccggcttcacgaacatcgtcatgatgacaggagacagcgacaggacagcgaaggcggtcgccgcgaaggtcggtgtcgacaggtacttctccgaggttctgccggaggacaaggcgtcctacgtgaagaagatgcgtgaagagggacacaaggtcataatgatcggcgacgggataaacgacgcgcccgccctctccgaatcgaacgccggggtagccgtcagcggaggagccgccatcgcgcgtgagatcgcggatatcacgataaccgccgatgatctcggtcttctgcttgtgatgaaggagctgtcgaaccgtctgatggggcgtattcactcgaactacaggttcatcatgtccttcaatctcgggcttataattctcggtgtgatgggcgtcctgccgccgtccacgtcggctcttctgcataacgtctcgacgctcgccatcagcctgaaatccatgaccgatctgcttgaggactgaagcaaaagaaaatgagaaggggttgccgcttcggcggtgacctctttctttctctgttcacggtgcgcaccgttcgcgtgttcatgagccggaacccccccgcccctattttcttattcactcttcactcttcaccaaccatcccacacgcccacatagtccacaaagcaatttcatcccctgtaatattcagactttgtttataagtttcattcccacagagattattctttttctccagagaaaaccaaaattacagcgttgtcaccggatgcctgagaagcgagcgatatatggcggagatctgttgattcgggttgtttcggatgtacttccattgttcttcatcggatgaagcagattgtattgaaggatggagatggtgagtatatagtgaatagtaaagaatgaaaaataaatggggcgggggggttccggctcatgaacacgcgaacggtgcgcaccgtgaacaaaaggcctgaatcctcaaagaaaaaaaaagagccgccggtcccgagacgctcagcctcttccgacagccctttctcatggcagattcaatccgccgcgggttattcgtttataacggttattcgtttataactatatccactccgtcaagctcgcagttcacgggtgtcatcccctcaaacctgacctcctcaagattcgagaagtaaacaagcgacgacgcgtcaaattccggtgaatcagtcttccacgcgccggcaatcccgagtctgtccataatcgcgcagatcatgtcaacttcccgcctgctcgcgtacgggtcgaaatagtaaaccttcttcctcgtcccgagctccgggtacgacaccaacagctcctcgacggcacgctctgtcaactccggttcgtttatatcacggcagacatagaacgcgttaatcttcacggcggcgtccgagtcgtcgttttcaagcgccggtctgaccatcccgtcccagtaaccgtcagttatcctcgacggaaccgcggacgcgtagccggactcgccgttcacctcaaagcttacgtaaaaacggtcgttgtacttctcggtcgatatgacgagactcgttatcccgtcaaccatcccaggagtgatgtgatcctccggtccgagcccgtaatacgcgcgcaccatgcagtcaagcggctccgacagcgctatagcccccgcgaacatacccggatttatctccgaacacggcgtcagagccgaagcgttcacagcgaccgaaaacatcgcgaacaccaccgccgcggcggtaaaaccaccggcggcacggcaattcttcatgttagcgtaccgtttcctcagaaacgccgccccgcccctgtcagacaggaacagcccgccgttcatcccctccgcgccgacaagcctggtccgcccggaaaaacgctcggcaaagtcaagtatcgtcttcatatagacgcggcttatcccgctgccgtaaacacggacgacaccatagtcgcaggcgagctcaatgtcatcatacacggctctgcgcacgctcttcgacgaagggttcatccagtgcaccgacgtcacgaaaacacagagcagcttcatcagcatatcatatctccgcacgtgcataagctcatgcgagagaacacaggcgagctcctcgtcggaaagctcaaggcatccggggtcaagatagatacacggtctcagacaacccctcacgcacggcgagcagatcgcgtcgtcgacgaaaacgcgcagtctgaccttagccctgacgccgaggcgctcacggcactcgccgagcagccttaaaacccgccggtcaagcgccggcatggacgccgagtcgagaagcctcccgacctcaaagcacccgttcaccgatgacgcaaactgcacgaccgcgccgacaagccacagaatacagagagccgacgaaatcgtctcagcctgccccgcggcgaccgcgagcagctttctggcgcgcatcatgatgacagactcactcttcacattgtcagagccgtccccgacgtcagacataccgacgatctcatttccggtatccggaacagcgtcagccgcgacagcgtcatgcctgtcagcgcccatgagcgcggcggcgaccgtggttccgttcatgttgaacctcagcggcacgaccgaaacgacgagcactattatccagatcgggcacataagcccctccctgccgcgcagaacagtcctccgccacaggaacgccgccccggaaagcagcgaaaaggttatcgacagaacgacaaggctcagaacaaaaccgaacaccgccgcaccgcctttatttcttgtcggcgtctatctcttttctcaggtccgcgatatcgtcttccgagaggatcccatcgctgtagagtgcggagataagtcccttcgtgttgttcttgtagacggtctctacaaaatccttcgccgcgcggcgcttgtactcgttctcgtcggcaaggactatggcgcagttagcgcgtccgtgcttctcaagatcgatgaagcccttcagctggagtctcgagatgagtgtcagaaccgtcgtcagcgcaagatgtccgatctgatccggatacgccgcgagcagcgcgccggcgtgaatgtccttgacgcccttcttgtccatgtcccagatgagctgcatgatctgaagctccgactcaggcagcttcgtgaaatctttttttcttctcatgatgttcttctccattcttccggtcagtaacaattccgaccgatatattcaataatattatacatcaaaacactacacatgtcaatagtttttttggaaattaaaataatttttttattttccgagcccgtatttttgagctatagtgagcgcgtcgctctttgtctcagtctcaccgcgaagtatcctgtatgtcctctgtccgttatcaagctctgccgagagcgtatcgacgccgtcagtatccgcgagcctttccccgagaccggaaagatgcgtcgagaaaacacacctgcaaccgatttttccgagccgcgagagaacaccgaccgcgagctggacgccgtccgccgcacccgtcgaggaaaacatctcgtcgcacagaacaagactgtcagaatgacacctgtcaagcatatccgccgccgaacggcactcctcctcgagccttccggacatattcccggacgtctccccgcgcgggaaaagagtgagaacattcccgacaacaggcatttttgcagacacagcaggaaccggcagaccgagccggaacatcacctgcgacgcctcaagagcccgcaggaacaccgtcttgccgccgctgttcggacctgtcaggatatagatttttccgctatcatcgaacgtgatatcattcgcgacaatcctatctttcgccgtatcaccatatatcagcgcgagcgccgggtcgtaaagacctttcagcgagtactcgccgtcagtcacctcggcgcgcgtgcagttcatcccgatcttccggagcctcatgataagcccgcaggcgccgctcaggaactccgcctcccgcccgaggcgcagatacacactgagttttttcgccgtgtgcgccgaaaaacgtctcaccgcccgcttcagcgactccgagcacagcttttcgaccgccgccgtcacagctccgtcaagccgcagtctctcctcataatcgagtgtcttctcagccgccgacagcggagctatgcagtgaaagccgcccttgtcaaaatcgagcctcatcagtctgtctatcacgttgtccgacaggaaaggttcgctgtttatcgacacgacgccagcctcgacaggtttcagatcgccgcccagattgacgccgattgtcatgctccgggcgtgaagaagatcgactctcgcgcgggtgaggttctttctgagctcctgaaactcccgcgaccttctgtcctccgcgagtcccgacgctatcgccgaaagcgccgtgttcccgatgtcaccgacgttctgaaaggcgtcggacgcctcctcgacaaaccgcacgtatgcgctcgccgactcgacaagcagatgcaccggattctcctgcgatgagagccgcagatgcgacgccgtctccgagaactccgccgacagcttcgctaaagtatcgaccgccgcgagaagcttttcgttctccgaaagctcacatatcagcccggagcgataccgtatgacttccgggtcagaagtaaacagcccggctgcgtcccgcggcagataatccgcgagcccggtctcagcaagaagcgcagaaaacgacgggtcaggcggcagttcctcatgatatgctctgtccgggtaaagaagctcaaagttcatatattatcctccacttcacaagcaggtcgaaaacccgaccgctgaaacacgcgcctatgacgcggaaaaccacgatgagcgccgcgttcagcccgaaatacatccgcctgtcatacccggaaaaagccgcgacctcataccaagccttcacgcatatccacgagaagacgagcaccgccggcatgaccatgaagtacccctcaaccggcatgaacgatatcgccgcccacagaatccagaacacgataagcggcttgaatatattgagcctcgagtgcgtgagatagcgattccctccgcgccgcagcatttttctgtatccgatatatgtcatggtacgccctccgtaaagtctgtcctattccttcctgaacgccgccggggaaacgcctatcacctgcttgaacacccgcgaatagaggcttatgtcgctgaaccctaccacctcggcgatctccgcgaccgacatatcagtggttttgagaagatccatagacttcgcgacccggaacttgcgcacgtattccgccggggtcatcgccatgaccgatttgaactgcttcgagagatagtcgagcgacagacccgcgttgtccgctatgtcctttcctgttatgtccttcatgtagttctcctcgacaaatctcaggacgctgtagatatatccgcagtaaccgcgtccgtccgcgacgcctgtgctgacaaggctgtcggtctgcgcggacatcccgcagtcgttcgtgtccgccgcccggctctcggttataagtctcgagtacatagtcaggaaatttatcagcagagccttgagattcagctcccatccgaccgatttcgacctgcgctcccacctcatccgctctagcagtgagacaagctcgcggcggtcggcgagccctacacggattataggcagaaaaccgttcttcgcccggtcggagtggttccagtcgatgccgggaaggcgcagtatctcttccttcatgtcgccgagctcctcgagatagaaaagacagttgtagagataagtatggtacgcgctgttatacgaatggacgtcgcccgggaatatcgcgaagaggtccccgctcgtcagcaccgacgtcttgccgttatatgaatgcagtgaaaatcccttgtctatatacacaaactcatagaaagcgtgcgtgtgctgccagacctttccgttatgctgactgtcgctgaccgttatgcgcacggtgtccggctcaaaatagagcgcgtcgcgtataagctcggtcatctgctgtgtgtttgccattatcctgaactaccccttcacattaccgtatataaggaaacactgatttaaggttgttttcgcagaaaaaaccccataaatccaagacttttttctgcgaaaacccgatttattcagtgtatccataattattatacagcaaatcatccggaaaatcaatcccataaaacgaaaaaaaagcccctcccgcaaaaaaaaggcagagcttcgggtaatgtatcattttatacatttttgtctcatttttattaaacattgacatacgatgttgacataccggctcgagcggcggtataatataaataagagacagaccggcgtcatacctccggtctgccatgtaatatgaaaaagctggttatcttacttggagcgcttgcccataacgaccgcgcctgcgagagaagaagctgcgagaactacggtaagtatcatcgggtcagcggtgttggtggaagcggcgggctcttcagctgcctttgccggagcctcgttgcagcggatgtagttgaaggaaccggtctcgtcgaggaactcaacgatgatggtgtgcttaccagccggaacttcgatgtcggtggtgaactccttagcgtaggtggattcccaaccgccggtgtagccgatgttgagctttgcagccggctcgccgtcagtgctgtctacgaagaacgcgatgttggtggatttgtcattagcgccgaaggagaagttgatggtgatcttgtcagcgccgttttcgccgaagtcaaggtcctcgaaccatacctggtcgcccttggcagagtagccgacgccgtatgcttccatgtaagcgataggattgtcggtgccgggaacatcaacgatcttggtgtcagcggtgatcatcacgttttcaaaagcgttttcacccttagcggacacgctgagtgcgagagagagcatgagaaccaggctcatgagtacaagaagagattttttcatgtcagattcctccgaatttattttctgtgcggcagccggaaaaggacgtgtatgaccgtcgcaggatctccggcagagccgcgacgccgtgagcctgagatcatattatcgttatataaaattttacttttatataatatatttccaataatataatcatttgcgtttaactcatcggcggcttatacttattatacaccattcaaaaacagatttcaatgcaaaaaggagcgattacattgcaaaaaacgattttttctcctgctgacgtcgaaggcataccgtgcaatccgcaaacacgcgcggcgcggaactatatgttgccgttcctcgacagattctacggcaatgacgggaaccgtcctgctgaaagtcagatcgtccacacttcgatctacgctctcccggcgagcaaaataaccgccctgcattttcacgacacgatagagctcggtttctgtgactcgggggacggcgagtgccacaccgagaacggcgtcaccgacaccttttccggcgacgtggagctgttcttcccgtatgagacgcatatatcgagaagcaagagcatggataagccgagcacatggaagttcgtgcagatagagctcgcgaagctctgtcaggaggtagggtacgcgaactacagcgcgctcgtggcgatgatggaaaacgacatagcggtatccggcatcatttcccggaagaaatacccgcgcctcgcggagatcatacgccagatcgtggacgaggcggtctcggacaggcggaaccgttatgagatgacactgtcgcttctctgtgagctgctgattctggacacccgcctcagtgaaaacctgccgaaggtgcaccggaacgcgaacccgaaggtattgaggcttaagcccgcgctcgactacgtgaaatgcttctattcacatgacataagcatagaatacctcgcggagctctgtcacatgagcataacgcagctgcgcgcctgtttcagggaaatcacaggctcgacgccgaaggagtacataacgcgtatgagaatacacatgg

SEQ ID NO: 1479 - DNA, 5464 bp, Unknown
  16S sequences of unknown bacteria
attgttgagcccgggatcgatggagatcgtgtcctgccactcgaagggaacggaaaacggctcgatcacgtgtatattctcatcgaactcgggatagacgagcccctcgttcacggcgaatttcccgtaacggcggctcagaagttcgttttcccccatcgcctccgtcaaaagcgcgatctcgctcttttttaaaaagggattgtcgccccactccataaactcgtaccagatctcgggattttcgtatcggtttaggtaaatctcgtcgtataaaaaggtgatgcctttgagcggcgtcatggtgccgaaaatgtcgccgcattgatccagcacgcgcattcggcattcgtcgtagatatctttgggcggctcctcgtcgaaccacacgtaatccagagaactgccctgaaacttttcccgcccctggtcgcagctcttgaacccgatcaccgaaatgccgccgaacacgtttctgacgcggatctggtcgatcacgcccgactcggcgctgtctttgcgccccgaaagcatggtgacggactcgatccagtcgggacgcagatagtgtaaaactttcttttgcgccacgtccctctgcacctgctgcgaaagggacaccacccagccgaaggtgtcctttttgttcttgcggtagggatggacgccccgcgccatatagacgcattccaccgcgccgcactcggtcttgccgcttcggttgccgccgaacacccagcggttgcgctttctgcatttatgaaaagccatctgctttttgtgttttttgcgccctgcattgtattttgaaagaaagtcgcccgcgcggcggcgcgcttcctccgcctcgatctcgcgtatccgttcgataatttcccgttcaagcatatgacaaaacctatcgtgtttttacatatttctccgatatctgccccgccgcccgcggtacaatagtcactgttccccctttttacgggacgataagacataaggagatctgatatgaaaaaactcatctttccgttgctattggcgatgctgctcatacctttcgccgccgcacggactgcatatgcggacgatacccaaagttacgcgcgcatcgagtcggagggagtctatctgtacggctcgcccgacgaatcggacggactgttcaccctgccccgcacttatttcgtgcagatcctcggcgagacggcgcagttttattacgtttcctatctcaccgaccgttccgactacaaggcggtcaagggctattgcaaaaagacggaaatcgttcccgtggactacacgcccgtcacgccctttttggaatacaagatcaccgttacatattcggtggacggctcctttcttcccgacgatccgctctccacgtttaccgcggaagtcgtgtactacggcgaattcaatttcggcacgagcgtctattattacgtgaaccgcgacggcgccttcggctacgtgcctgccaagagttgttccaagcccgaatatcccgtcaataccgaacataccgaagtcaataaacccgatacgggccaaggaacgatttccgcgcagggcaatgccgtgcgcatcgtgctcatctgcacgctcgccgtgttcgccgtcggcgcggtctattttctcttccgcccgcaaaagacggcgaaaaagccgcgcgatcccttttacgacgaaaacgaaaattactgatcattccgcccgcgctcttgcgcgggcgttcgtgcaggcaagcccttttacgctgcgcttgtccgtcatcgaaccgcggccgcgcaagttctctttcgcgctcatcatgaatcccacgtgggaaaaatttcccgtaaaccacgcctcgtccatgccttcgtgcagaaacgaggcgttcagtttttccgaaagccgcgcctgacggcggaaataggtgcgctcgttgcagtcgagcgcatagccgcagaattccccttccagtttgctgcggcgccggaaatatttatattcgagcatataccgctcgtctttcgtcagccgcgacaaaatattttccagcgcgccctttaaaataacgaaactgctcttcgcacacatataccccgcgatacgttcggcggttttttcgcaactttccgtgccgaaacagcaaaaagcctgcgcctcgaccattccgtcgatatcccgaatgatcttcccgatgcgcggatatacgtacaacatcgctttttgataatctttcatcgatttaccccgcataatgttcccttcgacctctattatggcatacgaaacgctgttttgaaatgataactgacacaaaaaacaaacatatgttcgtattttatccatattttaccatataaatcaagcacccgttcgcctgttttataaagtttttgggaaattttgcgggagtgcaaaacgaaaaagagagaatattgtcgacaaagaaaaaaaagtatgctataatcaaaccgtatttacaaataaagaaattacgggaaactcatgaaaaaactcattgcatacctgacaacgatattgacgctctgttccctttccgcggcattcgcgtttgcggagccttcggcatcggacgatcatcccggcgcgctctttctgccctcctcctacgagcagtatctggaactgactaaaccctcggactttgccatctccgagcgatacatcgcgatcgcggataatcaaagcgttgacagcgcggtcatctatttgtacgataaatcctcgcaagagtaccgttcctattcgtacgcaacgcaaaacacgctgtcttctctcaatttttacagttgttcgtcgggcgattatcttttctttttagaaacgggaaattacgttaattatatctcgtgcagcacattctcgtcccacgaaaggatcgaatctttcagagcgtccgccatgctcatcaatggcaacgaaatatactacgccattcaaacaggctcaaacagcaacgtatattatgcgacgatagaagaactgaacattcagtggcaagacaaacagataaatgaaattccctttaataccgatattaagccttctttttctttatacaacggaattatttacttttcttccaataaaaacgtttacaaatgctcgcctgactccgtagatcatacatacgacacggcagatacgatcagcaactttacaatcattggagaaaacaagtacgatatcgtatattccaataccggcggttttctctatcttaaaaatgaaagtgaaagcgtttgtaaaacaaaaaacattaccgtcgttaaatattacaaagatttgatctacgcgctgacgccaaacgggatcatacagtacgatctgacgaaaaaagattttaccgattatgaaatcggcaagtattccttgtccgacaaccgactcaacgccgccacagacctttccgtctatgacggcaaactcgtgatcgcggataacgggaataagcgcgtcaccgtgtacgacggcgtatcatacaagaacgccgcgcccgcgaccgcccccgaattcgtatgtgcaggaaaagacgcatatctcgttgtgagcggctccaaagcctatttatacgattacgaaaataattccttgggcaacatcgaaacgatcgaaaattcaattatttccgttacctatgcgatgggcaccttctatattctttcaaacgacggggccaacagttacgccgtcgacgaaagcacggcgacgattcgcgaagcaggcacaccgaatatcgagaatcccgtcagcgtcgcggcggatatttacggcaatctgtttgtgctttccaaatcgggccagatcgataaatatgtagaagcgcagtttctggcgagcgggaccagttcttccgtaaaaatcactcaaatggattcttcatgcaaaaaactgctcgtcgacttcgcgggcaatttatacggtctcagcgaaaacaaaataaccatcttttctcaaggaaaaaccaatacgcgcgagataaatttttccgaatacgtatacggcggcggcaataaaaaagcgatctccttcgcattcggtctgaccgacggcagcgcatacattctctccgacggatttatcgtgcgcacagatctcggaatttccacgctcaacaatatttcggcggacgggctgtataactccctgtacgaaacgcagccctcaaaagatgatctgatcgtcgaagtgaaggcgggctccgttgcggtgtcactcgatatcaaatcgctcgaaagcgattcggcttatcttccctaccgctcctaccgccgtttggaggaagattgcaagggcgtcgttttgggagaaaccgacgcgggatatgtcgttctgttttatgaatatatccccgtaggagaggggatcacatcgcccattcatacgtatgacgtctgtctgatcgcaaagggaagcgcggaaacgcccgcagtcgttgcggattatttcagcgaaatcaagaagaccggctatctgtccagcgacgtcaatctgtacagccgccccgccatgcaggaatttacgataaaagatcgactcaaacgcagcagcgcggtggcggtattgggaaaagtttcccttgcggacggctcgctcgacaacgagtattatttcgtacaggtcggcgacgcgtacggatttattcccgcgacctttgtgaccgacgcgaatatcgcggcgctcgaaaacgagaatttccactatcagcaactgaaaaaaggaaagagcgtcacgctcgaaagcgaacagggcgcgcgtatcacgctggaaaataaagagcgtctgaaagtctacgacggcgcgacggacaaagaaggatactgcttggtttcctatgaacaggacggcgtcgtgtatttcggagaaatagaaacctcctccttgagcgaagcgtcccccctcgtcatcgtgacgttggtcatcgtgatggtggtcaccgctgcggtgctgctcagcgtatgctacttactgttacgaagaaaacccaccttggaataaaacaaaacgcagcccccgacggatacccgtcgggggctgcgttttgttagtacaaaattttaagtaaagcgccgtttctgaatttccgaaacggcgccttgcctttaagatatttttttgagatcttgcgcgggccgccgcaggcttttgagcgtggcgtaaacgctgtataccagccccacccccaccgcgacgcaggaaaataccaacgtgacgataaagcgcgacgcatagccttccttttcggcaaacagccgtttcaactccgcgaaaagccccgcatcgggcttggaaagcgcgatctgcacgaaataacaggcaaaaaaagatgcaagcgtaaatacgaggcagacgactcccaccgtgacgattttctttaccgaaggtttcccgcccaacgcgccgtacagataatgcgcggcgacgacgccgataacgggcgcgatcacctcga

SEQ ID NO: 1480 - DNA, 6708 bp, Unknown
  16S sequences of unknown bacteria
attggcagtccattattaagttttttattatgttccctttgtacaccgttgcaagactttccatttacaaaatttaccgaaagttgtatactgatactgctattttttaattcggaaaggcaaaagtatggctgcagatataaagaaaaacgatgatttttcaaagggaccgatttccaaaacggtcctgcgccttgcggtgccgatggtgctggcgcagtttgtgaacgtcttatataatatcgtagaccgcatgtatatcgggcatatttccgatacatcggtggatgcgctgacgggcgtcggcgtgacgtttccgattttactgatggtgacggcgtttgcgaatttattcggctcgggcggtacgccgttgttttctatggcgcgcggtgcggcacagcaaggcggcgaagagggcgaaaagcagcgtgagcgcgccgcagacgtgatgaacaacacattctcgatgctcgtcattacgggcataattttgtgcattgtggtgctgctcgtcaaaaagccggtgctgtatctcttcggcgcgagcgacgcgacgtacccttatgcggacagctatctttcggtttacatgctcggcagcgtattcatgatggtctcgcttggcatgaacgggttcatcaatgcgcaaggctttgcgaaccgcggcatgctgacggtcgttatcggcgcagtggtgaacattgcgcttgacccgctgtttatttttgtgttcgacatgggtgtgcagggcgcggcgcttgcaacggtgctttcgcagctcgtttccgccgtgtgggtggtgcgcttcctgctcggtaagcgtacgctgtttcgtttggagttaaagcgcatgcgcccgcaggcaaagctcatcggcaagatcacctcgcttggcatttcgggctttatcatgggctttacgtcgagcgctgtgcaggtggcgtgcaacgcgatgctctcgcaacacggaggcgacctgttcgtcgcggtcatgacggtcatcaactccattcgcgaagtgacatatacgccggtaaacggtgtgacatctgccgcggcgccggtggtcagcttcaactacggcgcacagaaatataagcgcgtgcgcggcgtgattgtgttcacgacggtcgtttcattcagctatatggtgcttgtatggctcgtgctaaggctgttcccacacgtgtttattcaactttttaacggcgacccgcagttgctcgaaacatgcacgcacgccatgcacgtttatttcttcgggtgctttatgatggcgctgcaaatgtcggcgcagtatgttgtgcaggcgatgggtcgcgcaaagcaggcgattttcttttcactgctccgcaaggtcatcatcgtcattccgttgacgtttttgctgccgcagatccccgctgtcggtgtggacggtgtgttctgggcggaggctatctcgaactttgtgggcggcggcgcgtgctacattacgatgctgtgcaccgtctggcgcgaattaaaacacaaagaaatgggcgagcttgcacaggcgaaaaagtaaaaagaacggagccgtgcatgggtgataaacctgtgcggctccgttttttgtatgcggtttattctgcggtgtcgggtgagggggcggtgctttctgtgccgcttgcatcgctttcggaagcggtcggctctgcggcggggtaatcgaacgcgcccagcacatcgccggtcgtttcatcttttacggtgaagtgcaccgtgaatctttctgcgtcctcgcccgtaaacgctgcgtagagcagcgcgggaatgtacacggcctgcgcagcggcgttgtcgcgctccggtttatacaggtcttttgtgctcagaatttcggcgctgcggccgtcttcggaaagcgtgacgctttttataaacggccacgtgccgtcctccggcaaagcgatgatctgctcgtgcagactttccttcagcgcggcgcagacggcatcgcgctcgtcttttgtcatttctaccgtgcaggagccgtcatcgtttgtggtgacgtttgtaagccccagccggtgcgccgcggcggtgatgtcgagccctgtgcggcgcagggtgtccttggagatctgcacggtgtaatcccgctgcggttcggaagacgcggcggcaagcgcttcgcttgccgtttcagtctgcccgccgcacgatgccgaggaaaggatgagcgccgccgcgagcagaagcgccgccaaaagccgttttgcgtttctcattttgaacacctctttatgagcttatcttaaactatatcataccgtattcggcgaaaaaagtcaaaagaatcaaaaagctgttcaaagtcggaactttttcacaaaaatatgtggaaacagaagaaaaaacatggtatactgaaaccgatcatgcagggaatggagggatccgattgaccggtgcgattttaggagacattgccggctcgcggtttgagttcagcaaaccgagcgggttcaactataaaaaggtggagctttttgggaacaactgctttttcacggacgatacggtgctgaccatcgcgacgaaatacgcgcttttaaatgacgtcagctatgcaaaggcttatggcaaattcgggcgtatgtacagagacgtggggtacggcacgatgtttcagcgctggctggacggacatgccgaaacgggctacggcagcttcggcaacggcgcggccatgcgcgtcagttacatcgcttaccactttgatacgctggaaaaggtggaggaagaagcgaaaaacagcgccatgtgcacacacaaccacatagagggcctgaaagccgccgttgcgaccgcggggctcatttaccttgcgctgcacggcgagcgcaaaaaggacctgaaaaaatactttaacaaagagtttgaataccccgtgcataagccgctgtgggcgtaccggccgaaggcgaagtttgatgctacggcggaagggaccatgccgcttgcgttccgctgctttatggaaagcgaggattgggaaagctgcatccgcaatgtgttcagcgtgaagtgcgacaccgacaccgtggcgtgcattgcgggcggcattgcgggcgcatactataagcggacggtggaaaacgaaaaggatcttttaaaacgctaccttatcaagcccgataagcgcaaggtcggcgagtttgaccgctttttatacgattgggctacaaagtaacatttccgcatatatttgaatttcggttttgaaaaaacgcctgtgttttttgaagcgggcggagcgacgcagggatcgccgcgatttttaagggaaagggtttatcagaacatgattattgacacatatcagtccggcgccgtgatgcgtattttgcaaagcggcaagatttaccgcgcaagccccagtatttcgtttaagaaggagtacgccgcgctcatcgatatgctcgacctgcactgcgagtgtcctattttcggcgtggtgcgcggcagaaagcagaataccggcggacgcgtttcgggtgcggtgcgcatccgtctcaatgtgccgcgcgaatacgtgaagctgaccgagtacaccgactgggcggattttctcgacaacttcaaatacacgaacccgaacgattattccaccatcatcgtcggcagcttggatgtgaagtcttcggatcatctccgtgtggtggagagtcttaagcaccagcggcatctgttccagtacaaaatgccgcaggcgattttggagtatattgacccgaaatgggtggtacggtataaagtcatcacaaacacaagagagcaggaggaccgcaaggagcaccggctcaatttcttccgttggtaaggagggcttgaacttgaaaatcggtcaatacattttatcgcttgaccagggcacgaccagttcgcgcgccgtgttgtttgacgctttgggcggcattgcgggcatgggacagcgcgaatttacgcagatttacccgcagcccggctatgtggagcacgatgccgtggagatcttgcagacgcagctttacgccatgcggcaggcggtgcatgaggcggagatcaccgcggaggacatcgctgccatcagcatcacgaatcaaagagagaccaccgtggcgtgggacagcgagacgggtatcccgatctgcaacgccattgtgtggcagtgccgccgcaccgcgccggaatgcgagcggttaatagccgagggacttgaggagtacattcataaaacgacgggactcatcatcgacccgtatttttccggcaccaaaatgaagtggattttggataacgtgccgaaggccaaagtgctcgcgaaggagcatcgcctgcgctttggtaccattgatacgtggctcatttattcgctcacggagggcgaaagctatgtgacggacgtgacgaacgcttcgcgcaccatgctgtttgacattcaaaagcttgattgggacgagaaaatgctgaacgtgttcggtatcccgcgtgacgcgctgccgaaagtcgtggactcctccggcgttgtgggcatgtgctccgaaacgatactcggcaggaaaattccgattgcgggcattgcgggcgaccagcacgccgcgctgttcggacagtgctgctttgataagggcatggcgaaaaatacatacggcacgggctgctttgtgctgatgaacacgggtgataagccggttttctccgaccgggggcttattacgacgatcggttggtgcgtgaatggcgagacgacctatgcgcttgagggcagtgcgtttaacgcgggctcggccatcaaatggctgcgcgatgagttgaagcttatcgcgaacccgcaggaagcggaccttcttgcggagaccgtggaggacgcaggcggcgcggtgtttgtgccggcgtttacagggcttggcgcaccgtactgggatatgtatgcgcggggcgcattgctcggtgtgacgcgcggtacgtctaaggcgcacatctgccgcgctgtgctggaaagcattgcgtatgaaagctatgacctcgtgaaagccatggaagcgggcagcggcacggaaatttccgagctgcgcgtggacggcggcgcatcgagaagccgctttttgatgcagtatcaggcagatttattgcactgcgccgtgagacagccgaagtgtctggagaccaccgcgctcggctctgccatgctggcggggttggctgtcggtgtgtgggaatcgctggatgagcttaggactgtgtggaagcttaaaaatgcgtatgacccgcaaacggcagcaggcagcgaagcaaaagcgctgaaacgctggcataaggccgtggaaagatccatgggctgggcggacggtttggattaagccaaagtcaagcacagcgaagcgacgtaaaagttttcgccagcctttttcaaaaagtaaaagcacgcagaccgaaggcttaatagtgacaagtaactattaagccttatgtggtagagctttgtgccgattttgaagaacgtctcgttcgcaacaaaagcgaaaaccgcttacttcacaaagaatccaagcgcaaccttgaatggagcgaagcagaaatgagaaagacgagtgagaaatatcgccttaactcctatgacggagaaagcctaccctttgaaaactatattaaaatcgacaacactactttagctccggatgaagttgcaaagatgatccagactcattttgcaatcgaaggacgaaaagaatgaaaggagtatcaaaatgatatttgaagataaaccaataaccttaaaagacggcaggacagccatattgaaaagtccgtgcgttgaagatgcggaaaagttgctgaactacataaagacatcatgcggtgaaactgaatatctcgcacgttatcccgaagaatggaacaccaccgtcgagcaggaggaagcgtgggtaaatcgtctgcgctcctctcccgataccttgggaatcacctgctatgttgacggtgaggttgcaggcaactgtgagatcagctttagaggtggcatgaaaacctcgcacagagcaaccatcgctattgctattctcaaagactactggaatctcggaatcggttccgcaatgtttgaggagcttgttgctgcagcacagaatcgaggaactgagatcatggagctggagttcatcgagggcaatgatcgtgcaaggcacttatacgagaaattcggttttcgtgtggtttccgaaaagcccaatgcgtttaagctcaaggacggcacttatcggaacgagttttatatgcagaagtatttgtaaaaagaatgactttgttggaaaaacaacacctaataaagccgcctgtagaaactggagtgttcccacaggcggctttattttagctatcgatcggtttatactgcgtgaccgctttcagatacttttccagatctccgttgagtatcagatcagcgtactccagcggcacattgtaaatcagatagtcaagctctgaccgctgatacatattgtcggctacttcgttctcaacggcaatggtatcaatcgcaatcatactgccatcggtgaatttcagttccacacagcagttgtccatattgtaagcacaagatactaaggttttcatggtatgtcctccataattcgttttataaagcgaaaatcccgtctgacttcctgttagaaatcagacgggatttgtccg

SEQ ID NO: 1481 - DNA, 23313 bp, Unknown
  16S sequences of unknown bacteria
tacttacgcagtgttcagacttgcacagtatgcggaagcacatgggattaaactggagcatccaatcaaaggaattcagcttacttcagagatggttctggattatcagataccgattattgagagagcatttaatacaaaagtatatatgcagtatggtcaggcggaagcaggaatgtttgcttacacatacgacgatacacacaaatacaaatgttcgccggtgtatggctacatggaagtgctggataaaaatgggaagcatgtaaaagaaggagagactggtgaagcggttgtaacatctttttccaattatgtgatgccatttatccggtatcggactggtgacctggtagaatatggcggaaagaaaaatggaattgttatattaaatcgggtgattgggcgaacacaggatattgtatataataaggataaagagggcatttctctcacagattatattacgaatacggcatatagtcatatgttgaaatggagaattgttcagaaagagtacggaaagattacattccagatcgtaaaaggtcctggatattccgaaaaggatgaggaagagttccgggaagtatatgagaagaatggaaaaatggagatagaatttcagtatgtagatgatcttgggctgtccaagaaaggaaaatctatttttctggatcagtatctggaaccgtagaatgggagttatatatgcagggaaagattaccattgttgttgtgggatataaccgggcagatgccatggaacgggtgcttcattcgctgagccgggcgcagtatgattatacggatattcgtctggtggtcagcgttgaccacagcggaaatgaagaggttgtgcatacggcagaggcatttgaatggaaatatggagaaaaagaggtcatttaccggccggaacggctgggattgcgcaagcacatcatttcctgcggagatatgacagagaagtatgatacagttatgatactggaagatgatatttatgtgtctccggacttttataactatgctatgcagacgctggaaaaatatggagaccacccgcagattgcaggtattgcgttaaataccaagagagaattgctggagagtgtgtatccattctttccgttgcggacaggttatgatatatattttcagcagtttgcaacgtcctggggacaggtatggaaccggcgtatgtggacagggtttaaaaaatggtatgaagaacaccagaccttgccgtttcacagagatgtgctgccacagattcagaattacccggatacttcctgggcaaaattctatcagacctatattgtggatcagggaaaatattttgtatacagctatgattcactgaccaccaattttggagatgcggggcagcattttgcagacagtgtatcatctgtacagtccgtgctgttctatggaaagaagcagtatcggatgccggagtttgaagagggcattaaatatgatatttatggagagcctgtaggacttggagcgtgcctgggagtgccggaggaagaactgacctgcgatctgtggggaagaaagccgaagcaagcttatcgtcggtatgtactgagcagtagtagattagggtatgagatactgaagtcttttgggctacagatgaaaccggcggaactgaatatctacgagaatgttccggggcagggcattttcctgtatgatacacagaaaccgacgggaaaagtggaagacgagaaagagacacggatccgtctgctggagtatggatatggtgtcctgaatggaagtgatctgctgaattggagcctggatcggatcacgaagaaactgaaacataaaatgcggagaagaagatgagaatactctacttaaatacaacctatgcaggtggtggagctgaaaaagttgtcaggcagatctatcagggaatgcagcaaagaggacatgaagtctatgaaatcgtctgctataacagacggggaaatatcgacgatcctcatgtccacgtgttatatccgaataatctgatgaaggtcttcatgcgtgtacagacatataatcgtggcaaccataataaaaccattccttatgctatcagctatatacgtaagtttgtaaaagagcatcagatagagctgattcatctgcataatcctcatgataattttctggggattcatgatattgcggcattgacacaattatgtccggtggtctggacattacatgatctctgggcactgaccggtcactgtgcatttccatatggatgtatagagggatggagcagggaatgtactggttgccagcacctggaattatatccaagactgcgaaaagacagaagtaaagagttgtggaaagagaagaaggcttcttttacgggaaaagactttcattttacagtgccatctcagtggatgaaggcacaggtggagcattcttatctgaacgaggagtcctgtcaggtaattgataacagcatcgatgtatctttatggaaaccattagaaaaggcagaggtcaggaaaaaatatgatctggatcctgcaaagtatgttttggcttttgtggctgcggatctgcaggtaccacagaaaggaatgaagatcctggtggaggcactgcaaaaactggagcacaaggaaaagtatgtgctgcttgtggcaggaaaaggatcagaaaaggcagagaaactgtttgtgggatttgcggtgaagagttttggttatatttctgatcagagacagatgaatgaatttttaagcatggcggatctgatggtaaatccgtctgtatatgagactttcggactggtgaatattgaagcaatggcttcgggaacaccggtgctggcctttgatattggtgtgatgtcagaggtggttggagaacatggctggtgtgtgccggaagtgtcggcggatctgttgaaaaataaaatagaggagattctggataacaaagaggaactggaatataagacaaagttatgtcatgattatgtagaaatgaaatatgatgagaaaatgatgttggatacatttgaacacttatattataaagtagtaaaaggtgaagtatgaaattatatattatatttacattagacattcatccgataggaggaatgcagctgtatacagcaggaaaagcggattatttaaaacggaatggatgggaagttgtggtattctatcctggatctaatgatgaaaattgtgcagtaacatcgctgaatcggtatgtggaaggtggaaatctcctgttagattacagaccggcacagcttccgaagaatctgttgaaaggtgtgtgccagcagatgaagaagtgtctgcccgaaggttatacacaggcagagtgcatttatgtggaaacacagtcagacgtaactgctttatggggagaacttctggcaaagcggataggtgcaagacatatttgttttaattgtaatgagttgttcagaggtgtcaaaaaatattatgaggagaatatagaattctttaagttcaaatatgcaagacgcgaattgctgggacttcatacagataccctgcaaaaaatatttgatggttatatgactgtgccatgtggcagcgagttcttgtttgatgcagtggagcccggacctatacaggatgtaaacagcgaatttgtaaatcagttgccgaagtatgactggacaattgtctatattggcagggctgaaaaacgttatgtggaaaatatcattgagggagtaagcgaatttgctcagttacattcggataaagaaatacagttcataatggtaggaaatgcagattgcagaaggaatcttattgcggaaaagttggataaattttccaatttgcatgtggaattggcgggagatatggttccgattccgaagagtctgtataaaaaaacagatgttgttattgcaggggctgtatgtgcagaaatatctgcgcgtgagagtgtgcctacgatcgtagccgattgtgagaattatctttcttgtggtgtgctgggatatacaacaatgaacagcatgtatcatgaagaaggatataagcagacaggcttcggtgaagcattggaagatgtactggtgaacaagacatatttacagcatgagtatgcatttcctgaggcaatctcaccggatcagatatttgagagtcatttttctttctttgatggagcagagaagaagaaagaatattatgatgtggaagaccgaaatgatattaaaaagattggtctgacagagagtgcgaaagcatttttgaaattatataatccaaagctgttttttgatatgtacgagattaagaagaggtttcatttatgaatagaaaagatcaggtcatttccaatctgacttggagattcctggaacgctgtggagcacagatggtttcctttattgtctccattgttctggcgcgtattctgatgccggagcaatatgggcgggtagcattgattacagtgtttatttccatattgaatgtatttgtagacagtggatttggaaatgcactgattcagaaaaaagatgcagataacaaagatttttctacagtttttttctttaattttactttttgtctgctaatgtatgtaggtgtatgtatttgtgcccccttgattgcagatttctataatgatgaaggtctgattccgctgatcagagtgttgagtctgacaattgttatatctggagtgaagaatattcagcaggtatacgtgatgaaacacctgatcttcaagaaattcttctattcgacactgtttggaaccattctatctgcctttgttggtattggaatggcaatgtgcggatatggtgtatgggcattggtatttcaacatttgaccaacacatttgtcgatatgtgtgttttgtggatcacggtgaaatggcgtccggagttttatttttcatttaaacgattgaaagtgatgtttatgtatggatataaacttttactttcttcattgatgaacaatttgtatacaaatttcagacagttgattattggaaaattctattcctctgcggatttggctttttataataagggaaaacagtttccgtatttgattgttcagaacataaatgcatcgattgacagtgtgcttttcccggtaatgtcaaaatcacaggacagtcaggatgatctgaaaaaaatgataaagatgtcggtagaggtcagcagttttgttatgtggccgatgctgattggacttgcagctgtgtcagagtcattgataactttgatgttaacagaaaaatggttgccctgtacaccatatcttctgattttctgtctggtatgtggatggtatccgatccagactgctaatcttaatgcaatcaaagcggtcggaagaagtgatatctttttaaagctggaagtgattcagtccgtgtgtggaattgcgttgcttttgccggttatctataaaggcgtttggtggatcgctgttatgtttctggccagtagcatattgaattgtattatcattgcatatccgaacaaaaagcttgtaggatacggctggatagagcaatttgcagatatgttgccaattctggttcaggcaattataatgggtataatcgtatactgtattaagtacgtgattgcaaatctttggataagattgtttgtacagattattgttggtgcgattgtgtatattttggaagcgatactattcaagatggaaccgttctactatgtacttcggatcttaaagaacagacgaaaataagtataggagattaaaatgaaaattaatgtgacgagaagttcaatgccagaattctctgaatattgtgaagagataaaggatttatgggatactcgatggcttacaaatatgggaagcaaacatagagaatttcagagaaaattggagtcatatctgcaggtaaaaaatattgatctggttacaaatggacatatggcgctggagatatctatgcaggcgttgggcttaagcggagaagtaattaccactccgtttacgtttgcgtctacgacacatgcaattgtgagaagtggattatcacctgtattttgtgatattaatccgcaggattttacgatagatgtttcaaagatagaggcgctgatcacagataagacgacagcaattgtgcctgttcatgtatatggaaatgtatgtaatgtagaagcaattgaagaaattgcacagaaatatggcttaaaagtgatatatgatgcagcacatacttttggcgtaaaatataaagacaggggaattggaagttatggggatatttcctgttatagtttccatgccacaaaggtatttcacacgatcgaaggcggagcagtttgttttaaggatgaaaagttaaaggatctgattggtcgcttgaaagattttggtatttatgatgaagaatctgtcacagaaatcggtccaaatgcaaaaatgaatgaattctgtgcggcgatggggctttgcaatcttcgtcatattgatgatgaaattgcaaaacgagagaaggttgtgcaaagatatagagaacgtctggagcatatagagggagtacagctgtctccgattcagaaagatgtggtttcaaattatgcatatttcccggttgtgttctgggaagaagcatttggaacaggccgggatgaagtgaaacagaagcttggcgattcaaatattggagccagaaaatatttttatccattgacaagttctttcgcctgctatgaaggacaatattcagaaaacaatcttctggtggcaaagaaaataagcgacagggtgctgacattacctttgtatgcggatctttcattggaagaagtggaccagatttgcgatattattgttagctgtaagaaaaattagcagtcggttgctaagaaccgctaaaagtgataaactaatacaaaatatgggctattatgcgctttgcccgattttgggagctaatatgttaaaatacaagaataaaaaactgatattcaggatcatactgctggtgttgatggacatgctgatcatcaccgcagcaggtccattggctatctatgtgcggtacaatctgttctttgagccacaggctattgagtttattgagaatatcttccagtatctgccggtgaatctgatccttacagtgatcgtgtttgccgcttttcggttgtatcaggggatctggaaatatgccagtgcatcggatctggtaaatattattctggcatgtctggtgtctgcagtgacccagacggtcggtatgactttgatggggcttcgctttccgagaagttatccttttatgtactttgctgtgctaacagcgggaatttccatattccgatttacctatcggatcatcgcttacttccgtcagaagcagcaggggctgatcaaggaaggcaagaccaataccatgatcgtcggcgccggtgaggcgggcaatactttgttgaaggaactgcagaacagcaagttcgtagagcagaatgtatgctgcctggtggatgatgatccgggcaagattggaaagtatctgcgcggtgttctcgtagctggcaatcgaaaggatatctgcagactggcagaggaataccatattgatgagatcatgatcgccattccgtcggcatctcatgctgagattcaggaactgctggatatctgcagtcagacaagctgtaagctgaaggtgctgccgggtatttatcagctggtgaacggagaggtcagtgtctccaagctccgcaatgtggagattgaggatctgctgggaagagaacccattgacactcaggtggagagtatcatggggtatgtgtctggaaaggtagtgctggtcaccggtggaggcggttccattggaagcgagctttgccgtcagatcgcaagacatgagcccaagcagttgattatctttgatatttatgaaaacaatgcctatgacattcaacaggaactgaagcgggattatccggaactgaatctggtagtgctgatcggttcggtgagaaatactcatcgaatcaatggagtatttgagaaataccgtccgcagatcgtctaccatgcggcagcccacaagcatgtgcctctgatggaggacagtccgaacgaggctatcaagaataatgtaatgggtacttataagactgcacaggcagctgataagtatggtgtgtcccgttttgtattgatttctaccgataaagcagtgaatccaactaatatcatgggagcttccaagcgtctctgcgagatggtgattcagatgatgaataaccggtcaaagaccgagtttgtagcagtccgctttggaaatgtgctgggaagtaatggaagtgtgattccgctgttcaaaaagcagattgaagagggcggcccggtgacggtaacgcacccagatattatccgttattttatgaccattccggaagcagtgtcgctggtactgcaggcaggagcgagagccaaaggcggtgagatcttcgtccttgatatgggtaaaccagtgaaaatcctggatctggcactgaatctgatccgtctgtctggtttgaaaccttacgaggatattgatattgtatttaccggtttacgaccgggagagaagctctacgaggaacttctgatggatgaggagggcttacagagcactgataatgaactgatccacattggaaagcccattgattttgatgaagaactgtttattcatcagctggaagaactggatgagctgtctcggatggacagcccgaagatcaaggaaaaagtgatggaagtggttccaacttatcatatgaaagagaatggaaaagaggcgtaactatggcacatatttatcttgcttctccgcatatgagcgaagaaggatatgagcagcagtatgtgaaagaggcatttgataccaactggatcgcaccacttggcaagaatgtcaatgaatttgagaaagaactggcagcatatgtgggatcaaaggatgcagcggcattgtccgcaggctctgcagctcttcatctggcactgaaagcagctggagtgaaggctggcgatattgtgttctgccaggatctgaccttctctgcaacggccaatcccattgcatatgagaaagcgattccggtctttatcgacagtgattatgagacctggaatatgtctccggaagcactggagcgtgcctttgagaaatatcccgatgtgaaggcagttatgccggtgcatctgtatggacttccggcaaacatggatcggatcatggaaatctgtaaaaagcatggagttccggtgatcgaggatgcggcagagagtctgggaagtctgtatcatggacaggctacaggaacctttggtgactatggcatattttcttttaatggaaataagatcatcaccacttccggcggtggcatgctggtgtgcaatcttccggaggagcaggcgaaggaacggatcgccaaggttcgcttctgggcaacacaggcaagagagaaagcccgccattatgaacacaaggaaattggatataattatcgtatgagcaatattgtggccggtatcggtcgcggacagatgaaggttctggatcagagaattgagcagaagcgtcatatctttgcttattatcaggagcatctgggagatctggaaggtctgtctttcatgccgctgcatgagaatgagagagccaactgctggttgtctgtgattcagctggcaccggattgtaaagtgcgtccattggatatgatcgtggcactggagaaggaagatattgagacccgcccggtatggaagcctatgcatatgcagccggtatttgcggattgcgattacattgacaacggaaaggttggcgagagcctgtttgagaatggtgtctgcctgccaagcgataccaagatgacagatgaagatttgaaacgcatctgtacgattatcagaggattgtggaaataaatgagacaagggatctatgccagaagtattaagagaaaactggatattctgctgtctggtatggcactggttatactaagtccgatcatggcagtgactgcctggcaggtaagaaagaagctgggaagtccggtactgtttacacagctccgaccaggaaaaggtgagaagattttcaagatgtataagttccgtaccatgacggatgagcgagatgccaggggtaatttgcttccagatgagcagcggatgacagagtttggaaagttcctgcgggagagcagtcttgatgaattgccggagctgttcaacatcttaaaaggggacatgagtattgtgggaccgagaccgcagttggtacgggacatggtattcatgactaaagtgcagagacggcgccacaaagtgccccaggggttgacagggcttgctcaagttagcgggcggaacaatatttcctgggaagagaagctggcatatgatcaggaatatgtaaaacacattacattcttgggagatctgaagattattttcaagaccattggaaacgtactgaagaaagaagatattaacacagatggcatggcgaccgcagaggattttggggattatctcctgcggaccggtcaggtggatcaggaaacctatgaccgtaagcagcgcattgccagaaagatttgtgagaagaataaccaaagagggtaaagaatgaataatgagtgggaatattataaccatgcgctggtgccgacaacagctcctcatgtggaacctgatgtttcttggataagaaataaaaaagtctggaaagagtttgctggcggaaagtatccgctgttagtcagatgggttacagattttgactgtggtcaggagacagaatggtggcattgcatcaaagatgaaccgtttgatatcgccaatattccggcaaaaaaaagatacgaaatcagtaaaggactgaaaaatgtagacgttcgcatcatcacgcctggagaatatgcggaagaacttgcagaagtacagtgcaaggcaagaattcattatggagaaacgctggattatgcagaagaaaaggaggcaatcagaaaatcctttacagaagatcctgagattgaaaatgcagaatacatcggcgcatttttgaaggaaacaggtgaattgatcggatatggtatctatgaagtccatgaagactggatccttcagtccgtgatcaagaccgatccggactatttgaagtgtaataccaatgcggcactggttgcatttgcactggaacggtatttcggagatggattttcaattaaatatctgactaatgggacaaagaatgtgctacatgagacaaattaccatgaatatttgatgaaatattttggctttagaaaagcgtattgtcgtctgcacattaaatatcgtggctgggtaggagcagtagtggctgtgttatatccattccgaaagctgttctataaaatgaaagggcgcgatccggtacgtatggtacgggcagtcttgaaaatggaagagatccatcgtacgtttcgataaagcaacaagaaggagatatagcttatgaatatttggtttttcaatcattatgcggtgccgaccagtctgtatccgctggcaagaccttatcattttgccaaccatctgcagcagaagggacacaaggtgaccatctttgcagcaagctcggttcatctgtcagacaagaacctgatcacagatggcagacagatgaaagcaaaacgggtggatggtatccgctatgtatttttgaaagccagaaattatgaaggaaatggtctgggacgaatcctgaatttctttgattataccattcgtctgtttacccagaccggtaagttcaacaagccggatgtgatcatggcaacatcggtgcacccactgacctgcgtggctggcatcattttggcaatgaaatatcattgtccctgcgtgttggagatcgcagacctgtggccgctgacgctggtagagtatggtgccatgaaagaaggccagctggtgaccagagcattgtatgccctggagcattggatgtacaagaaggcagacgcagtgatcttcaccatgttcggtggaaaagaatatatccaggatatgggctgggagaaggatgtggatcttgataagatctattacatcaacaatggtgtggatcttggcatctatcacagacagcggaaagaggactggctgccggatgaggatctggacagaaaggataccttcaaggtcatgtacaccggctccatgggagtggccaactccgtacaggatattctggatgcagcgatccttctgaaagaacacaaggagatccagttcttcctctatggtgcaggttatcaggaagaagacctgaagaaatacaaggaagagcatcatattgacaatgtgcatttcaaaggtcgcgtaaataagcggttcattccgggtattttatccagaggaaacttaaacatgctcacaggacccagtgaccgggtatctgagtatggtatgagtatgaataagatgtttgattatatggcgtccggtcacccgactctgtccaatattcagacaagaaatgatatttttgtagacaatcattgtggtatgaccattgaagcgggaagcccgcaggctatggcagatgggatactgaaatttgcacagatggatccgactgagtatgagatctattgccacaatgcaacagaaactgtaaaggaatatgattttggatatctgacagatcggctggaggagatcctgaagaaggaagtagaggaaaaataagtatgaaatatgcactgatcggctgtggccgtattgctaccaaccacattaaagcagtattgaataatcatctggagtttgcagcggcctgcgatgtgaatccggaaaatattgagaccttgctggcgaagcatggtctggagaaggacagctccattgcacgttacacggattataagaagatgatcgaggaagtgaagccaacactggttggtatcgctaccgagagtggacttcatgcagagatcgctctgttctgtattgatcatggagtcaactgtatcattgagaaaccgatggctatgagcattgaggatgcggacgagatcatccgtcgttcccgggaaaagaacgtgaaggtatctgcctgccaccagaaccggttcaacctggcagtgcaggagaccaggaaggctctggaagctgggcgcttcggaaaactgtcccatggttcgatccatgtactgtggaaccggaacgaaggctattacagccaggctccctggagaggaaaatgggcatctgacggaggtgcgctgatgaatcagtgtatccatggtatcgaccttcttcgctggatgttcggagatgaggtagatgaggtctatggtgtgaccagacagcagttccatcattatctggaggccgaggacatcggtatggctattgtaaaattcaaaaatggtgccatcggaaccatcgagggaactaccaatgtatatccgaagaatctggaagagaccttgtatatgttcggtgagcatggaaccgtgaagctgggtggtacctccaccaataatatagatgtatgggcattcgaggatgagcaggcagaggacgccaagaatcagaacctgcaggaagctaccagcaatgtatatggaaatggacataccagtctgtatgcagatgtgatcgatgccattgagcatgacagacagccgtatgtggacgcggtggcaggacgtaatgcgctggagatggtgcttgccatctacaagagccagaaggatggagtaccggtaaaacttccgctgaaacatttcaagagtacggatatggcaggagaattcgatgtttaagatcggcgagataaagatgagcgagcttgcggggacagcattcccggagcttgcaggaagagaaggactgctgtacggcgtgtccgatccggaagcaccggagagcaacagcatgatctacgtgaggacagaggttgcagacagctatacgaaagtgcgtgacagcatctttgtgacaaaagaagaagtagagctgccagggcttcacgagtcctgtgttcagctgaaggcatccatgcagaagagtctgtacggtgtattgctggaaacctataaaaagctgctcccgaaagcagagctggtacagaagaatggaagctatatcagttctgatgtgaagatcggaacggacgtggagattgctcctttctgtgtgatcggagctgacgtacagatcggtgatcattgtaagatcggagccggaaccattatcaaggatcatgtacggatcggatctcatgtggagattcaggagaaatgtctgattggcgtggatgatatggatgtatatcgtctggaagacggcgtatgccgagatctgcctcatctggccggaaccgtcattgaagatggctgcctgctgctggctggatccattctggcagctggcgattccagaactacagttcttggaaaaagctccgtgatcggtatgctgggcgatgtgggacacaactgtgtgatcaaggagttcagttctgtaggaggaaaatcaagtatttccggtcattgtgacctgggagaacatgtatatattgcgcctatggcagtgaccaccaaccggatcagcgtgggagatcatgcctatctgggaatcggagccgtggcgatcaaggatgtgccagaaggggaaaagcagtttggaaacccggcacggaaagtactggagttaaagaagaaataaggagacattcatggttcagaacattttagattatctggaagccacagcggcggactgtcctgacaaaccggcttttgaagatctggaacacagctatacctttgcacaggtgcttggaaatgcaaaaaggatcggaagtgcactgcttcaggtgctgccgcagaatgcaccggttccggtgctgatggagaaggaagcctggaccctgaatgtatttatgggagcagtctgtgcaggctgcttttatacgttggtcgagccggagcagccggacgagcggatccgcacgattctggatacgctggaggcagaggtcatcgttaccagcggaaagctgtcagagagagttgctgcccttggattcactggtaaagtgttgttggcagaagaactggcagagacgtccattgatgaagaggcacttgccagtcgccgaaagatggcctgtgatatagatccactctatgccatcttcacctccggttccacaggagtaccaaaaggtgtggtggtatcccaccgttccgttatcgattttacggagcatttcacaaggatctttggattttccagagaggatgtgatcggcaatcaggctccctttgattttgatgtatcggtgaaggatatttatccatgtctgaagatgggagcgactttggaagtgattccgaagaaatacttcagtgttccgaagaagcttctggattttctggatgacagaaaggtgacaagcctgacctgggctgtatctgcactctgcatcatctccatgttgaagggctttcggtataaggtaccgaccactcttcgcagagtcatgttcagtggtgaggtgatgccggtgaagcagcttaactactggcgggagtatctgccggatgtgctgtatgtgaatctctatggaccgactgagatcacctgcaactgtaactattatattgtggaccgggagttcacggaagatcagacacttcccattggagtgccatttccgaatgagcgtgtcttcttattagatgaggaagatcatctggtgacagagccaggtgcactgggcgagatctgtgtctctggtacagctttggcattgggctattatcgaaactcagagaagacgtctgaagcgtttgtacagaatccgttgaatcatcggtatctggaacccatttaccgcaccggagatctgggacggtatgagaacggggaactttattatgtgacccgaaaagatttccagatcaagcatatgggacatcggatcgagctgggagagatcgagaccgcgttccaggcactggatggaatcagccgtgtgtgctgtatctacgatgaaccgaacacgaagatcatcggattctacgtgggcgaactggaggcaaaggagatcatcgaaaggttgacagagcggcttccccggtttatgattcctaatgtattccgtcaggtggacgagatgccgctgaccaagaacggcaagatcgaccggaagtgtctgatggaggagtatcgggaatccatgcagaaccgtgtaaagagttagagcaggaggtagcgtctgtgacagaagaaaaactggaaggactggcggttcagctgggaacgccgtcttttgtgtttgatactgatatattgaaaaagagagccggatggatcaaagagatgattcatccggcgaagctgtgctttgccatcaaagccaatccgttcctggtggaagcactggaaccccaggcggatcgatatgaagtgtgttctccgggagagtttcacatctgtgtggagagaaagcttcccatggagaagattgttctttccggtgtgaacaaggagtatgaggatgtacgctatgccatggagcggggtgtgatccattatacagcagaatccagaagtcagctggagctggtgagccgctgtgcggacgaactggatcgccaggtggagctgctgcttcgtgtgaccagcggcaatcagtttggaatgagtgaggcggatgtgacagagtgtatccgcgacagagagaagttccctcatgtgactatggtcgggttgcagtattttactggaactcagaaaaaaatcatgaaaaagattgccggggaagtagagtacattgaagatttcgccagaagactggaggaagaagaacagtttgtgactaaggtgctggaatttggtccaggtcttggtgtgccttattttaccaaggatgattttgacgaggatgagcgtctgctgacagagtttatggagctgttccaggagccaagaccttatgatatcgtatttgagatgggacggtttctgaccgcatcctgtggatattacatgacaaagattgtggatcagaagaaaaatgatgcggtcaacgtgtgtatcgtagatggaggcatcaatcatgtaaattactatggtcagaatatggctatgaagacgccgatcctgtcttattttccgcagcattcactggaagagaaggacgaagaggagtggaccgtctatggttccctgtgtacggtgtctgacattttgctgaaaaaactgccgctcaccgatgcaagagtgggagattatctggtgttccacaatattggtgcctattcggtgacggaaggaatctatctgttcttaagcagaaagatgccgaagatctatctctacagtgaagatgggggcgcagtgaagctccgtgatggactggagacatggatgttgaatacttgtagatagggaagatacaaagtagatacagatgttatacaaacttatacagcgcggtcagtggacagcgcggaaatggagaaaagaagtaccatggaagaattaatggaagtattatcagctctgaaaccggagatcgattttacaaaggagacagaactgatcgatgaaggccttctggaatcctttgatgtgatcacactgatcgcagagctggaggatcagtttggtgtggagatcccggcagaggagatcgtaccggagaactttaactccgcagaggggatctggagattactggagagaatgaaggaggaagcataagatgcagtttcgtgatttaaagagtcagtatcgggcactgaagccgcagatggacgaggccattcaggcagtgctggattcttctgactatattgcaggagatcaggtggaggagctggagaaagagctggcagaatacgtaggtgtgaagaattgtgtttcctgtggaaatggaacggatgcgctggtcctggcattgaaagcatggggaatcggagcaggggatgcggtatttgtaccggatcatacatttttctcttctgcagagtctgtggcatttgtgggagcaactccggtgttcgcagatgtgcatgaggataccttcaacgtagatgtggagagcatggagcgttgcattcaggcagtgatcaaagaaggaaaattaaagccgaaggccatggtagtcgtagacctgttcggacttccggctgattatgataaggtactggcactggcagagaaatatggtctctatgtgctggaagactgcgcacagggatttggaagcacctatcatgggaagaaagccggtacattcggacatattgcaaccacttccttcttcccggcgaagccgctgggctgctatggagatggcggtgccatcttcactgacaatgatgaatgggcagcactgcttcgttctatgagagtacatggtaagggaagcagcaaatatgataatgtccgtctgggtatgaactcccgtctggataccattcaggcagtagttctgcaggtaaaattaaaagcatttaaagagtatgagctgacagatgtgaaccgtgtggcagccagatatacagaagcgctggcagactgcgtgaaagttccgcagattccagaaggctatacttccagctgggcatcttacaacattcttttcaaagatgaggcacagagagatgaagtacgtgcttatctgcaggagaatggtatcccgaccatgatctattatccgaagggactgcatcagcagaaggtatttgagaattgctgtctgtacggcgagactttgccggtaactaccagcatctgcaaacggacactggcaatcccggtatctccatatctggcagaagaggatcaggataagatcatccgtctgattcgtgaaaaaacaggagcgtaagcatgaatatacttttcatttcctatgattcttataaatatgatggacgtctcagagaactgatcaaagtagcgcaggagctgggtgaagttacctttatcactctcgatgagggtgaagaaccaataagcggacagcacattctgtataagggttccggatatctgaaattcatttccttctgtgcaaagcaggtgaagaaaatgcaggatgtagatgccatctttatcgataaccggaagggaatcctgccgggctatctggcaaagcgtctgacaggtgccacctatgtgatccaggattgccgggaactctatgatatgaagagtgcggctggtatcccgggacggatcggctgtctcatggagaagatcttcaccagacattcagatgtggtcattgcagccaatgcatttcgcgcaaagcttatggtgaagatgttcgggctgaagaagcgtccgttcaactatgaaaatatccgtcgtctggcatactcttctgaagatagagctcgtcaggtggagcaggagtgtcaggaattctttgcagaagagaagttccgtatcatttctacagcaggctgcgatatgacccgtactaccggaaagatgatcgaggccatgaaggatctgggggagaagtatgagcttctgctcatcggtgacagtgaggaagaggatgaggaactggcgcatcggatcattcagtattatggactgaccaatgtgaagatcctgccccggatggaccaggatcatctgaaatattttatcgatcacagtcaggtgggtatggtgacttatcaccagagagacctgaataataaatattgtgccagcggcaagatcttcgaattcttatttgaaggaaagccggtggtcacatctaccaatcctccgttaaaggagttctgcgagaaatacggtgtgggaatcgcagatgatgattatgcacaggcaatcaaagcagtggcagagcactacaccaaatggcaggatgccgtgcattattttgtggatcatgtacatgtggagcggaataatcacagacttgcccagaagattcagaatgcactggaggagaaacaggcatgaaaaaggtaatgttggtatttggaaccagaccggaagcaatcaagatgtgtccgctggtcaatgaactgaagacccggaaagggatagagactattgtatgtgtgactggtcagcaccggcagatgctggatcaggtgctggaagcatttcaggtggagccggactatgatctgtctattatgaaagaccgtcagaccctgtttgatgtgacgacaaatattttaaaccggatcaaagcagtgctggaagaggtgcagccggatgtggtactggtccatggagatacttccactacatttgtgacggcactggcatgcttctatctgcagatcccggtgggacatgtggaggctggtcttcgtacctacaacatctattctccctatcctgaggaatttaaccgtcaggcagtgagcattatttctgcctataattttgcacctacagagttgtccaaagagaatcttctgcgggaaggtaagaacccggataccatctatgtaaccggtaatacggccattgatgcgctgaagactactgtgagagaagactatacacacccggatctggagtgggcaaagggaagccgtctcatcatgatcacggcccatcgccgggagaacttaggcgagcctatgaagcatatgttccgtgccattcgccgggtatgcgacgagcatccggatatcaaggccatctatccgatccatatgaatccggtggtccgcgagatcgcggactccattctgggagatgatgagcggatccgtatcattgagcctctggatgtgctggatttccataatttcctgtccagaagctatctgatccttacggacagcggtggaattcaggaagaggcgccgtctcttggaaaaccggtgcttgtcatgcgtgatactaccgagcgtccggaaggaatcaaggcaggaacactgaagctggtgggaaccgatgaggaagtcatctatcagaatttcaaacagcttctggaggatgaagaagcttatcgggcaatgagcactgcaagcaatccttatggtgacggatttgcctgcaagcgaattgcggatattctggaaggaaaagcatgaatctgtatttgattgtattattgctgcttgcggcaggagcggtactggaatggttcaagcccaagtatcagcaaaagatatttactgtctgctggtgtgtgactacggcagtggttgccctgaggtttggacagggaacagactatgccacctatgagggtatctatcggacgattcctgcggtgatcgatctgtccaaaggctatatctgtggattctatccggagatgggctggcggttgttctgcgcctttttcaaactattccaggcaccgttctggacagtgaccatggcagcagcagtgatcgagatgctgttgcttgatcgttttctgaaaaaatatgtcccgtatcagactacgggactgtttctgtcttatccggtgctgatctttgtctacatggtatcggggctgcgtcaggccatggcgatctgtatcttcttaggactggtgcttccgttctatctggaaaagaaatggatccagtatgtgatcggtgtattgatcgcggcatcgttccataaggtgggatatggatggctggtgctggtgatcgcatattatattcctgtgtggggaatggtggctctgacaggagcagcgatggttgttgggctgataattcagattccggtagtggagcagttgatcctgggaattctgccgtcctatcatatgacgcagtttctcacagagggcagcatgagcttgtttgctgtgggcgagcgtgtggtgagttttgcagtattgctgatgctatatatatggctttgcaggcaaaaggaagagattcccaagtgggtacagcagttgttcaaagtatatatctgtggtgtctgcttttatatgttgatgtcagggaatgcctattatgccagccgctatgcgacaatcttcaaggttgtggagtgtgcggtggcagcaggacttgtggcaagttgtcggagttttgaagatatgatgataacggagaagccccatattggtacaggcatacctttccgaaaatatgtaggaaccggagttatggcatttttcctgtgtctcacactggtgatgggtgtaaagaacctgcatgcggcggtcagtgagggaggatatgacaagctgggcgtaaatctgtttacgtatccttacgtatccgttctgaatcagcagaagatcaatgattattatgattatcaggaaaaggcagaccggatgtatgagtataatctggaagaccagcagctgtggatgctggaatcacaggaggaaccatgaggctggaaatcttactgacggcaatcctgtttttcggtggagcatttttcgccggatatggattgcgacgagtattaaaacttcataaagaaggatttttgttttccattgtagcaggtgtgatggtctggtgggcactgatggagctgatccttgtgccgatgaccatgaagcttgcatctttccatagctttgtgatggtatataccattgtagccggaatggtctcactggcaggggtgttctgctggagagatattctggaagatgggaaagaatttctgaagaactggagacagtatgtgacactgggacatctggtggcactggtattgatctgttatcagttgtggtttcttcaccatcatatgtatctggagtgggatgacacttattatgtgaatcttgccaatgaagcagtctggtcagataagatttactgggtctatccggagacaggagctatggcagattttgataaacgatatgtgttatctctgtggcccattttctatgcatggttatcaaagctgatcggggtgatcccgacaatcatggcacacacgatcctgccctggctgatcattcctctggcatatatggtatatgggctgctgggaaagaaattgtttccagaagacattggtctgcagggaatgtttctggcatttgcagtactgcttcatctctttatgagtggagaacatacttcagggccgacatttttaagtattacgccttgggtgggaaaaggaattctggctacagttcttatcccactgctgttttactggatgcttcggatcgctctgcaggaaaaaacatgggcagactggtggatgcttgggattaccgggctggcagggtgtctgctgtct

SEQ ID NO: 1482 - DNA, 2962 bp, Unknown
  16S sequences of unknown bacteria
aggtagtcggttcgatcccgatcatctccaccaggaaaaagcacgacgacagtcgtgcttttttgttttgtccggcagggggcatttggggcttactttgctgccccgctcgggtgtgtcgctggtgtttgcggggatcgccgtgtcggttctggagggctcagctcccgagtattcgccgctgattcagggcaccatcgcagccgcggcggtcatcaatgagatcattgcggtgtttatggcaaagaagggctttgaatgggccggtgaactgggccaggccgggaagtatgccgcatcagcagaggcggcggatgcccggtagaccagtcccggggaaaccctccggcacataaggaaaatcacaggaaggcatccggttccgggtgccttttctgatatagaaagatcttggaaccccaaatgtccgctgaggcgtccgggggatttttgccttttgtaatctgcctaacagccagggcctctgccgctgtggtagagtgaaaagcagagcggacagcgactgtccggatctgtctgaaaggggaagatcggtatgaaaattccatcagggcacagtttttatggacaggaggtaggagtgctggtgttccggggcaagtcgccgcggattccgggcgatgctggacacgcggggtccttcgggtatccggtccgctatcagattgtggactgcggctttatggatctggtggagggctccggtaaaacgctggaaaagctccgccaggcctgcaaacagctgcgggaggagggaatccggggcgttgtagcggattgcggcctggtttccctctatcagcgggagctgggggaggagcttttgtttgtgggctcctcactctgtcagatcccgatgatctggcagatgatcggacacagcggcgttatcggggtcatcaccgggcattccgggctgctgcgggagagccatctccaccattccggctggcgggaggagatggagctggcgatccagggtatggaaaaccagccgcatttttctgaggtggtgatccggggcgagggcagtctggaccccgcccgtatggaagcggaagtgattgccgctgcccaggagctgcaggcacagatcccgggacttcgggctgtggtgctggaatgcagcaaccttgccacctattccagggcggtgtcggaggcactgggtctgccggtattcgataccatttcggcagcgaacctgatggcctatgggctctgcccgccccattactgctgacgcatggaaaaccaccccggctcattcgggtacagagccggggtgattttttatgcagggatattattcggggagggtatagagcatggtcacatggggaacgccttccttgtcaaatatgtccgactggcgcacaaatcccagatcagtatagaatttttccagataggccatggcggagatccgcacagcggggcagctcccatgggaggtgagccaggcgcaggcccggcgcaccagctcgccgccgactccctggtgccgggcagaggctttcaccgaaagccgcccgaaggagttctcctcatagccgtcataatgcagctcggccgggagcaggcgcacatagcccaccagatttcccgcatcgtcccaggcggtcatgtgcagggctgttttgtcaaagggatcaaagtcgtggtagatgcagcgctgctccagcacgaatacttcgaaccggtgggacaggatctcatacagcgtctgggtatccagttcctcaaatgaattgatctgatagcgcatttctcattcctcctgttcagcactgtacaaacttttccaggtcaagcaccgcgcaggtcagcagcttggcccgggtgtagagtgtttccaccagggcatattccttgctggagtggttgaactgtccgcagactcccatagcgcagatggtcggcaccccggcaatggtaaagtagcaggcatccgagccgccgcccagattgatttttcccatgtcccccatgccgagctcccgggaaacctctgccaaaaagtctgccagagcaatgccgtccggtgtttcgtcaaagggcacctggtactccttgtagatgcagtctgtgtgcgtgccgtcaatgtggctgtgggcggcaatgcgctccaaggcctccttgacccgctgggcctcctcgaacttgcggtagcgcacatcaaaatagaggtggcagtgatcgggaatgccattgggaaccgtgccgcccttgatgacagtcggggtcacggtggtgcccagttccaggtcgttgagttctgccagctcgatctccttgtaggccatctccagtacggcgttccgtccgctgaggaagtcgtttccggcatgcgccgcggttccccggacggtcagttcgccttcgccgccgcctttgcgtccgacacagatatcgttgttcacccgtccggtctccatattgaagcagcagagagcaccttttgccagacggatcagcagctgcggggtatcggcatcgaaatggcccttgtcctcatcgccggcgaggataaacttcaccgggcgttctgcccagcccaatgcctggagggccttcaccacccagatggcaatgacaataccgcccttcatatccaggcagcccagaccataggcttttccctggctgtccactcggaaatgcggggtgccgtcccattcattgtcggcgccggggacaggattttccaccggggaggaattgaccgtgtcataatgtccgccgaacagcaccggctgaccgggacgatccgcaccccagacggcttccagggtacagctgttgaccggcccgacatcatgggcagttacagtcatgccggtttcctccaggacagcggtgagtttttctgccatccgcattgcagcttcccggtcccgggcctggctgggcgtattgacaaaatcctcccacatggcaa

SEQ ID NO: 1483 - DNA, 3948 bp, Unknown
  16S sequences of unknown bacteria
agccactggctgcgccgtctctttcgccctcattgggcttactacggcctgtttccgccacaggcggcggccttcgtgcgcccccctaccagtttccgctaaaatcctacggattttcgggcgcggaaactgcaaggaagcaatttttgctctggaaaatgggattttccgtcgcggcgtattgcgagcccctgcacccctcaattcagcatggtcgtcccacaccttcgcaccgccctgcgctaacgcttgcgcggtgttccgcccctgcggacttcgcttcgctccgtgtcctcggggctccagccgcttcgcggcctccaacgctcgcaagctcgcttgcggaactccctgcttcattggggtcttcgtaccggcctgcgcttcgctggcccggtattccggggctgcggagcgcttcgcgctgtcctcgccccttcaccccttcggggcttcgaggcaacggcctgtttcgcgcactgcgcgcggccttcgtgcgcccccgccgtacacgccgccggggacgattaaaacgcgaaagggcttcgttccacaattcgtttttcccttcgcgcttgcggcctatgcctactggtattttgtctccagcgcctggtacagcgggcacttttcataggcgaaggagtggcagtactgccgcatgtaattggcgcagcggactttggattgaaacgtcaccgtgagggcggaatgctcgattagcgattcgcagcgcaacacgtgcccttccgcgtccagccccagatagaatgggcaaatcgcccgcacatccgaaaagtttttaaagttcttctgcatggccatcctccgtccacggtttttcttccggcgcttccgtcccctcagggcgcggctccctccacatgcgctggcgcagccattgcatagaaacgggggcatagcgcccatcgaatacgcgccacttgtgcgtttgcatccagtagcgcagcgcgtccatcatttccaggaattcttcctcggtgaacgcttcgcctcggaagagaatttctgacatgtgtctatctcctttgcgcggatacagttgccagaattgttcaaaccattccgtttcccgctgccgctccgcgcgtgcgcgcgcgccgggtacggtcgtgttcggtgcggtagtgtcaggtacggtcgtgtcttgtgtggttgggttgggtagggtaatgttttgttttgtttggttgggtacggttgggttacgttgggtacggttgggtttggtagccccgcacgcttcgcgaacgctgcgcgcaccgttcgcgcacgtcacgcgtacgtcacgcgtacggttcgcgcacgtcacaggtacgtcacgcataccgttcgcgtacgattcgcgcacgccttccggcgcgccctcctcttccggctcctttggctccgctttttgcccgcctttcgcccgcttgcgctcgcgcgctttgcgggcacgttcccggttgctttcgcggatcgccatcaagcggcccgcgtattcctcccaattgtgaatgcgcttgtcatccaagaaccgcgccttttgcagcgcctttacgaactccttcgcgcgctcttcgggaaaatccgcgccataggcgatggtggcgtcgtccatctcgctcagatcgccgtcgggcgcgttgtccagcgtccacagccacaggcaaaccaggtgcccaatcgcctgcgcgtcgctttccatgcccagttgccgccgcagggccagcgttttccggtgcccgcgcagcgcttgatgtacttcaatccatgccattctttttttcctccccttcaaaaaatctccgccagtccacgcccaacacgcggccgatccgtatggcggcgcgcttgctgggccggcgcttgccgttttcgatcatcgagtagtaactctgtccgagtcccaccgcttttgccacggccgtttgcgtgcgttccccgcgcgcgacgaccaaccatcctcgcatcctgcatgcctcctttgtaatatctcattctgtgataattttaccatattttgggaaaatgtcaagaggggacttgcaatatatctcttcacgcgatatactataggtgcagacgcgcgaggaggttgtgtgcatggaacggatacaggagttgcgcaagcaacggggcttgagccaggccgcgctgggggaaaaactgggcgtgaagcagaacaccattagccagtgggagagcggcgcgcgccatctcgatgataaaaccctatcgcttttggcggatgttttcggcgtttcggtggattccctgctgggccgcgcgcagaacgaatggctgcaaccgctgctggaagcgtatttgcgcgcgccggattgggtgcgccatcgggtgtgccgcacattgggcatcgaataccttcacccggccgccgcgcccggctgggtaacgcgccccatctaccgcgatcccgccgcggcgggcgtgccgctggacgcctcgcccgattgggaaaccgtggattttcccgccggcgacgtgccgaaagaagcgctgttcggcgtgcgcatccagggggacagtatggaacccgccattcgcgatgggcaaatcgcctgggtggatggccgggaggaactttcggatggcgaaatcggcatctttatgctcgagagcggcgcggtgtgcaagcgcttgcgcctgggggcgaacgggcgcgcgctgcggctggaatctttgaacccggcctacgcgcccatcagcggcaaggcgctcgccggactgcaagccaggggcagggtgatcggcacggcgtggccgccggataagggatgagcggccgtacaacacttttggagtacgtctttcatggcaagcaaattgtaccgcaaaaaagggctgtgaaaaaacaacaaaagttctttcacagcctcttttgcccagccctttggcttacatgcgtttgcggcatccatccacctgaatgttctggcctgagatgtagctcgcccggtcggacgcgagaaacaccaccaaattggcgcactcctcaggcgtgcccgcccgtcccataaacgagtgttctggcaagggattgccggaaacatcgatgctacccggcgacacggcattcacggtaacgccgcgccgcgtaacttccttggccagcgcgtgggtgaagccgatgatggcgccctttgtcatggaataatccgccatgcgggcgatgccatacacgcccgcgacggaagcgatgtttacgatgcgcccataaccgcgttccagcatgccgggcagaatggcatgcgtgggatacagcgtgcctaggatattgatggacatcttgcgcttccattcttcgctgcgtgaatccacaaaatcgcacgcgcaatcgtatactcccgcgttgttcaccaggatatcgatggggccgagcgcatcgcgcgcgctttgcacggcggcgcgtacggccgcctcgtctgtcacgtccagcgggcattccacaacctgcgcgccccgctcccgcgccagccgggccgtctccccaaggccctgcgcgttgatatcccccagagcgagggacgcgcccgcctcagccagttgcagcgcgatggccctgccaatgccatgcgcaacgcccgtaacaaatgccgttttgccaaaaaactccattttctacatcctccttggcgagtttctcctttgattgtatccgctccgcgccgcaaagggaatgaaaaaaagcatgccatatttggctcaaacgatacaattcagcttgtcaaaaaagtctttttgacaagctgatggacggaagagcaagcgaaggcaatccctcagtcagcttcgctgacacagagtattgacaaagtctcggaagaacgaggctctaatcagaaatgacggcgtgtacgtcatttctggcattttttgcagagcaaacgcttgcgtttgcggtaaaaatgcattcccgtcccg

SEQ ID NO: 1484 - DNA, 3216 bp, Unknown
  16S sequences of unknown bacteria
gcaaccggtgaccatatggagaagtactcaagttggtgacgaggcgcccctgctaagggcgtaggtcgggaaaccggcgcgagggttcaaatccctccttctccgccaaaacagaaccggctgtaatttgaatttagactgtttaaattcaaattgcagccggttttttctgcgattttagacttttggattccctgccgctgcgcttgcggttcagccgggaagaagaatttcaatggctgcacctgtccagacaaggcttggttccacagatgcgccggggatgagaggttgggccggagggagggcttcaccgtgccacgggttcaggatgagcggctccctatcacagctctttttcatcagaacataatgaagtttgtttacaggcgcgccattttccagcatttgacacaccaggatggcgtattctgccgcctgttccacgtccagcgcggcttcacagagcattcccaacatcttcatttgtgcgacttcctgcttggcagccgcgctcagtacgccgaacatttgccggatcagcgggttttccccgagatggaatactggttttgcgccctgctttgccaagcggcgcatcataagcatggggttggaatagctttcaaagcctggcatcgcgcagccaaagacgatgtcgttatacagagcagatatgtatgccctgtcggcggcttcagctttggcgtgcccggaaatctcccattcgtaataagccaaggtgaaagctccgcaggaatttccatccgctttgccttgtgtgatatatttgcacatagtatccaccttcgtttcgatgatttacgggcagcggacccgtttttcttattataacatggacactgcatggcagccacaaaaaatcaggacaaacagttttgagggctcaacagtttccgggaacatcagcaggcgaagctgcgtctccggcggataccataaagcgctccggcaggttttgtggaaaatatggtctatagcgttattggccgtttacaggttttctggtcaagaactcaaaatattttacattttgtacgttattgaaaaaagatgtaaaaaaagttatgctgaaaatcggaaggcgcgcactgtaaaagggaggggcgcaaatacagtgctgtggctgtaagctggtttttcgattaaagcactcttgagagccggcgtgcggcggaaccgtagacaacaaaacaacgaagagagggaaaaatatgtatcgcgtatccaattttaccgacaatgatgacgttaaaacacttgatcaaaaagggcccttcaccgttattgaataccaaagggacctgagcgtgacgccgggttcggctgtcacggctttttactgtgctcagatgaacgtaaaaaagcggcaggtcatatgtgatttgaatcatgcgaatattaccatccaggccggggccatgcagtggatgctgggcaatgtcagcgcgaccacaggaatcaaaggcgttggggaccttttcggaaaagctgtacggggcaaggtgacgggggaatctgcgatcaagccggaatataccggcagcggtatgcttgttttggaacctacctataagcatctcctgctgatggatgcggccgattggggcggctctgtggtgctggacgacggcttgtttcttgcctgtgactcaagcctcaaacacaaagcagtcatgcgctcaaatttctcctcggcggtcgccggcggcgaagggctgtttaatctgagcttgaacggcagtggtgtgttttgcatcgaggcagagtgccccaaggaagaattggtagagatcatattggaaaatgatgtgttgaagatcgacgggaactacgcgatcgcctggagcgcgggccttgaatttacggtggagcggtctggtaagagcctgatcggttcagcggcttccggggaggggcttgtaaatgtgtaccgtggtacgggcaaggtgctgatgatgcctaccgcaaaaatgccgaatatttgattgaggcatttcccgacggcgcccggcaacagtccgccggtgtaatcgtaaaaagcggcaggttatccgctgaaggctgtccgccgcttttgccgcgcggttatggggtcgggcgggctcttttgcttggcgcctgcgccggtgtacagactgcgtatccattcccggcgcggctgtttacgaacccggagggcaaaaggacgatgccggaaagttggagttttttgtcggataccgttgaattttaattcatattttggtatgctattacaggaattcaaagtgttttcctgaaaatgcatataatgctctgatagggagagcagtttctacacccagccgtaaaccgggtactatgtcatccatagatggactatgctccggcggggcgtggtgctgtagctgtggtcgtcatgctttgcggcaggcggccgtatttttttgcatttattgaacagggcaggaggttgttttatgctgcattccatcaccgatgtacacgcacattacgatgaagccgtcttcgacacagaccgcggcgaggtgctgcgtaccttgcgcgaagcgggcgtgtgcgccattgtcaattcgggctcgagcgtgccgtcctcccggcgctcactggacctggcgaaacggttcgagggagtatatgccagtgtaggcgtatttccgttggaggcctacaacgtgccgtccggctggttggagcagatctccgatatggcggaggaggacgggtgtgtggccgttggagagatcggactgcattaccatttggaggatggcgcaggtcccacatacgcgcagcgggagacgcaaaaaaatgtatttcgtgcccagctggagctggcgcgccggaagggaatgcctgtggtcatccacgaccgggatgcggatgaggacgtcatccggctgttggcggaactgccgtgccccgggatgatccaccgttttttcagccgtgccgaatatggctttcagcttctggaaatgggcctttcgctgggaatcggcccggctgtcacttattccaatgcgggggagctggtccaggtggtgcggcagatgccgttggagcggctgttgctggaaacggacgctccgtttttacccagcgcccgctttgaaggcaaacgggcgacttcggatatgattgcggacgtatgtgaagttgtcgcacagatacgcggagacgttaccccgc

SEQ ID NO: 1485 - DNA, 7494 bp, Unknown
  16S sequences of unknown bacteria
cacgacatggggtcgtgaattttgaaagacggacaagccgtctttcaaaaccgccgcaaaactgtaagtcagtacgaaagatatggtcataaaaatgaatcaccgtaacggaatcgtgtgttccgctacggtgattctgtcatctctgattattgttgtaagggttgttgttctgcggaggattgttcctaggcgggtatggaggacggttcggattctgtgaatacggcggcgggttcatgcggttgttctgcattgcctgacgcctgagctgttcgcgtctctttctctccattgcctcgcggcgtcttctgcgtatccgctgtgccctgaaccagagcgccgcgtatccgccgacggcgaggagcacgagaatgagcagtattatcagtatcacaccgatgacagacgtcccgcccttcgcgcggatcaccacctcggagagccatagtccgtactcacctgcgggggacgcgctgtccggtgtctttatccagagcttcatgaggtcgatgtcgtttccagtgagggacatgaagtcctttatccggaagcttaccgtctgccactcgttcggtttcagcgataccgcgccctcgaagacggtctgcttttcggtgtcgctgccgttcttctggaggcggagcatcgtgtcgaccatcgagacgccctcgggcgccgtcaccttgagtctgagggatatgaaatgcgcgttcttcagcgcgtccttgtcggttatcaggttgctgatacccatatattcgagcggcgttccagtcactctcgcgtagagcatcgtctttccgccgttgtcgtccgactggctgagctctacgtagtcggcgctgtcagacgggtagaagccgtcgaggctgccctttgtcaggtcatagagcgtcttttcgctgtagcccttcgcgtagtcgttttcctcggcgcgtatcgcctcgactatcgtccgtttgctgaacgtcgagtattgtatgccgtctggcatgaaaaggctgaacgcgccgcttccgacgagattcttcacgaacgcggtcgcctcttcgctcttgtcggtgtctatctgtgagaagacattgtagataggcttcttcgcggaagcctcgagcgtcgagtcctcgcggctcgtccagagaccgtaccacgcgttctcgccggagtggtcaacgtggcggtgccagatgaacgcgtcgatatccttgtcctgagccgctgtgtagtatgcgagagcgtacgccgccgcctgaagcgacatggagttctgatcattcgggtctccggagacgccgaattcgcttatgatgacgcttctgacctcggagccgtacatcatctcaggctggttcatgtatctcgtgagcacggctatgttcttcattgtgatgaacggcgttgagagattgtcctcagcgtagctgtcgagccagaactcggtcgacgtgacgtcggacgggtacgggttgaccgcgagtccccatgggatatcgccggaattctttatcgtggtgttgaagaaatcgaggaagtccttcgcggcgtagtcatagagcgggtcagccgccgcgccgggctcggacgccatcgacgtgaagttgtttccgagcgagatataaacgcgcccgttcgcgaagtgcgacttcatcgccgtgtacgccgcgcggaacgccgtgcagtaggagtagatataattcgacatctcgatcggaccggcgctgttccatgtgcggttcgagttgacctcgaatccgacgatgaagttcggcgcgaaaccgtaggcgtggtcctcgcgcgtgtatctcgacgcgagatagtccatgaacgcgacgaaattcttcatcgcggtttcgttcttcgtgttgagcgcgcagaggctcgcctcggtcgacacgccgtcgaaatagaagctcttcagcgtcgcgttcatcccgtcggtcggcggggtgaggacgatgttgaaatagacgtttatcccggcgtcggaatagaccttcacgcggtggtcgagcagcgcgatcttgtccttgtcgaggtagtatgtctgcccgccgaatacgaaggagagcgcgccggaggagttctcgccgaggatatactcgttcagcgggatattgatcgtcgcgtgctgtacgccgagctgctgcgcgtctgagaacatctggatctggagacccttcttgctgctggtcgccggatagtcgccggtgttctcggcgaggattgtcaggttctcgatgtatttcgcgctcgtgatcaccccgtagctgccgtcaccgcggcgttcggctatcaggaactttgagtagagccggttcgtgttgccgtttatgtacggtatcttgaccgaagcggtttcagccgccttgaagtcggcgaccggctcgagcgcgtcgagcgcggaggcggactggtacggcgcgagctcgaagacatagagtgtcgccgacttgttctcattgaaataatccgtcgtgagcgacacgtcgatctgtatgtccgatttgctcttgttgagttttatcgaagtgatttcgtttttcgctgcggactcatccgctgccgagacagagacagcgaggagggtcatcagcgcgatcatcaccgcgataagaggtatgagaggcggcgcgagccgcattctatgattctttatctttttcatattgcttctccggaaaaatagatctgatatgaaatgaatctcatatatataatatcataacacatccggagaaaaaaatcaatcacctaattgaaaatatctgtcgaaatatattgttttccttcgaggacggctttgcgcgtcttaccaaaattttagaaaaattatatttattcttgacaaaacgcttttcatggtgtataatataaaaagcggttggatgaacggccatattccgtttgtctgcctgcggaaaaagaaattttaaggagagaaattaaatcatgaagagatttcttgcattcgtactttgcgccgcaatgctcgtctgcgcagcagtcagcgtaagcgcaactgtttccttcgaggagagcgagccgaccgatctcggtactctcgtcgtcaaaaagggcgctgctcaggaagatcttgctgagttcaacggcagcgtcgtcaacctcgctccgggcggcgaaagcttctgcccgaaggctgactgctgggttcgttatgagttcaacgctgagaaggccggcacctacaccttcgttatcgagtacgtcgctcgtactggtactgatcgtggacttgactacgccatcgactctaccgacgctgctaaccgcgtcaccctcgacctcgaccagtccgctgatcaccgttgggcagtcgtgaccgaagagctcaccgctggtactcacagcttctacctcttctgcccgaccggtttcgatgacagctccctcaagagctgcgacgtctatggctgggctgcatacttcaccaaggaagcagcagcagagaccaccgctgacaccgacaccaatgttaccgagaacgctccgagcaccgcagataccgctgtgatcgcagttgtcgctctcgcagtcagcgctaccgcggctatcgtcgtttcgaagaagcgccgcgagttctgagttttggaaataactgaccgttaaggtcgtttgttcgatacataaataacgcgcgtccgatatggcggacgcgcgttttcctttttatcaggataaacgaaaaacccctccggagaaaatccggagaggaatccgtatcgggttctgatgacgccgtcaaagaattaaagctgttccttgaccttggagctcttaccgactctgtcgcgcagatagtagagcttagcgcgtctgactttaccgtttctgacgatctctaccttctcaacgttcggagaatgtaccgggaaggtcttctcgacaccgacgccgtaggaaacgcgtctgacggtgaaggtctcggagatgccgccgccgttcttggcgatgacagtgccctcgaagagctgaactctctcgcgggtaccctctttgatcttgttggaaacacggacggtatcaccgacgttgattaccggtacgttttccttgagctgctcgttgttcaaagccttgattaaatccattttggcttcctccttgaattattttattcaatcgtggaaagcattcgtgccgagcctgtgacagaggactgctttcgtcacgcgcctgttcctccgcgtttcgcggcagatacgcataacaagtatattataccacatcccgcgcgaaattgcaatagctttttcaaaaaaaatcccgccggttagagaaaaatccgattttttccccacgcgccggcagaatcgaaaaaacgacgaaaaacatgtgtggaaaacgcgtaaatattataataaattaattcgctaaagtacttgacattttcccgtggttgtgctataatcatatgcgtaaacaggatcgccgcggtacgggaagttttccggggacaggcgcggcggaatgtcatcatcaagagtgcccggttgtcatcgggcggttaatgaaaggaattgtcacaatgaaaagaattctcgctctcgttctggcggctctgaccgccgtggtgctgctcgcgtcctgcggcggctccgcaaagtatatcgttctcgaggacaacttcggcgccgaggagtacgctataggcttccgcaaggatgactacgcgctcgccgcgaaggttcaggagatactcgacgaaatgtcgtccgacggaaccgccggaaagatctcggagacatggttcggaaacaaggacgctttcctcaccggtaaggaattcccccgcgcgatgcagactgtcgacggcgacaactctctccagtatgtccttgacaagggcacccttgttctcggactcgacgagagcttcccgccgatgggctaccgcgattccaagaccggtgaggtcgtcggcttcgatattgaccttgcgaaggaagtcgcgacccgcctcggcgtcgagctcgtcattcagccgatcaactgggacgcgaaggagctcgagctgaacggcaagaacatcgaccttatctggaacggtatgtcgataaccgaggagcgcactgctaatatgttcctctcgaagccttatgtcgcgaacgcgcagataatcatcgttccggaaggctccgccatcaagacgagagctgacctcgcgggcaagaaggtcgcgcttcagagaggttcctccgctctcgaggctgtgcaggctgacgaggagacctacaacgcaatcctgaacggcggcgagatcgtcgagtttgacgacaacatcaccgcgtaccttgatctcaagtccggaagagtagacgctttcgttgtcgataaggtcgtcggcgagtggatcatcaagaataactgattatatctgatcaaaaaggagctgccgcgcgtgagcgcggcagctttttgcatattacgggttctcgcgcagatacgcgaggatgtctccggcgttcgtgtcgggcttgaccttttccatgatcttttcgatcttgccgtccggtgagatcacgaaggtggtgcggacgacgcccatgctggtctttccgtacagcttcttttccttccagacgccgtatgcctgtatcgcggtgagatccgggtcggagagaagtatgaacgggaggttatttttttcggcgaagcgggcgtgtgatgtcacggaatcccggcttataccgatgaccggaacgccgagcttttcaaactcgccgtactccgccgcgaacgcgcaagcctgtctcgtgcagcccggcgtgccgtccttcgggtagaaatagagaacgacgcgttttccggaaaaaacagacaagctgacggcatacccgtccttgtcaaagagggtgaaattcggcgccgccgcgccgaccgttaattctgacataagattatcccctttcggtttaatgaaccgccgatattatagcacacgtcatccgtcttatcaagcatatactgtgtctccggtgtaaaaagaaaaggtcgccgcgaaaggcggcgacccgatgagatcaaaggtcaagcggtatgaacgctgacggccttcttgccgcccgcgatgtgctcgaacttaacaacaccgtcaacgagagcgaagagggtgtcgtcggtgccgataccgacgttcttgccgggatgaaccgcggtgcctctctgtctgatgatgatgttgccggccttgaccgactgaccgtcggacttcttcacgccgagacgcttagcttcgctgtcacgtccgttcttagtggagccgacgccctttttatgggcgaaaaactgtaagctcagctttaacatttatctttcctccgttagttttttgctgcgagcggcaaattccgctctgtcagatgtctccgatgaaacaccgaacacggtgtcctcagacgagttcctcgaccacttcaacatcaagatagtcgtagtaatcctcgagcatatcattgagctggtaataataagcttcgataagtcccgagatggcgtagcgcttgcgctcgtcctcctcgaaatccttcagcgcgccgtgagcgacaagagatatgtctgtcgtcgcttcgtctatcgtgtatttcacgtccgacgcgtacgagacctcgatcgtgttgatgatgagcattgtcatcgccgagagcgccgcgcagagcacgtcctttccggcttcgtcccagccggtgtggccggtctccttgaagccgtagaaggtgttatcccacttatagaatgtgatcttggtcatttttctcagccgacaatcttttcgatctgaaccttggtatagggctgacgatgaccgattctcgtcttctcgttcttcttcgacttgtacttcaggatgtagagcttcttgcccttgccgttcttgacgacattggcctctaccttagcgccctcgacataaggagcgcccgcggtgaatcccgcgtcgttcgagactgcgagaaccttgtcaaaggtaaccttcgctccggcctcgacctcaagcttctcgataaataaagtatcgccttcgttgaccttgtactgctttccacccgtttcgataattgcgaacatgaaaagcacctcactttccgaatagtacttcgcgtaccataaactcgctgaacacggcatcacaccttaatggaagaccaaaaggcgcaatttaccaagccgttattcaagcggctctttattataccacattccgagccgtttgtcaagagctttcatgtaaaaatctcagctctgtccggcattttttcgcaacgtaaatttgcaaagtaaatgcaagaatagcatttaccgattgcatttagtctggcaaagaatatgtggtagcatttagggcaacaccgcacaaaaccaagggtcttgaaaaaacgtgaaaaaagtggtataataaatccatgaacaaacaaatgagcctgtcgttcatacacgacgaattaaaagaagtaaaaacgcacaagcgggaat

SEQ ID NO: 1486 - DNA, 14442 bp, Unknown
  16S sequences of unknown bacteria
aaacatattctgatatatcaggcatcagcgccgctctgatacctgccgcatctgtcctgaaaacacccaagctgcgtctctccctccataagtcttatcacctgacagctgttgccgcagccgctgcaggtgaattcctccgtatgaacttcaccgaaatccgcatcaaagcctctgaagcggcttttgttttttgcagcagactctcttgcaattattgcagctcccacagcgcccattacagtattgtgctcaggtattgcaacttctgctccgatttcctcttcaaaggcttttttaattccaccattgcaggatactccgccctggaagcagaagccaggctcaagttttttgccctttgccacattgctcatatagtttcgcacaagagctctgcacattcctgcaagtatattttccatagatacgcccatctgctgtttgtgaattatatcggactccgcaaataccgcgcatcttcccgctatggaagccggcatatcagctctgagggcaagctccccgatatccgatgttttaatgcccatacgctctgcctgcctgtcgagaaatgagccggtccctgccgcgcacaccgtattcatcgcaaagtccctgacatatccgtctttaataagtattatcttggagtcttgtccgccgatttcaaatacagtcctcacttccgggtagagctccgccactgctctgccgtgagccgttatttcgtttttaacggcatccgctcctatcatcatagcggctatggctctgccgcttcccgttgttcccgctcccgctatatctcctgcctgaaattcctgccccagaatcttcattccctgttctaccgctctgattggatttccctctgttttgagataaagctttttcaggacattgtttttttcatcgattactacaaggtcggtgctcaccgaacctacatctataccaagccagttcattttttcccctttctttttcttgccgcaagcatatccgcaaaggattccagtctggtcagatatcccgcatctcctgtcatttcatcaaacaccagatgaagcacctcaaggtttttcccgtccgcattgttttcaaatacggttttggctactatctcaggcatacaccctgccggcataagctgcactattccgtcaaagcccagagatttgtaatcatctatcgcctttaccgtttcgtgggcatagccgcctatggcatacggcatataaccgctgtgctttttctttattaacgccgatttggctgtatatcctgcccaccagctgagagtcattgttttctgaaaggatactcccatattcataagggtttcttcgatattatggtttgcaaagggttctatgcaggtatatatttctcctgtaagagccagtcttacagggtctgcctttcttcttgttctgactctgtctgtcagggcctcatagcagtccataattctgaatgcttctttaaagcttccggcttctccgagttctttaaaaagatttcttctgagagccacaagctccgccggatttctgacgtagcctgccataaaaaagcactgctcctccagcaggtccattctgagcatcagttttcttgcttttcgcaccatacggattgtttttgcagcgcttaagtttctgcttcctttcagagctttcagtcttgtcataaattcttttttgcctattactgccggcgagtcgagcacaatccagttcatactgcatttctgtccgtccattgcatccgacagcagctggcagtactgcccgagtctgcatggtcccccagttgccaccataactgccgtatctgctccttttttatatccatcggtcaggttgcccgccataagtttaaagggcaggcatatttcatcaggtgaaattctgctgccctgctcaagtgtctttgcactgtttatctccggcaccgccgtttgtgttcccattgactcaagcaggagtctgacaggtatataggccttgcctatatgagggaatgttactttcatattgccgccctccgaattatatctccaaaggcttccagtcttgttttaaagcccgcatcagctctgtgttcatcaattttaaggctgaaaaccgggatgtcagtgatgtatttgtatatgagagctgtaagtatactgtctatgccgcagttaaatgacgacatgcagataactgcatctacggttttctgctctgaaagtatgacggctcttgccagtatatccgtaagggcgtcccagtacggccgctttataaggtgaagtttttcgattctcgttattttttcgtatcttgaaatatccctgccctgtattacgcctattcccattctgtgaagcctgtctgcaaggttcatattggaataggtgttgttaaggttgtattcgtgagcggctataaagacattgtattcataaccctcatcgtcgctgtatctgtattccctttgagcttttgaggccttgcctattgcctttgcaagtcctctcctttttattttcatttttttgagctggcgcttcaggtatttgtgaagctgttttctgtcatttatgcagactgcttcattaaataccagcttgtccgaggctgccatatcaggcataccgcagattttagggcacagggtttctccgaattccgttttcataattctgggcacgcacacatacctgcattcttcagagagtttatctatctgacctctcataacctttacaggcaggcacgcttcgtcagcacagagtctgccgcctctgtctatgatgtcctgatttatttcatcgacgtatttaagctctactcctatctcctccgcaaaggccgttataaaggggcggtatctgtagtatacatagcccttgggcattcctataatcaaaataaaagacctcctgaacaatatataaatattgttgacaggaggtttccttattatacctactgaattacttcatacatatctgccgcatcttccttgcggacagtttcgaggatcttggttattctgactttaattgtgttgtttccgaattttatttcgactatgtcgccctcttttacctctgtacccggtttggccactttgtcgtttactgttattctctcctgctcgcaggcttccttggcaacggtacgccttttgataagtctggagtttttaaggtatttgtctattctcatattgtctcctaatcaaactgaacatcttttaccgtaaacttctgccagtcgtgctttgcaaatggatggtaggtcataaaccgaaaaattgcactctcgctaaagctcggcaatttctgtatttgacctaccagcagttcgcttcgctcactgggttaggtcataaaaacagggcagcatatcgctaccctgaaatcagcattcatttatttgttaactgaatcctttaaagccttgcctgctttgaatacaggagcttttgaagctgcaatcttgataatttcgccaggctttctagggtttcttccctgtcttgcttttctttctctggtttcaaaagtaccaaatccgattaactgtactttttcgccttttgtaagtgcatcttccacacagctaacgaaagcgttaacagctacttctgcgtccttctttgtaaatccagttttctctgctactgcagcaactaattcagctttattcatgaataaatcctcctcacattatatatacatcataattattatatcatattatttcctcgggataaagctcttatccgttgaaatcttcaaatcagtgacactattttctcatttttaaccttgtttgtcaacacatttgtgagtatacatttaaaaaaatgcgatttgcttttgcagcaacagttttattttataaatttgcccataatttttaccagtttgtttcctcccggtatcatcgcagcctcttcagccgttatggttttagttgcaaacagcattacagcatataccgctgctgacaggattatcgaaactaaaactgccatgctgttgccaagaaccttcgccgccagattatatgaaataatagtcataacagacatcgccagtgtggctattatcggtttgataaatgtctgtattatgttaaatcttacacccgtatatttttttatcgccattatatcaagcatcgcagcaatcatatatgcaatgcaggttcctatggctgcgcctatgacattgaggctttcaacgcctacaagcatatacgttattattgtcttgaacactgccccgattatgaggtttcttacaggtataagctgcttgcctattccctgaagcgctcctgtaagggtctgcgctatggcaaggaatataaagccgaaagcaagcatcataaggcttcctgccgcatcaacggccatatcatactggcttctgtacaacagcacaagcacgggctctgccagaattataagtcctgcggcgcacggaaagctgagtatgtttgccattctcattcccatctgtacattggttctgagtccgtttccgtctttttctctgaatgccatacttattgcaggcaccagacttatggctatggactgaactattatctgcgggaagtttactactgtacctgccatgcttgaaagctctgtaaacaggttctttgcctcactgtagctgaatcctatgtcctgaagtctgttggatactattgaagcatcaatcaggttcataaacggcattatgcatgctcccagcgttataggtattgcaattatgaggattttcttagttatgtcccccgatttttctctggttttgagtctgccgcgatttatttttttgagaatgactttcctgtttgccatatagataagccatacaacaagaagtcctcctattgctccggcgcttgcgccaaaggttgctcccgctgccgcatactcagggttttcggcaaacctgtcaagcagtatctttgtaagggcaagacctatacccactctgaaaacctgctctataatctgcgaaaccgccgtcggattcatattctgcattccctggaagtatcctctgtatgcagacattatagggataagtaccagagccggaataagcgctctcagcgcgtatgccgtttccggcagtcctatctggttggcataccagttggcgcctacaagacagagaaggcctgttccaagacctatgcctcccagaagcctgaacgatactttaaaaacattgttggctgcatagtggtctcccacaactgtcctttctgcaaccattctcgatattgcaacaggtattcctgccgttgccagcgtaagcagtatgttgtatatagggtatgccgcctgatagtatgccatgcctccgcccagccagttggttacaggtattctgaaaaccgctcccatcagctttacaacaaggcctgcggcaccaagtatcaccgctccgcccacaaatgattttttactcataaaatcctctctataagcttgataatatattttttgtacatctctgtgcttcaaaaactgttttttctatatctattgtcatatattctccatctctgtaaaggatttttccatcacacatagtaagcacaacatcgtttcccgatgcagaatatacaatattatttaatatgttatgaacaggatacatatacggtttatctgtatcaactacaactatatccgccttaaagccttctttaataagacctgtatccgctctgccctgtgcttttgctcccgcaagtgtcgctgccctcagcacctcttttggagaaatgacagcgggatttcctgtaatgcctttggttgcaagcgcaaagaatttcatttcttctataaagttaaggctgttgttgcttgctacgctgtctgtaccgattgcaacatttattcctttgcgaagcagcttatcagcattgcatactccgcttgccagcttcagattgcttacagggtttactaccgcagtaacgcctttgtccttaaggatatcgtaatcctctccctcaatccatacgcagtgcgctgcaacgcagggagtttcaaacattcccagactgttgaaatactgcgccggtgtcataccgttatgcctctgcttgcattcctcgtgttccgatttggtttccgaaagatgaacgtgcatattggcgcctatctctttggtatactctgcaagctgtgcgaccgccacaggggttgtcgtgtattctgcgtggatactcatatccgttttgatcctgccgtctgccgcaccgttatagtccttgtagaaagtaactgcttcgataaatctgctggtgccccataagtcttcatcgctgaaatgcgatattgctcttgatatgtttgctttggctcccgcctcaatcaccgcttccgcaacctgatcgcagaagtaatacatatcggtgcttgacactatgccaaatctcacagactcggccattgccagcagagttgcccagtatacagcctcgtctgaaagcttatcttcaaacgggaatatttttttgttgagccagtcggaaagcgccatattctcgccgtagcctctcataaggcacattgcgctgtggctgtgggaattgacaaagcccggaagcataaccttgttcgtgccgtcataaacctcgccgtagtctgtctccggcataacatctgaaatatattcgatatatttatctctgacgcccacatacatattgcttcgtgcatcaaaattctcatctataacagttatatttttaaaaagcatatattcactcccttgcttatttcccggcactaacagttgattatatcatattttttacctgttttactacagaaattgctttatcacagttttttcacacaaaaaacaaatacttaaaaatcagccaaacagttttaattatttttatgcagaatttctttaacgttttcgtataattactgaacatttccacataataactgaacagcttaatattacaggcttaatcaataaggagggctatatgaaagctacaggaattgtaagaagaattgacgacctcggcagagttgtcattccaaaggaaataaggagagtgctcaggatacgtgagggcgacccgcttgagatttacaccagcagcagcggcgaggttattctgaaaaaatactcccctataaacgagctgggacagtttgcatctgaatttgcagaagccgctgccggcactctgggaagtactgttatcgtttcggacaccgaccagattatagctgcggcaggagcaggcaaaaaggaatatatagacagcaaaatcgactacgagctggataaaataatccaaagcaaaaacaaacatctcaacgactctaaaatagttgtacctatactttcacagggcgatgccataggcgccatcaccataataccaaaggacaaacacatccttggcgacacagagcttaaagcagctgaaatcggggcaggctttctggcaaggcagatggaaagttaagaaataccggcagaggagcaatcccccgccggcattttactagtcatcgtattccgtttcaaagtctgttattgtccccgttacagcatttatatccatactgtactccataccgttatacttgaattctatctcgtataccccgtcatcaagctctatctcaaatccataaatctgtgaagctgcaaggcctgctttagcaagggctatttccttggcttttgcctctccgatatactttgaaaaatcatcaggatttccgtccttttcaaatttaagcacagttccctttacggcatctatttcaaagtcgtattctacattacccacatagaattcaacatcgtaaaccttaactccgtcatctgtatcaagctttactttttcaagtgtaatctgtgatttgacaagacctgccttggcaagggctgtttcaagagccttatccttgcctatatacttatgattagtatccaccgtactctttttaggactgtattctctgctgtattctacaattttacctgttctggcattaacatcatactcatatttccagctgccttttctgaatttcacttcatatacagccttaccatcatcataatcatatctgcatacaaggtttgtaaccgatgcttttgatattccggaaaatgcaaacgccttgtcaatcgctgcagtctgtcctatcagcttccctgataaatacctgtatccatactctacacttttttctcttacagcgccggttttggcattaatcttatagctgtactcagtacgtccctttttgaattccacttcatacacagtaactccgtcgtctttatctctgtcacactctatatcccatactgccgatcttgttgtcccggcatttttgagagctttagatattgcagtattttcacctatatatgaagctccaaatgcggtaatccccattgataaaaccattgccgccgaaactgcaaacgctatcgcttttccaattatttcttttctcatatcatttctcctctaatcatcatactctttatcaaatttaagaattttgcctgattttgcgtcaatatcaacctcatactccatattctgatatttgaaatctatttcatattccccgtcatcaagctctatttcatagtcatgtatctgcgaagctgtcagacctgctttggcaagggctatttccttagctctggatctgcctatatatttacttccgctgttatctgcgctgtttttgtgatgactgccttcatatccgtcaccatcggtttcgtattcaatgatattgcctgtggttgcatctatctcaaactcatactcggcgcttccgcagtagaactcaatatcgtaggttatatttccgtcatcacattcaaactcaacctcacagccggaaatctgtgattttttaaggcctgctttggcaagagctatgtttaaggctttgtccttgcctatatactggcttttgtttacctctccgtatgatactgcaggtgtcttgtcactgcttttttctgatgccagaagtatcagctcctgcgttgaaagcttgagcagtcccgcctctgtcagtctggaatctgatgctgccagagttttaatcagatatgccttgccctctgaaataccgttttcggccgcaaacgcagtgatttcactgtcatcggttatgcattggcccataactgccgcagacagagcatagcttcccagatactgattgagacttgaggaaagctcctcctgcaggcttgtacctttggcgctgtcctttgcctgaacagataccagaatcgaattcgatatatcgttcaggaaaccctgctgaagcatggatccgactatggcattggctgcaaccttcatatcagttcccgcaagactcatatcatcaagaatcttctcaccgtctttgtttacggcggaagcctcgattactttgccgttatcatctacagaaagctgtatgctcgggttgacatcaagaccgattattgctgccgcctctgatgcgccgcctttcccgaatgcaagaactcctgctatacatatgatgagagccgctgcaacagagccgaagactttatatgcaggttttttctttttgggttttaaatatactgtttttctttctggctgctgctccgtctgttctctaataccgcaggctttcattatatcgtctaatttatcaggcgtagcgctgcatactgcggcatgaattcttttttctatttctctgttatccataagctacacctccttgacttcgagtgcctgtctcagtttttttagacttctgttatatttggaaagtacagtcgagacaggcatatcaactatttctgcaatctcccggtgcttcattcccgccattgaatgaagcattacaatctgtctttcgtcttcgttgagtacattcattgcttcttccagtatgatggcatttatgtcattttcgtgtccgttatcagagatactgtaggtgtaatctgcaatatcctcgtgctgttttgtgtcacggattctgttgtagcacatatttctcactatcgtaagtatccatgccatcggcttgccctgcttctggtatgtatccgcagaattgtatatttttacaaatacctcctgcattatatcttccgcatcgtgactgtttttaagtattgacagcgcaaaaccgtaaacagtatccgaggtgagcacatacagctctttaaatgccgatgcgctgcccgccgctatatctgataaaattttctcatctacataaactgccataatctgtttccctgtaacttttagtaggcttttttgtactccttactgtactctacgattttgcccgatctggcattaacatcgtattcgtacctgtaattgccttttctgaatttaacttcgtatatttccttgccgtcatcatagtcataatagcatacaagacctgaaactttgtttctgtttattcctgaaaagctgaacaccttgttcttagctgcgctcttgcctattctggcttttgaggacggcacatatctgtactctacgcttttctctctgatattgcctgtttttgcattgatggtgtagctgtactctgtgctgcccttaataaattcaacctcataaacggtaataccgtcatcgctgtcacgttcacattcaagctcccacactgctgatcttattgttcctgcattcttgagcgcctttgagacagcagcgtccttgcctatatatgaagctccgaatactgccgcccctgaagatactaccattaccgccgcaagtgtcagcgtcacaacttttcttattaacttatttctcataatcttttcctccatatttgcttatttatatatacaacacaggagaattagattttattgcatcatttttaaaaaaatttattttttctccgaaagagtcataagaagctcaagagcctcgtcaagccacctgcttttttcggctgtaagcctcataaacggctttactcctccgtggaagaaaatacgcatgccgtatttctccgaaagcgccgcaagcaccggtcctctcaatctgtttttttctccgaaatagaataccagtctgccgttttcaacgcagaccttagatacaaattcgtctgccgcaagctttcgtattctggatattctgataaggttcataacctgcttcggaacatctccgaagcgatctatgagttcttctatgacatcctcttcattttcttctgtttcaacctctgcgatttttttgtacatatgaagcttgagggtttcatcctcgatatatctgtcaggaatatatgcccccacaggaatttcaacaagggtttcctctttgttgtcgtttacaatctctccctgcagcgccttaactgcgtctgcaacgaatttgcagtaaagctcataccctatattcatcatatgtccgtgctgcgcagtacctaatatattgcctgcgcctctgatttcaagatcccgcattgcaaccttgaagcctgagccaaattcggtaaagtccctgattgccctcaggcgtttttcggcaacctcatttagcaccttgcccggctgatacatcagataggcgtatgccattttatcggaacggccgactctgcccctcagctggtgaagctgtgaaagcccgaacctgtccgcatcaagcacaattatagtgtttacatttgatatgtcaagccccgactcgattattgtggtggcaaccagcacattggtcttaccctctatgaagcccagcataactttttcgagctgtacctcgttcatctgtccgtgacccgtcgcaacgcttgcctccggtacgagtgacgagatctttgaggcaaccatatctatgccctgaactctgttgaacacaacgtatacctgtccgcctctgccaagttctctttcgataacatcgcgtataatatcgtcctcctgctcaacaacgtaggtctgtacagggagtctgtcctccggcggctcctctataaggctcatatctctgatgcctgtcagcgacatatgaagcgttctcggtataggggttgccgaaagcgtcagcacatctacgttttttctcagttttttgatagcctccttgtgtttgacaccaaacctctgctcctcgtctattacaagaagtcctaaatctttaaaggatacatcctttgacagaagtctgtgggtgcctatcaccagatccacctgcccgtttttgagtttttctatggttttttcctgctccttgtcggacttaaatctggacagcacatctactttaaaaggaaacttttcaaatctgtccttgagcgtatagtaatgctggtttgcaagtattgtcgtaggaactaaaaccgcagcctgcttgccgtctgcaacgcatttaaacagagcccttgccgcaacctccgtcttgccgaagcccacatctccgcacagaagtctttccattgcaaccggtttttccatatccgcctttatctccgcaatgcatctgagctggtcgtctgtttcgacatatggaaagctgtcttcaaattctctctgccatggggtgtccggtccgaaagcatagcccttttcaagctgtcttgcggcggtaagctctataaggtctgccgccatttcggcaacagccgcctttgcctttgcctttgtttttttccattcgccgcccgaaaggctgtttatcttgggaaccgcgctgtctgagcctgtatatttctgaactatatccatctgctctacaggtacatacagcatatcctctccggcatatttgatatgcagatagtcttttttctcaccgtttacagtcagctgcttaattcccataaacctgcctataccgtgattttcgtgaacgatatagtcgccttttttgatgtcggcaaagctttttatctgctgagtgttctcactctttattctcttttttctttttttgtgtctgcttccggtaaatatatccgcatccgagatccataccttccggctttcggggaagtcaatgccggaggtcagctcgcccggctttacagatacctttctttcaagtccctctcttgaaagaaactccctcatattgtttacacgctcggaagatgagcagacaatcgttatctcatagtcttttttgatgtaggatttaagttccgtaacaagcatatccagcctgccgttaaacaccaccggctgacggcttactacattgtgaagctctgcaaaggtttcaatgcctttgattttcttggcaaaaggagtcaggacatatacattttctctctcatatattctgtacaggtcctccttgtgtgaaaatatcctgtagtcataaggaacagcctgccctctttcaagcagaactctgaaatcctccctgcgctccgcatctcttaaatcaagagcctcgtaaatcctgtcggggtcatcggctataatccggccgtctgtcatataatcccacagatactgcatatcgtcatagaaatagtggagatagttttccagcatctgaacgttgtttaccttctctatatactctgtaatatatccgagtcttttttcgaggttttcttttttgtctgtttctccggccttatcgtatttttttatctgcctgccgtattcctttcggatttcgtccgcggcccggctgaatatatctctgtcgtttacaaactggcttgcaggatatatttccacagactcgatattgtttaatgacctctgtgtatcggggtcaaaggctctgatagcgtccacttcatttccaaacagctctatacgatacggaagcgctccgtcaggcgtatatatgtctataatatctccgcgcaccgcaaactgcccctgcgcatcaattatgttgtatctctcatagcccatatcagaaagctgtttctttacctctgccgtatccagctctgtgcccacctgtattttcagcaccttttcctcatatatacggcgcggcggaagctttttaaccgcagccaaagcaggggctatgactatgcagtcttcccctgaacataacgcttttaatatccgcaggcgctccaccagcacatcgtggttcttggcctcatatctgaaaaaagtttcctcctcctgcggcatcacatatatttttttgtcaataaaaaaagaaagatcacctgcaagtcttgctgctctcacaggagatgctgcaattatgagggtctgtcctttgctgctttcggaaatgcgggcagcaaccggtgccaccctgctttccgatattcccgatatattgactatacctttagtggtcatttttatcttctcccacttttttgtttctgctattatgttcgttcatagccctgtctatgcctttctgc

SEQ ID NO: 1487 - DNA, 7651 bp, Unknown
  16S sequences of unknown bacteria
agagtcaaaatctctgattttgcccctcgagcttatacagaggagtcgcgtttgaagcttgtcaaaaatttatttttgacaagcgcgcaacgccccgggcggcaaactgccgtccggggcgttacatcctatgcttcacccatgcaggccaaagctgacggcgatggcgccgtcgacctggttcattagggcttcatccagcctgcccatatgctcacgcaggcgttttttgtcaatggtccggatctgctccaggagcacaacggagtcctttgtcaggccgacctcatgaccggccagggagatatgggtcggcagccgcgccttccccgtctgactggtgatagccgcggcgatgaccgtgggcgaatgcttattgcccgtatcgttctggacgatcagcacaggccgggtcccgccctgctcactgcccaccactgggctcagatctgcgtagaaaatgtcgcctcgttttacctttgtatccatatcgctgtcactctccgcgaaaaatcgttatcagcacctcgcggtgcgctaactgtattctcccacgcagaggccggttttataccgccacactggctctcatttcattctacgcacgccgctctgccggtgtgcggcataactacactatacgatatattgcaaaatgccgacctggcggccgccctggaaatagagccgcgtcatgcgcttgttgatatcgcaggtcagctcatacgagattgtatcgagctgggcggccagatcatcgcagcgattggccccgggaaccgggccaaatacgacgacctcatcccccacgcccaccggcccggcttcggagacgtccaccatgcacatatccatgcagatacgcccgataaccggcgcctgcttcccgccgaccaggaacgagacctggttcgacagccgccggggcaacccgtcggcatagccgatgggcaggactgccacccgccgcggcgcgggggtgcagtaggtcctgccgtagctgatataggtcccggcttcgtattcgcgcacctggctgaccgtcgtccgcagcgtcatgaccgggcgcagcggcagctggtccgccagcacaggctccgggctgaggccgtaggtcgcgatgccggggcggatcatatccagcgcatagtccgggtactggatcgtcgcgccggagttggcgcagtggcggatgagatcgcaatacccggcgtccgccagcccctggcagacggcctggaagcgggcaaactggccctgggtataggcctggtccgccgggtccagagaatcggccacggagaaatgggtaaatacgccagtgggcgcgagattcggcaggctggcgatctgcagcagctcgtccagcgccttggccgggtcctcggcgctgacacccaggcgggacatgcccgtatcgaccttccaatgcaccggcagccgcaggcccgtcccctccagccgctggctcagccgctgggcgtattccagactgtggatctcctggtgaacattcatctgtgccatctccgcggcatagcggggaggcgtatagcccagcagcagcaccggcagccgcacggccgcccgccgcagctgcaccgcctcctcgagattcgagacggccagataatccgcccccagctcctccagcgtatggctgacctgcacggccccgtgaccgtacgcatccgccttgacgacgcccaggaaccggcagccgtctgccacatggccccgcagctgatgatagttatattccagatggtccagatcgatttctgcccatgtccgctttagtagatccattgtctttttatccttcctatgcctgtgatccggcgcttggcgccttgcttccaaacgcctagtataattgaaaatcagagagcttcacgcccgcctggctgacgccgtcataccagattgacgcatagaccggcgcgccctcagaaaaccaggtctcaacctggagcgtatcgtcctcgtagccgttttggtacagcacgacggtatacgcgtggtcgctgcccgcctgggcgatgtacgacccggcccagctctcgcccagcacctggggcagtgccaccggcgctaatttttccgccgccagcagaggcgtctccaaggcagtggccgcaaaggtgacggtcttccggtccgtatcgactgtcccggcgatgccggagatggactccggggcggcaacggtaaaatccagcgccccgctctgcgtgtcataccggcattggagcgtaaaggtcgtcgtatactcgccgtgatccgctgtgatctccgcctggaagctgcagccgcccgcgttgcacagggcggcgcggaacgccgtcgcctcctccatgcacgctgtcggcgcggtgcagctgcccagcagcaccgccagggccagcagcaccggcagcaccgcaaaaattcgccgcaaatgcttcacatcctttatggtaagagtcgtgaagcagcatcaatgagatccgagggtgtcatgccgtattccccgcgctctgccgcgcagcggtcccccgccgcgccgtggagccaggccgcggccgccgctgcttccagcggcgcaagaccctgccccagcagcgagaccagcatccccgccaggacatcgccgctgccgccggtggccatgccggggttccccgtctcgttgcggtagagccgcttgccgtcggtaatggcggtccggtagcccttcaggaggaccaccgcgcccagccgccgggcaagcatcatcgcccggtccgcccgggtatcaaaatccgcaggcggcagcgcagcgccgggagacaggcggagaaattcgccgtcatggggcgtcaggatcagcggacaggccgcctcacgcagtctatctatatgcccggccatggcatttatgccatcggcatccaggacgacggggcagcgggcctcgcccaccagggcggcgaccagcgcatccagctcctcgctccggcccaagcccgggccgatgagacaggcgtctgcctttgcaagcagctgcgccagcgcaggcgccgcctgcaggctcagccgcccggctttatcctccgccatcggcatgaccatcggctcgtccagcttcgccgcgacgatgggccagacctgccgcggcgttgcgacggtgatgagccccgcgccggtccgcagtgcagcccgggccgccagcgccgcagcgccggtaaagccgacgctgccgcagaccagcagcactcgcccgaagtcccccttatgggaaaaccggggccgcaccggcagcagctgccgaatctgcaccgcctccaagaccatcgcctgcgccatcgccattccctcccccgcacgtttgcgcgatcattcttgcacgattctatttattatagacgaaaagccgtgaatcgtcaaatttaattgttgcaagaaaaaaaaaattgtgttagtataagagcaataggctaaaggttatgatcgggccgtcgtgctgccaagcgcagggtgcagagagagcgggtcagctgcaaaccgcttccccgccggcagcagggccttctcccgtgaaccgcccccttgaaccagcagtagagggggtcgggtcgctccgttacaagcgtcaagtgcgccgggtcttccggtgaattgcgggtggtaccgcggaggtgtgtcttccgtccccattgggcggagggcatctatttttttgtcatcaaccaaacaaaggagattttgttatgaagcaacagctggagcaaatcagacgcagcgccatgcaggatctggaccaggcgtccaaccccgcggcgctggaagacctgcgggtgcgtcttctgggcaagaaaggcgaattgaccgccgtattaaagcagatgggcaagctctccgctgaggagcggccgctgatcggcgcgctggccaaccaggtccgcgccgagatcgaggcccatctggaagagcgccgcacagcgctgcacgccatcgccctggaaaagaagctgcgcgacgaagcgctggacgtcaccatccccggcgacgccgtctgcctgggccataagcaccccatgaacaaggccctggacgaagccaaggaaattttcatcagcatgggttacacgatcctcgacggcccggagatcgagcttgccgagtataacttcaccaagctcaacacccaagagggccaccccgcccgggaccgcagcgataccttctacctgacggatgacgactccgtcctcctgcgcacccagacaagccctatgcagatccgcgccatggaagccatccagcatccgcccattcgcatcctggccccgggccgcgtctaccggaaggacgaggtcgacgctacccacagcccgatgttccatcagatcgaaggcctagtcatcgacaagggtatcaccatggcagacctcaagggcacgtttgacaccctggtcaagcagctctacgggccggactccgtcatccgtctgcgcccccaccactttccctttacagagcccagctgcgaggtcgacgtgcagtgcttcgagtgccacggcgccggctgccgcacctgcaagggtgaaggctggattgagctgctgggcgccggtatggtgcaccccaacgtcctgcgcggctgcgggatcgacccggaggtctacagcggctttgcctttggcatcggcctggagcgtatggccatgcggcgcttctgcatctcggatatgcgcctgatcttcgaaaacgacattcggttcctgtcccagttctaaggcaaagggaggttataagatgaatatttccagaaaatggttaaaagaatttgtggagattgaagccacagacaaagaatatgccgacgtcctgaccctggcgggccagaaggttgagaccgtcacccggatggacgcggaaatcaagaacgtcgtcgtgggcaaggtcctgtcaatggcccggcatgaaaactccgaccacatgtgggtctgcatggtcgacaacggcagcgcagagccggtgcagatcgtcaccggcgcgcagaacgtccacgtgggcgatctcgtccccgtggcccggcacaacagcgacctgcccggcggcgtgcacatcaccaagggcaagctccgcggcgtcgcctcctgcggtatgctctgctcctacgcggagctgggcctaaccgagcacgatctgcccggcgtctttgccgacggcatctggattttgaacgatgaaccctgcaccccggggcaggatatcaacgagatcatcggcaacgatgacaccatcgtggaatttgagattacgaacaaccgccccgactgctacagcctgctgggcctggcccgggagagcgcagcggccttcaacctgccgatgcaccatcatactccggtggtcaagggcggcgcggaaggcgatctgtccgcgctgctggacgtcgaagtcccagcggaggacctgtgccgccgctacacggcgcggatggttcgcaatgtcaagatcggcccctcccccaagtggatgcgccagcgcctgcgtgcggcgggcatccggcccatcaacaatatcgtcgacatcacaaactatgtcatggtcgaatacggccagccgatgcacgcctttgactaccgctatgtctccggcggcaagatcatcgtccgccgcgccggcacggacacgcagctgacgaccctcgacggcaacgtccgcccgctccagccggatatgctggtcatcgctgacgagacaaagccggtgggtctggccgggattatgggcggcgagaacagcgagatcgtcaccgacacggcagacgtcgtcttcgagtctgccaactttgacggcacctccatccgccagacggccctggctcttggcatgcggacggacgcctcggcaaaatttgagaagaacatcgacccgatgatgactctggaagccgtcaaccgcgcctgtgagctggtcgagctgctgggcgccggtgaagttctggacggcgtgatcgacatcctcaacgatattcccgaagaggtcaccctgcctctggagccggagaagatcaaccggctgctgggcacggacatctccacggacgacatgaaggaatacctgcgccgcctggagatcccggtggacggcatgacaatccatgttccctccttccggcctgatctgcggatgtgcgccgatatcgccgaggaggtcggccgtctctacggcttcaacaacatccccacgacgatgatgcggggcacgacgaccaagggcggctactcccccgcccagcttctggaaaaccaggccggtgctacagcccgggccatgggcttcagtgagatcattacctactccttcgtctcccccacaaccttcgaccgcatccgcatcccggcagattcccccctgcgcaataccctgaagatccagaaccccctgggtgaggacacgtccgtcatgcggacgacagctctgccctccatgctggagatcctggcccgcaactacgcgttccacaacaaggacgtgcagctctacgagctggccaaaatctacctgccccgggatgacagcccgctggcaaatgagccgaaggtcttcgtcttcggcgcctacggcccgcacacgacgttctactccctcaagggccaggtcgaggcactgctgcggcagctgaacatccgcccggcggagtacaccgcccagcgggagaaccccagctatcaccccggccgttgcgccgccctcaccatcgacggcaagccctacggcgtgctgggccagatccatcccctggtcgcgaatacttacggcattgacgccgaggtctactgcgctgaactggacttcaccggccttatgcagcagcagcagccagaggcgacgtatcatcccctgcccaaatacccggccattacccgagacctggccctggtctgcgacgagagctgcaccgtcggccaactggagcactgcatcgccgccgctggcggtaagctgctgcgggatatccgcttctttgacatctaccgcggcgccgggattgccccgggcaaaaagagcgtcgccttcagcctgaccctgcgggccgacgaccgtacactgaccgtggccgagtcggaagaagcgacgcagaagatcctggcgcatctgcaccaggatctgggcgcagtcctgcggtaacctggcaaaacaccgtttcccatgaaattgacagtataggattgcccggttcctggaatactaacgctatcgcccggcgctgtatgctcccttccggtgcatacagcgccgccgtgcatttattttgttccgggtttgtttccaattgttgctttactttagccccggaatacggtatgatatagggaaaaggaggtgcggcaattatggacgacaacaccatcaagttccacgttcaggacgaggagcagcagatgaaggaaattctcaaatccgtctatgcagcgctgcagcaaaaaggctacaatcccattaaccagattgtcggctatcttctttctgaagacccgacgtatatcaccaattacaataacgcccgcagcctgatctgcaagatcgaccgggacgaccttctgcaggagatcgtccggcactatttgttcgacgaataagcagtgctccggcgcgccctggcttctttctgcca

SEQ ID NO: 1488 - DNA, 5749 bp, Unknown
  16S sequences of unknown bacteria
tctttttattattgcggtaatatgttaaaatatagataaatataagtatctaaggagttaaacgatatgtcagttttatttatagccgaggccggggtaaatcataacggttcccttgagcttgcaaaaaaaatggcggatgttgccaaggaatgcggtgcggatattgtaaaatatcaaaccgcaaagccggaacttgttataagccaatttgcgcctaaggcggaataccaaaaagaaaccacaggggagggcgaaagccagcttgatatggttaaaaagttgcacttcggttttgaggctcacagagaattgaaagagtattgcgattccatcggcattatgtatctttctacccctttcgatatggattctatcgactttttgcggagtttggatatgccggtttggaaaattccgtcgggggaagttacaaacttgccttatcttgaaaaagttgcaaaacagaaaaaacctataattatgtcaacgggtatgtgcgaaatggaagaaatccgtgccgcccttgatattctgtataaaaacggagccgaagatgttacggttctccactgcaacaccgaataccccactccgctgccggacgcaaatgtccgtgccatgcttgatatacaaagggagtttggctgcaaagtaggctattccgaccacacattaggtgttgctgctcccttggctgcggtggctttgggtgctactgtaatcgaaaagcattttacccttgataaaaatatgccggggccggatcagcacgcttcaatggagccggttgatttgaaattcttgattaaaacaataagagaaacagaacaggttttgggcgacggcgtcaagcatgtaagtgccagcgagggcaaaaacaaggccgttgcaagaaaatcaatcgtggcaaagcgcccgattaaagccggcgaagaatttaccgcagaaaaccttacggtaaaacgccccggaaacggcgtaagcccaatgcgttggtacgaagttttaggccaaaaagcaaaacgcgattttgaatacgacgaattgatagagctttgatatatgaaaaagataatgattgtcacctctacccgtgcggactacgggcttttgcgcccggttattcgccgtgtggcagacagcgataaactcactctttctcttgttgtaacaggcactcacctgcttaaagaatacggcgaaacggtaaatgagataatcgccgacggattgaccataagccacagggcagatattatgaaattcggtttcggcgaaaaagaaaccgctattaccataggttacacaatacagcggtttacggaaattttttcggcggataggccggatttgcttgtggttttaggtgacagatacgaaatttttgcggttgtaaccgccggggcggctctttcaattcccatagcacatataagcggcggagatgtgacctttggcgcaaaagacgattactatcgccactgcataacaaaaatggcaaatttgcattttccctcctgtgccgacagcgccaaaagggtaattcaacttggagaaaatccgtcaacggtattcaatgttggcggcctcggcaatgagaatataaaaaatattcggttgatgtctttgcctgaacttgaaaagagcttagatttcaaaaatttacagcccttcgccttgataacatatcacccggagacaaaagatggttcaaccccacgggatgatatggctgggcttttacaggctttaaaagagacagacataaatctgatttttacaaagtctaacgccgacgccggcggagatattttgaacaaagccgtagatgaattttgccggcaaaatcaagacaggtcaaaggcgtttttctctctggggcttaaaaggtatctttcggcaatgaagtacgcccgggttgttgtgggcaattcatcttccggagttgtggaaacaccggcattcggcactcctaccgtaaatatcggggacaggcaaaaggggcgttttattgccgaaaatgtaatttgcaccggcaccgacaaggcagatattgcccggggaataaaaaaggcactttcgcccgaatttaaaaatatatgtaaaaccgttacaaatccatatgaccggggagttacccccagccgggaaattgtaaaaacaatcaccgaatatgtgtactcgccgcacaccacggcaaaagaattttatgatttataaggagataactatgaaagcacttattgtgggccttggctcaatgggcaagagaagaattcgccttttaagaggcatcgacaaaaacgcagagataatcggcgttgacacaaacccggagcgcagagctcaggtagaggaaatgggctgcaaaacttaccggaccatacaagaagcggcggcggaaaagccggaggcggcttttgtttgcacatcgccggttgcccactatcctataatcaaagaccttttaagctataaaataaacacatttacggaacttaacttggtttctgacggttatcaggaacttatgtccgccgcaaaagaaaacaacacggttttgttcctttcaagcaccatgctttacagaggtgaaataaactatatacaaaaccgagttaaaaactttgacaagccggtaagctatatttatcacatcggtcagtatctgcccgattggcacccttgggaaagttacaaaaacttttttgtaagcaataagcgcacaaacggctgccgtgaactttttggtatagagttgccttggataatagaaactttcggtaaaatcaaggaaatttacagcaccgccgataaaatgaccgatttggaaattgactttccggacagattttttgttacaatcacccatgaaaacggcacaaaaggcattttggcaatagatgttgtaagccctaaggctgtgagaaacctggaagttttcggcgaaggtatgcaccttttctgggagggcaacccgaaaaccttgtatgacttcaatgtagaaacgaaggaaaaagaatttataaacacttacgaaagctttgaacacgattcaagatactccgacaatattgtagaaaatgcctatgttgatgaaatgcagaactttataggggttataaaaggcctggagcaaccgaaatattcctatgaaaaagacctttacaccattaaaattatggatgaaatcgagggtataaagtaatgaaagttttatttgtgggtattggcagtatcggcacacgccacctgaaaaatttgcacaccgtagcaaatgagaggggtttgtcacttgatgttaccgccctgcgctcatcaagcagggaactgccggcggaaaccgcccggcttttaaacaggcaaatttccgctttggacgataccgtctacgacctggcttttataacaaatccaaccaccttgcaccacaaggccttggaggatttaaagggcaaggcaaatttcttttttatcgaaaagccgatttttgaagattgcatttacgatttaaacgccctgggcttaaacgaaaaaaacgcttatgtggcctgccctatgcgctattgcggcgcctatatgaagttgaaagaacttttaaaggataaaaagcccttttcggtcagaataatatgttcaagttatctgccgggttggcgccccaataccgactaccgcaaaaactattctgccataaaggccttaggcggcggcgttaccattgatttgatacatgaattggactatatgacggatttgttcggtttcccggaagaaagttataactttaaaggcaagtattcggatttggaaatcgacagcgatgatttatccgtttatatttccagatacaaggataaaatttgcgaagtacatctggattacttcggcagagagtaccgccgcacatgtgaggtatttttgcctgagggcacaatggaggcggagtttggcaagggcagcgtaaagctgccggacggcagggttataaactgcaacgaagaggccaatcggcgctttgtccgtgaaatgcgcaatgttcttgacataatggcaggtaaggcggaaaacataaacgatgtttataaggcaaataaagttcttgcactgacattgggaaaagaggtttaattttatgaaaaatgttttgataacaatttgcggccgtgcaggcagtaaagggtttaaaaataaaaatttaaaggtgtttttgaacaagcctcttgtttactacacactgcggtcggcttttgattttaaagcaagggtaaaagacgctgatgttgatattgcacttaataccgacagtcggcttttacaaaatttggttttagaaaagtaccccgaaacggaaaaagtagatcgcccggaggaacttgccggggatattgtgcctaaaatggcggtgttccaatacactttaaaatatatggaacaaaaatacaacaaaacctacgattatcttatcgaccttgatataacaagtccgttaaggcagatagacgatgtgctttccgcctatgaaatgaaactttcaaggccggatgcggggcttgtattctcaggttgcccatcacgccgcaatccctatttcaatatggtaaaaactgtcggtgaccatgtggaaaaagttatcgaaagtccctttaccgcccgccagcaagcgccttctgtttacgatttaaacgcttctatatatgtttttaacgccgactttttaaagacaaatacaacaggtatcctttgggagacaaagtgccttgtttacgaaatgcgtgacacggctgttttggatatagacagcgaggaggactttgagatgatgcagcttatcggcggttatctgtttgaaaatgtcccagggtttaaaaaggtcagggaacttataagataaacctaagccgcaagttgaaaaaataaagaatatgaatagtattgtagttgataatttatttaattaaaatgaattagatatttgatttttatttaaaataatgctataatatttatataataataaaaaaagattagggggcttaataatgtataaaactgatgacattatctttttcgggtctacgggtgtgtgccgtgtagtatcggtgggggaaccgtccattgccggtatgccgtcaggggttgattactatacattacagccgctttcccaaagccacagagaaatgatttatgtgcctacaaacacaaaggcgtttattcgctctacaatcacccctcggcaggctcgggattatatatcagccattaaagatattaaaccggtgtttcctcaaagccgcaatccaaaggcagtgcaggacttttactccgcccttatttcaacttatgactgccacgatttgcttgtggttattgtaagtcttatgaataaaaagaaagagtgtcggcggaaaaataaatccttaaaccaaacccaaaccacttttttgaaaaggcggcaggaaatggtttacaacgagttttcctatgttttggacaagccttttgacttggttgccaaaatggttgaggacgaaattgtttaccggtgatatacatataataaaatttaaagcaggggcgaccctgcttttgttgttttacagcggaaagtcgccgcctcaaattgtcaagccaagtgcaacagtcttgttgaaaaagtcaacaggagaaataaagtcaagacattttctggggcgattgttaatcaaatcaagaacagcatcaaggcgctctcttgaaagag

SEQ ID NO: 1489 - DNA, 4747 bp, Unknown
  16S sequences of unknown bacteria
tcgtagagccggtctcgcacatgatccttggctcttctggcatcctcctgagagatagctccccgctgcatatccttcgtgatcctggaaaagacagtcagcttggccttcaccttagggttgttctttgccagttccttttgaacttccaccgtgccaaattgccgacaggtgtagccaggagcgtggggacaggccccttcgcagtacaaagcgtggacgccgctcttcagcatgaagtatttcccgcagatgatgcagcggcggatgttgtgtccgctattcagggccagcatatagtctgccttcatcagcgcctgtaagctgtccgtcacatgctcctgacagatggccatggagccgtccggcagctcccgcgggacataggagagcatatattcatcgtgtctcctgtagcagtccccgtggtaagtgatggggttgacgatcagcttctctgcggtgcgatcatcgttatagaaaccatagagcgctgccgcataactttccggcccattggtcgtgagtgtggagaggataaacttgatgaaattccggatggtaggaacaaaggcacggatgtcgtgaagatacatcatgtagcggtcgatgtatttcttgtaggcactccaggtatcttcgcacgctcccaggaggcgaaacatctcgtaataaaacaactcgcccttttcctcgctgccctctctgcgacgaaacagatccagcagtcccaaggagatttcaggatcgctgtccccatcatcgctctggaagaattcttccgctgaggcgctgagaagttttgtctgatcatcctctgaaaggctgtgctcctcgggaggaaacaagctgaactgtcctgtgatctcccgtatcaccgaaaagaaagcgtcatagcaatcgtccggtagcaagcggaacacagtatatcggcgaagttcctgacagagctgctccatctcatcattcagtttccaccaaagttcactcttgcggacatactcgtagatgtccataagggtacggatgcgcaccatccgttcgtgcagggggtggtagtcatccggtgatagattcagcagatcttcggtcagcctgcctgcctcaaactgctgcccgttcagctccaaggtgctgccgtaggtatagaatatgatgctcccctccatttccgctgcccccctcctctgcaataatttgtcctacttgatttttaatctgtccatgctttttatcaggataccatcttttccaccacaatacaagcagaggggcaaggggatgctcaaaagtcctgtgggcactgctcctctaaaagaatactactcccacttctttcgaggtgggagatttttgtattcagatattttgaattggaggtactgactatgagcaacaaaatggaccgtcctctggccacggtggacggtaggacgctgatggaccgtccgctggagccgcccaattttgtggtggacacgctgatctctcagggtctgcatatcctggcgggttcacccaaggtgggcaagtcctggctggccctgtggctggcggtgacggtggccaagggagaaccggtctggggaatgagcgtgaagcagggcaccaccctctatctctgcctggaggactccgtccttcgcatccagaaccgcctcttcgagatcacagaggacgcgccggacagcgtccatttctgtacggagtgcgctcccatcggccaggggctggaggagcaggtggagggcttcctcgtagctcacccggatactgttctggtcctcgtcgatacgctgcagatggtccgccccgtccacgatgccacctacgccaatgactaccgggacctgtccgtgctgaagcggctggcggacaagcacggcatcgccatcctgctgatccatcatctgcgaaaggaaactgccgatgatgtgttcaaccgcatctccggtacgacagccatcagcggggcggtggattccagttttactctggtggaagatcggcgcggcagcggtaaggcgaagctctcctgcatcggtcgtgacattgaataccgggagttgtctctggaacgcaacgttgaaaacgtgtgggagatgatagcagacagcagaacgcagccggagctactgggcgaccggatcacctatctggtctctgaactgatgcgcgaccgtacgaaatttatcggcactcccacagagctgtctgaaaaaatcgaccctgtcggtatggagcgtatctcgcctaagaaagtgtcccgcctgatcctgcaaaaccttgacgcgataagcaaaatcggaatttccggtatggtgcgccgcagcaacgggaagcggctcatcgagctgcgccgtgccgaaagtgacgatgcccagggtgtacctgtggtcgcccctgttgaccctgttggggcgctgtgcggcgatttgcgggagattgccgggcatggcgagtaaacacccgcagggaaaaagaaacgccgtttgtggccatttgtggccgaaagcggagcgcgggtgttcggtgcagggaaatcacctccttggaggtggccagcatcgcgtttgtctggtctgcggcaacgccgctgcccgacttccgcatgaattccgggcagaagcccggacccactttatctacgatttggaggaaacgacatgaaaaaagatgctaaattcagcacccgcatggcgtccacagaccgggaggccatcaaggagttggcgaagcagtccgggatgtccatgagcgactacgtcactgcctgctgcctgggaaagcaggtggtggtcatcgacggcctgaaagaagtgctgaaggagctgaagtccatcggcagaaatctgaaccagctcgtcaccctggcgcacatgggacgagtgaccgtgatcgatctggaaagcgtatgtcgggcgttctctgaactctgtggtgccgttcggatgatccttgaacgaaagcgctggtaagctatggctatcatcagcttcacaaactacaagcggggccagaccaccggatgcatgagcgccgtgatgcggtataccatgcaggataaaaagaccgagttcgaggggcagcagttggtcacaggtatcaactgtcagccggaatctgtctacgcggatttcatgaccaccaagcggctctaccacaagacggacggtgtactgttctatcacatggtacagagcttcccgaaaggcgaagcagtcgacccggtcaccgctcacgcggccgcgctgaagctggccgagtactatgagggatacgaagttctggtctgcacccacacagaccgtgagcacatccattcccacttcctcatcaactcggtcaatttcgataccggacggaaactgcatatcgcaaaggagcagctccaggaactgcggcaacgcaacgacatggtctgcaaggagttttcacttcctgtatttcaacccagggaacaaaagcagaaaacaaagactatgaccatcggagagtatcacacggcggcccgtggtcagagcaagaagctgcagctcatgaatatcatcaatgactgtatgcgccacgcttccaaccgcgaggagttcattgcgctgatggagagcgagggctacaaggttcgctgggaaaagtcccgaaagaatatcacccataccacgccgagtggctggcagtgtcgggaccgtttgctgttcggtgacaaatatctaaaggagaacatggaatatgaattcaggatcagagaagaaattatctatggacgagctcatggccctgaaccggcccgagccttcaccgcagccgacagcgcgggagtcgagttcaccgatcacgcccattgtcatccagtgtccgctgccggaggctctgacgatgctgacacagaagacagaatccatcgggtgggaagtgcgtggaatgcgggagtatcttccgaacctgagatcacacacagacctgacagcggtgcagaacagcatggcggagatccagaaatcgttgacggagatgaccactctgctggaacaggctgggaagaagaaagaaaagcattcctgcaaatggctggactggcttccggacttcgacctgattgtagtggccaaatggatcgtactggtactgctcatcgtggcggcactgctggggatggggtatggcacagcgacagtggtcagcaacatccgcaacctgtttctatgaagccgctccacgctggactgtatggtctggcggtaactggagcgttactggatgatggtaacgaagatgtcgaggaacgttaccgccgtatccaggcagaacaggaagccaaaaatatcggcgctgtcatcggactggtggccggcgtagccatggtgctcacacaggatgagcaatcatctacagaacagcagtggaccgaagatcagcaggcagaacaaacacagcagcagaccatgtaacggtctgctatttttgttgcctgactgtagcgtcaggggaaaggaacgatatggcgtataaattcaaatacaatgagcgtccccgctcctacagtgaagaaaagcatggagatgaggatattccctctgccaaggcagtgcgggataccgcagtggaagaaagggacggcaagattataaaaagccgccgacagcatgtatgcggcagagagtacattgtgttcgcggaattcagtttcggaggaacgcaatctacggtcgatcttatgaaacaggtcatcgacctggagcaggacgca

SEQ ID NO: 1490 - DNA, 2165 bp, Unknown
  16S sequences of unknown bacteria
tcaatgaaatcagagactttgtcagcgaagggcagaccgtcaaggtgaaggtcatttccatcggaaacgacggaaagataagtctgagtatgaaaaaagcggtggagagagctcctcagccgcgcagggataaaccctttaacagacagaattccgcacctcaaaagccccgtccggaaaagaaaccgcaatatcccgttttcaccggaaatcccgaccttgattggactcccaccaaaagcggaaatgccgcctttgaggacatgatgcaaaaatataaacagtcgagcgaggaaaaaatgtccgatatgaaaaaagccggttttcaaaaacgcggctcgtcaaggcgcggcggaagataaattatgataccccggcgttaaacggggtattttgttgttgtctaaaattaggaggattaaaatatcatgaaagctaccgaaaaatcaatggataaaattgtcgccctttgcaaaaaccgcggttttatatatgcgggctccgaaatatacggcggtcttgcgaattcttgggacttcggtcctctcggcgtagaatataaaaacaacgtgaaaagagcctggtggaaaaagtttgttcaggagtctccctacaacgtcggacttgacagcgccattctcatgaaccctcaaacttgggtaacaagcggccatgtgggcggattttccgatccgcttatggactgtaaggattgccacacccgccaccgtgcggacaagcttatcgaggatgcgggcggagctgccgagggcatgaccttcgaacagatgaccgactatataaaagagcacggcattgcctgtcccgaatgcggaagcaaaaatttcaccgacatccgtaaattcaacctcatgttcaaaacatatatgggcgtaaccgaggatgccaaaaacgaggtttatctccgtcccgaaacggctcagggcatttttgtcaactttgccaacatccagcgtaccacccgaaaaaaactccccttcggcgtttgccaggtcggtaaaagtttcagaaacgaaatcactcccggtaacttccttttccgtctccgcgagtttgaacagatggaatgcgaatttttctgcaaacccgacaccgaccttgaatggtttgactattggagaagctactgcaaaaacttcctcatttctctcggcatgaaggaagaaaacatgcggctgcgcgaccatgaaaaggaggagctcagcttttattccaaagccacaaccgacattgaatatcttttccccttcggttggggagagctttggggcattgccgaccgcacaaactatgatttgggccgccaccaggaggcaagcggaaagagccttgagtattttgaccccgaaaccggtgaaaaatatattccctttgttgtcgaacccagtctcggtgccgaccgtgttgcccttgcttatctttgcgaggcatacgacgaggaggttgttgatgccgaaaagaacgacagccgcgtagttatgcgttttcacccggcgctcgctccctttaaggcttgcgtgctgcccctttccaaaaagctcggcgacaaggcaaaggaaatctatgccgaactttcaaaatactttatggtggattatgatgaagccggctcgataggcaagcgttatcgccgacaggacgaaatcggaacgcctttctgcattaccgttgatttcgaaacggtgggcgacgacacgactcccgccgacaactgcgtaaccgtcagagaccgcgacaccatggaacagcagagggtcaaaatcgaagaccttcgcagctttatcgaaaagaagcttgaattctgaaattaaaagggataccttcattaaatcggcaactattcttatagttgccgacattgttgttaaggttctcggagttttcttcaaaatccctcttgccaattttatcggcgaggtgggaatgggatatttccaaacagcctatgacctttacctgccgttttattcggtcgcaatttccggtttgccggtgctgctgtcgcggctggtcgcaaggtcggtttcccttaacgacggaaatggagttaaatccgcttttttctcctgccgaattctttttacggttttcggtgtaataatgaccgcggcagttgttttgtgcagtctttttctcatcttttt

SEQ ID NO: 1491 - DNA, 32759 bp, Unknown
  16S sequences of unknown bacteria
tgtagcacagcccttggagaggggctctaataactactactctataatacaaggagaaatggcaggagaatgggaaaatcatccacttttttcctggaaaggggagagggaaaaggcgggcgctccatgtgcgctgcaagatccctttcttttggggatgtgtgctgaaattcggggcaaaaaatagggcaatctgccatgctgcctttgattgcgccccacttttcccggcggtataataaagatgcggcgcaagccggaaatgaaaaggcaaggaggacattttttatcatgtatgatctgattataagagggggcacggtggtagacggcaccggcgcacctcgctatcaggccgatgtggccataaagggggacaagatcgcctgcatcgctccccatatcgaagaaaagggcgccagggagatcgatgccaagggccaggtggtctctcccggctttattgattatcacagccattcggacaacagcatccttctggggccggacggctacaactacctggagcagggcgtcaccaccgaaatcaccggccagtgcggcacggctcccgctcccagctatcccggctctttgcaggaagaaaaggagatcctgccgccggaaaaatttgccgaagtggagaaggcctgcgattcctacacctcctttattgactatgtttctcacatggaactgggcaacaacatggccttttacatcggccagggcaatgtgcgggggagagtgatgggctttgacgattccctccccaccaaagaacagctggaagagatgaaggcctgggtgcgtcaggccatggagtgcggctatctgggtatgaccaccggattggtctatgctccctcggtgtatgccggggaagaggaactggtggagctggccaaggtagtgggcgaatatggcggcagctatgcttcccatatccggggcgaagcggacaatgtggtggaatcggtggaagaagccatccgggtgggggaaaaggccggtatcccggtggtcatctcccatctgaaggtcatcggcaagcagaatgagggcctttccaaaaaggtgctccaggtgatcgaggatgccaacgcccggggcgtcaaggtgcgggccgaccagtatccctatctggcaggcagcgcccccttcatcagctgcatcccgcccaaattccatgtgggcggcgtggaaaagctggtggaaaacctgaaagatccgaagttccgcaagaaggtcaccgattccatcgagaatgaataccaggaatttgccagcaatctggtggacgccgggtttgagggcacactcatggcaggctgcgccaaaacaccccagtatgtggggaaaaccatcgcccagattgcagaggaagagggaaaagatccctgggatgtgtgctatgacctgctgatcgccaacgacggcatggcccagggcatctatttcaaccagaatgaaagcgatatgatgcgtatcatcgctcacccctatgtgatgggcggcagcgactggtccaattaccaggctcacctggatcgggataaggtggggggcggtcatccccggggtacttccaccttcattacccgtctggccctgctgcgggatcacggtctccagaccctggaagcagcggtgcacagcgtcaccggcctgcccgctgagatgagcggtattgagggtatcggctgcctgaaagaaggggcccatgcagatatctgcgtctttgactatgccgctttgggagccgacagcgattatctccatcccttccggaaaaaccggggcctttcctatgtggtggtcaacggcaaggtggccgtggagaacggagaatacaacggcgtgaaaaatggccgggtgctgaaaaaggccccgaaagcataaaaaggagagggaagatgaaaaatccgtatcgctgggacaatctcacaagtcctcagatcaaaaaactgtcggaagaaggggcgatcgtattggtgccggtgggctccaccgagcagcatggccctcatctgccggtgggcaccgatgcactgatggccacttctatgagtgaaaaactggccgccgctttgggcgaaaaaggggtgccctgtgtggtggctcccaccattgccgtggccaattctacccatcatatgagctttgccggctcccttaccttgcggcccgaaacctacctggcccttttgcgggattactgccacagcatcgcctcccatggcttccgcaagatcctgctggtcaacggccacggggggaacatcgctcccaccaacacggccctgatctccatcaatgaagaactgggcttcccggtgtatttcaccggctactggcaggccagcgcccaggcggagcaggagattctggagacccagaagggcatgatccacgcctgcgaggaagaaacctccctggtgctggcgctggatgacagcctggtggaccccatctacaaagaaaccaagggcaacccgggccacggctcccccatgctggatgaaggggtgtgggagactttccaccggatggaggcccacacggaaaatggcgtcatgggcaactcctatgcggccacaaaggaaaaaggggaagctcttacaaaaagaatggtggaggatctggcagaaaaattggccgacccctccatttgggaacagaaggtttgataggccatcacagttccgccccgcccaggggaaggcccatggccgggcggggggaacttggggagtgaaaagggaatgaaagagaaaaagtgcccgttgttttatggctggctggtggtcatcgcctgttttctggtgatgggtgtgtcggtgggcgtggtcaacaacagcaacggggtctatgtcaagccggtgtgtgccgatatgggcttttcccggggggccatggccatgaataacaccatcatcgctgcctgtcagatggcggtggctttcctggccgggcggatctatgcccgctttgagctgaaggccgtcatgcgtgtcagcggccttgtgatgggactggggtatatgacctattcccaggcccaaagtctgtggatgttttatggcatctccttggtggtggggctggcccaagggcttttggtagccgtttcggtgtccatgctcatcaccaactggtttcatgcccgccggggcaccgccatggggattgcctccatgggaagcggtgtgggaggcatgatctgcaaccccttggccgcgcagctcatcggcacggtgggctggcggcagacctatctgattttaggggcggggatgctgcttttcgtggtgcccgcctgctttttcatcatccgtacccgtcccgcggatgtggggctcagtccttatggagagagcccggaggaaaatcatcccgtagaggaagagggactgacggcccgcagcgcccggaagacggcccagtattgggccttgagcattttcggcctgatcaacggcatgagcgcggtggcgctggtgcacaatgtgaccccgcatctcagcgatgtgggcttttcgcccatcaccgcctcggcggtggcctcggtgagcatgggctttctggccttcggcaaggcgttggtgggatatctctatgacaaactgggaccccggcgggcttccttcctctccaatggctccatggtgttgggatttgtgggaatgctcctggtgcccttctgtccggctatcggcttgattgtgctgggatgcggcgtgggtggggccttcggcgctgtggccacccccatcctcacggagatcatgttcggccggaaggaattcggcgccattgtaggggccatcaccgccttcggcaacattggcgccatggtggggccggtggctgtgagcagtgtgtatgacatgacgggcagctataagcccgctttgttcggggtgatggtgctgatgatgggggcactggtgggatatcagtggattctccgccggccggcgccccgggagaaactcgctgttttggcaggggagaggaaagaaggaggaatgtaaaatgatccgggatctggcgagaaaaagccgcagctggcggggctacgacgaaagccgcaaagtcagccgggaagaactggtggaaatggtggaatgtgcccggctgtgtccttccagcgtgaatatgcagccgctgaaatactacctggcctgggaagaggagcaggtacggaagatccagcctttgaccaagtgggccagggctttgcagcctatggaattgccccacaaaggccactgtcccaccgcctttatcgtgatttgtcaggataccgccttgcagccttccattcctcggttccagaaggacatcggcatcgtggcccagaccatgctgctggccgccaccgaaatgggcctgggtggctgcatgatcggaaattacgacgcaggccaggtgaaagaggctctggatctgccggagcacctgatgccggtactgatcgtagccatcggcaagcccgatgagaccatcgtccttaccgatgtgaaggaggacggggacatcaattactgccgggacgaaaacgatgtgcactatgtgcccaaacgctctctggaagatctgatcatcaataaataagcaaaaggccgccgggcaattcccggcggccttttgtttactcttcttcgatcagttttttgatgtaaagggcggcttcttcgatgtactggctcaaaggggcttcacccacaccgcatacatggatgcccgatttgtggttgggaatgagtacccgctggccggggctttgtcccacagcggcagccatgggagcggagacctcccccaacatggcccctgccatcaaaatgccgatggggcctgccaccacatgggcccggccgcagcactggacgatggcattttccccggtggctccgtcgtcggccccggcccggagcatggccgatgtggccagggcattggtgcccagggccagcacatgggcctggggcacttcttttttcaatcggccaatgagggcgctgcccacgccgccccctttgccgtcgatcacagcgatggtcttcatatggtttctcctttggcgttttgtttcagtataccccaaagggggaaaaatggcaaaggggagcatcataagaaaagtttaagcaaattccccctccccaaaaaacacgggagggagtatcatagaacagagagaaaaggaggggtttttgtgcaggccaatatcttggtggtggatgatgaaaaggagatcgccgatctggtacaggtctatctggaaaacgagggctttactgtgtataaatgctataccggcaaagaggcgctcaaggtgatcgaagaaaaggacctggatctggcgcttttggatgtgatgctgccggagatggatggcttttccctttgccgcatcatccgccagaagcacacctggccggtgatcatgctcaccgcccggggggaggagatggacaagatcaacggcctgagcctgggggccgacgattatatcacaaagcccttcagtcctttggagatggtggcccgggtgaaggcccttttgcgccgggccaggctgtatagcggcggggagagaaaggaagcggatgtgctggattttgccggcattctcatcgaccggagcacccacacctgccagctcaatgagcggacgctgaacctgactcccacggagttcaagatcctttggcttttgtgcgaaaaccggggcaaggtgctcagctgtgaggagctgttccggaaggtctggggagaaaagtatttcaccaacagcaacaacaccgtgatggtacacatccggcatctgcgggaaaagatgggagatgccaccgacaagcccaaatatatcaaaacggtgtggggcgtggggtataagattgatggctgagcaaagcagaagacaccgggataagcagcgctatgacctgcgccgcctgcggcggaagatgctttttcaactgatagggattttgatactgacttttgtcattggcgctgtgatctgtacggtgctggtggacgatctgcttcaatatcccttttcagagtttgtcgtgtcggcggtccagggattttcggggatgagccgggacgaagccattgaggtttatgcggtaattttccggcagaacaaaaccgaatggcttttgctcatgggtgggatcatttttctcgttttgttttggcagttcacccgctggttcagccggtattttcagatggtggaccaaaagctggacgagcttttgcaggaagaaggccggacggggcccgatctgccccgggagctggatttcatccaggaaaagctggagcagatcaaagggactctggagcgccgccgctggcaggctcaggagagcgaacagcggaaaaatgacctggtggtctatctggcccacgacatcaagaccccgctcacatcggtgatcggctatctgagcttgctggaagaggcacccgatatgcctgccgcccaacgggccaaatatacccatatcactttggacaaggcctttcggttggaagagctcatcaatcaattctttgagatcacccggttcagtctccagcagattgtgctggaaaaagagccggtgcggctggatgtgatgctggcccagctggccgatgagttttatcccattctggagccggagggaaaagaagtgcagctccaggtggaagaggggctgatcctgatggcagacccggacaagctggcccgggttttcaacaatgtgctgaaaaatgccgccgcttacagcttcccccacacgcccatagagattttgggagagcgggaagagggacaggtgcacatcaccatccgcaatcagggacatcccattccgtctcaccagctggagacgatttttgagaaattctaccgcctggatggagcccgatccacaaaccggggcggagccggattgggcctggccattgccaaagagatcgtcacagcccatggcggcaccatttcggcccaaagcgacagccggtacacggcctttaccattgttttgccggtggaagagctttatgacagccaggaggagcaggaatgaaaaaatgcgggtcatcggcagtggcccaggggatcgggcttttcttgatgggagccatcacccttcccgccgggggattcagtctgtggctggcctttgttcagccggaacaccggacggaaaccatctggggtatcataggagccattttgttttttgcggcctttgcctattgtgcccatcgggtgctgagacggggcgtgccctatgttcagtacgatgaagaaaaactggtgtttcacccatccaaaagggaggagagggccatccggtgggatgagctgcgggaatatgctctgcgtatccgcattgtgccctggctcgggctggtgttttccttttcccggggaaaggggaagcggccctatgaattccccatttattggtcccatcaggggttcggggaattttaccgccagctgaaaaagcgaaacctttggcgggaaatagagtgtttcgggaaaatctgggaatgaaaagagagctgaccgtggggtcggctctctttttgctttgtcaagggaaagagggagtatctgccgcatcttttgggaattgtaaaagagaaaccacatggattttacaaaaaagcctgctgcaccagggcttttggcgaaaagaaaaagagaaaactcctattttacggcctttttacaagggaggatttgggattttacaaagggcttttaagatagagccggtaaaaaggaaaaaagggcgcccggcgcccatccacggaaagtgggaggaatgacatgaacaaagtgatgagcaaaagcaaaggaggaaaagagatggaaaagatgaaacggggcataaaagatctgcccactcttttccgttcatcggccttccggaaaaacttcaaggaaaagctgatggaagtggtgtttttcatcgcggcctgcgccagcatcctggcggtaaccctgatctgcgtctttattttccagggcggctgggctgctgtccgggaaatcggccttgtggaattcttgggaggtaccaagtggaaacccaccgcagacaatccctccttcggcattttccccatgattatgggcagtatttatgtgaccggcggcgccttgatcatcggtgtgcccatcggcatccttaccgccgtgtttatggcccggttttgtcccaaatggcttcaccgctggctgaaaccggcctttgaactgttggccggtatcccttccatcgtttatggcttctttggcctgatggtgctggtgcctctggtgcgtcagtttttccccggcgacggcaacagcatgttcacagcttggatcctgctgggcatcatggtgctgcccactatcatcagcatcagtgaagcggccctgcgggcggtgcccgaaagctattatgaaggcgctctggccttgggggccagccacgagcgggcggtgttcaaaaccatcgtccctgcggccaaatccggtattctggccggcgtggtgctgggcatcggccgtgtcatcggcgagaccatggcgttgatctgggtttgcggcaaccagccccgtctgcccgacagcatctttgaaggcgtgcgtaccatgaccaccaacatcgttctggaaatgggctatgccaccggcctgcaccgccagactctcatcgccaccggtgccgtgctcttcgcctttattctgctgatcaatgcactcttcgcagtgctcaagcgcaaggagctgaaacaatgaacggaaatacacagaaaaaatccctgcgggctgatcccttttccctggtgatgcgggttctggtatggggagcggccctgctcacagctggggttctgctggccctcatcgcttatattctcatccggggcgtgcccaatctgaagctctccctgtttgagctggaatacaacagcgaaaatgtgtccatgttcccctccatcgtcatgaccatctatatgacggtgctcactttgatcatcaccacccctctgggcatcggttgcgccatttacctcaccgagtacgccaagcggggcaataaagtggtggaggtcatccgactggcggccgagactctgtcgggcattccttccatcgtctatggcctgttcggtatgctctttttcgtcaccgcccttcagtggaaaaactccattctggccggttcctgcactctggccatcatggtgctgcccctgatcatccgctccaccgaggaagccctcaaatcggtgcccgattcctaccgggaagccagcttcggcctgggagccggcaaactgcgcaccgtagtgcgggtggtgctgcctccggccatgccgggcatcgtggccggcgtcatactggccgtgggccgtatcgtgggcgagacggcggcgctgatctacaccgcgggaacggtggccaagatcacggccaatcctatggagtcggcccggacgctggcggtgcatatgtatgctctgtccagcgaaggcctgcacaccagcgaagccttcgccaccggtgtggtgctgcttttggtggtgctcatgctcaacgccacatccaatgccattgccaaacggatcacaaaggggaaataacatgaaaaagtttgagatttctggtcttgacctgtattatggcgattttcacgccttgaaaaatatcaacctggatctggaggaaaaacagatcaccgcattcatcggcccttcgggctgcggcaaatccaccctgctcaaaagcctgaaccggatgaacgacctggtggaaggctgcaaaatcaccggaaaggtcttgttggatgggcaggatatctattataattatgataccaacctgctgcggaagaatgtgggcatggtgttccaaaagcccaatcccttccccatgagcgtctatgacaacatcgcctttggccctcgcacccacggcatcaagaaaaagtcccagctggatgaaatcgtggaaaagagcctgcgcaacgccgccatctgggacgaactgaaagaccggctgaaaaaaagcgcgctgggcctttccggcggccagcagcagcggctgtgcatcgcccgggctctggcggtggagccggaagtgctgctgatggacgaacccacttcggccctggaccccatctccaccatgaagatcgaggacctggcgctggaactgaaaaaggattataccatcgtcatggtcacccataatatgcagcaggcggcccgtatctctgaccagacggccttcttcctgttgggcgaagtggtggaatgcagccccacccaggagctgttctccatgcccaaagacaagcgcactgaagattacatcaccggccgtttcggctaagagaggaaagggaaacatgagaaatcgatttgacaaagaactggcgtctctccatgacctgctgatcgaaatgggcactctgtcccagcaggccattgaaagcgccaaggatgcactgctggagcaggatgtggaaaaagccgcccgcacccatgaatttgagcgggaagtggatgagcgggaaaaagaggtggagcgccggtgcctcaagctgctgttgcagcagcagccggtggccagtgatctgcggatcatctccaccgctttgaagatcatcaccgatctggagcgcatcgccgatcaggcctgtgacattgccgaactggccacctacatggccggacagaaatatatcaaaaagctggtggatattcccctcatggccgacgccgccatcaagatggtgaaagagagcatcgacgcctttgtggcccgggatatcgatctggcccagcgggtcatcgcctgcgacgacaccgtggattccctgtttgatcaggtgaaaaatgatctgatcgccctgatccgggaagacgcggccaatggggagcaggccatggatctgctgatggtgggcaaatatctggagcgcatcggcgaccatgccaccaatgtggcggaatgggtagttttctccattaccggccagcataagaatgagagggttctgtaagccctgggaggaaagaaaaaatgagtggatctccgttgatctattgcgtggaagatgacgacagcattcgggagctgatttgctacgccctgaaaagcggcggctatcaggcggaaggctttgccgaaagcggtgatttttggcgtcggatggaggaaagtaccccccggctggtgctgctggatatcatgctgcccggggaggatgggatgcagctgctccacaagatgaaaaacgacgctgcccagcgcaatataccggtgatcatgctgacggccaagaccaccgagctggacaaagtggccggtctggatgccggggcggacgattatatcacaaagcccttcagcgtgctggagcttttgtcccgggtacgggccgtgctgcgccgcagccagcccaccggcgctgagacactgtcctgcggcgaagtgaccatggaccccctgcggcggacggtcacttcctgcggtcatccggtggagctgacatacaaagaatttgaattgctttgctatatgatgcgcaactgcgacattgtgctgtcccgcactcggctgatggagaatgtatggggcttcgattttgaaggggagagccgcacagtggatatgcacatcaagaccctgcggcagaaactgggagccggcggctccatcatcaaaacggtacggggcgtgggatacaaagtgtcccaacgggaatgaccggccctgggaggggtaatatgaaaaagaatatcgtccaatgtctcatcctgatcagcgctctggcggtgcttctgacggccgtgctgtcggcggtgggcttttacaatgtctacgaagagcaggtgcagaagcagctgcgcacccaggcccaggtggtgcgggacagtctggaatttaccgaggatcccctgggatatctggaagccacaaaaaaagcggcaggggatacccgatttaccttgatcgatcaaaacggcaaggtgctctttgactccagtgccgatgcggccggcatggaaaaccatgaggaccgcaccgaggtgatccgggcccgggagagcggctttggggaagccacccgccagtccgagaccctgggacagaagacctactatgccgctgtgcgatgcgaggacggcagcgttctccgggctgcggtggcgctgcaaagcgtctcggcggtgtttgtcaacaatctgcccatgaccctgggcgtcgtccttctgatggtgctggtgtccatccctctgtcccggctgatcacccggcggctgctggctcccatcatggacgcggcccagcagatctccctggaaggggaagaaaatatccccacccggccgatttatgaagagatggaacccttcctcaacaaaatccgggcacagaaggcccagatcgccgctgatttccatcggattcagcaggaacagggcacagtggccatgatcatttccgggatgcgggagggcctgatcctcatcgatggggataaaaatgtcctttcctgcaacgaaggggccatccatttgcttcaggcccacatcaccaccaactacatcggccacagcgtcatgggcctgtgccgggatccggaattcatgggagcggtcaaccaggccgtccatgaccagaaggccagcgagattgtgctggaagtgggcgggctttatctgcgggtctatgtgagcccggcggaaggcgtgccgggggccatgatcctcattgtggacgccagcgcccatatccgggccgaacagcagcggaaggacttttccgccaatgtgtcccacgaactgaaaacccctctgacctccatcagcggctttgccgagatgatcgaaagcggcatggcccagcagcaggatgtggccggttttgccggaagaatccgtctggaagccagccgcctccagtatctcatcgacgacatcatgcgcctgtcggagatcgaggacggttccaacccgggagaatgggaaaatgttcctttgatggatgtggccaaggagacggtggagaccttgtccatcgaggcccaggaaaatggcgttgccatcagctgcggcggagaaccgctgacggtggatgccaaccggaatatgatggaagagctgatgacaaacctgctgtccaatgcggtaaaatacaaccgtccaggtggtacagctcacatcaatgtggaaaagcggggagaaatggcggccatcatggtcagcgataccggtatcggcatcccgccggagcatcagagccgggtttttgaacggttctatcgggtggataagagccgttccaagcagaccggcggcaccggcctggggctgtccattgtgcgccatatcgccgagtatcacaagggttctgtcagcttgcagagccaggaggatgtgggtaccgagatcaccgtgcttctgcccatccaccagaagaccgttcaggatcaataaaataagacaaaaaggccctggaattttccagggcctttttgattggagagctgcgggaaaaattttcttttttcgtcaaccaactggggcggaataccgtctaaacagtacatccactgtttaggaggaaagaagatggaatttaccatggagagccgatatggcaaaaagactctcgcagatatgtcccgggcgctgcggaaaaccacccgaaagaaaagcaaccgccgcagcatgatctgggcctgggtggtgctggcgctcaatctgctgtttttcctgacgcctggagaagagggatttgtgtggaactggaaccgtattctcaacggtgccgcggcgctgctgatgatttttgtcattcttcgccaggatgccatcaacggcttttttgcccggaagcgtatgctcaagggaaatggctacagccgggtgacatttggggaagagggatacaccagcaccactgaaaatgccatgacccagtggagttatcaggcgctggccgccattggcgagtcagaggaaaacctgatttttattctggacaaacgctatgcccaggcctgggagaaagattccctggaagggggaacgatggagcaactgcggcaatttctcacggaaaaaaccggcttgtccatcacacgggtataaaaaaggacggccctgccgtcctttttgtgctgttttattttgattaaaaatcgtactcagattgttgattggtctcttccatcagctggatgttgatctcatgggtggaaccctgacggtagaaggtcagtttcatggtatcgcctgccttgtgtccatcccgcaaggtgcaggcatcggagatgttttccacccggatatcatccacgccgatgatcacatccccggcagtcagacccttggcagcggcatcgctttccggcgccacctgatccaccaggatgccctggggaatgttatagaaggcggcggccagggcgcttacattgcggccgctgatgccggtgaggggacggccggacacatagcccttatcgatcagttcctccacaatgggccctacggtgttgctgggaatggcaaagcccagaccctcggaatcctcgctgctgattttggcgctgttgacgccgatgacctggccgtattcgttgagaagggcgccgccgctgttgcccgggttgatggaggcatcggtttgcagcagaaccatattgctgctgcccacctggatctcccgatccaccgcagagataatgccggcggttaccgtgccgttgagccccagaggattgccgatggcaatggcggcttctcccacttccacctggctggaatcgccgaactcggcggccggcaggttttgggcgtcgattttcagcacggcaatatcgcttttcacatcggtgccgatgagctcggccgcgtaagtttccccatcgtccagtgtgacggcaatgctgtcgcccccttccaccacatggttattggtgacgatatagccgtcctccgacaaaatgatccccgaaccggtgctgctggtggaataggtctggaaactttcggtgatgacccccaccaccgaggggcgcaccttctgcactacatcgcttacatctttcaccacaaagccgccatcgctgttttcgggctttttccggatctccatggaaaaggcagaatcgtcggaagattgggcggagtcggtttcctgggagtcgttgccgcccaaaatagcggtgaggccgttttccgaggaaagatcggtctcggccgatttggaagggacttcgtcaggatcgctgcgcagcaggagatatcccccagcgccgcccaccgccaccagaatggcgcagacggcacagccccggcgcaaccgggcccgccggcgcttctgggccagtacctcctcatagctgcggtaggaagcggcattctggtaatagtgaggggtgttgttttcctggaagtgatcttgggaatcttggggatcgtggcgatggaacataggcattcttcacctcatagggatgtggggatggtaaaacagaattcggtctggccgtcgccgcttttggcgtagatatcgccgccatgacggcccaccagggttttgacgatataaaggcccaggccggagcttgtgactttgcttccacgggaccggtcgcctttgtaaaagcgttcgaaaatatggtcgatggcctctgggccgatgcccgggccggtgttgacgatgttcatctgcatcttgccgcccttggccgacagatagatgatgatcttgcccgcttgatcggtgaatttcaccgcgttgtccgtcaggttgtagaccacctggaagatggcatcatgatcggcggagatctccagcttgtccggaatgtccagcgtcaggtcgatctccttgtcggtgagctgtttttcaaagcccagcacgatacggcgcaccatttcgctgatgtcaaaggtggttttgttcagggcccgctcccccgattccagccgggagacttccaccatgctgttggccagacgggaaagacggcggatttcctccgagatgatctttaggtaatattcctgtttttccggtttgatggtgccgtccaggatgccgtcgataaagccgccgatggtggtcatgggcgtgcgcagatcgtgggacacattggcgatgagatcccgtcgctgggtctccatgttctcgatggcgtcggccatatggttgaagctgatggtcaatgcgtacagctcatcccgccgcttgggcacggccacccggcagctgaagtcgccgtgggcgaaattccgggcggcggctgcgatgttcttcaaagggcgtacggtgctgtctaccatcacataggtgaccaccagtaccaccagaaagacgatgaagatcatcaggataaaggtgctggaaatgttgataaacagcttgagggaggagtcggccgaaagagaggcaaagaccatgcccagcatttgcccatcctctccggaggcgggaatgcccagagtgtaatggggagaggtgagcaggccggagaagctgcccatttcagagaaccggccgtcttcctggatggccttcacagcatcctgggacacctgggtcacatcttcatgggtatagcagccttcgccggtggcgaagaacaaaagcttgccctggctgtcgcagacaaagaggatgccgcccaggttttccgccagattcacgatgctggcccggtacatatcgttgtaggtttgcagactgaagctggagccgatcatgttgggagcggtctgcatataggtggtggtgatggaagaggctcggcgggcggcggagttcagagccgaatcccgctcttcggcggcatagcggctgatctggtagatgaaggccccgcccaatgcggtaaagctgagcatgaccaccagggagtaaatgataaagtttttcaggaaaatacttttcaggcccttcacacactcaccgcccttccatcctggatttcaccctggggatggttaattttttgtctcgaatttatagcccacaccccatacggttttcagctcccatttgtcgctgacaccggacagtttttcccgcagacgcttgatgtgcacatccactgtgcgggtgtcgccaaagtaatcaaagccccacacatcgtccagcagttgggaacgggtgaacacccggttgggggaggaggccaggaaataaagcagttcgatctctttgggaggaatttccattttctgacctttgaccacgatgttgtagctttccttgtcgatgatcaggttgtcgtattccagcttggccggggcgtcatcgtcatcaaagcggcgcatcaccgcatgaatacgggcgatgacttcccgcatttcaaagggttttgtgatatagtcatcggcccccagctccaggccggagaccttgtcgaaggtttctcccttggcggtgagcatgatcaccggggttttggaaatggcccggatctccttgatcacctgccagccgtccatctggggcatcatcacatccaaaagcaccagatctgggtggatgcgcttgaaggcccgcaggccttcggctccgtcggaggcactttccacagtgtagccttcctgctccagatacaggcggagaagttctctgatatttccatcgtcttcgatgatcagcagtgtttttgccataaaaaaggctcctttcccgccgccggatgttccagcggggataaattgggcgaagggataaaaagaacctcccgaaaaagtggaagggtggcgctttcgcttgattttattataatgtgtatcccatttgattgcattaacaaaatgtaaactaatctttgggaaattgaggcctcagaggcccttttcccggcgatggacttgcgggaaacggggagagcaggtataatcgggaagacagaaccacaaaaaggagggtttgagatgaaatggatgatcgcatccgatctccatggggcggcagggtatgtgcgccgcttgctggagcgttttgaacaggagggagcggacaggctgcttttgctgggggatatcctctaccacggcccccgcaatgatctgcccccggaatatgcccccaaggaggtcatcgcccttttgaccccttataaagaccggatcttctgcgtgcggggaaactgcgacaccgaagtggatcagatggtgctgccctttcccatcctggccgactatgccattctaagccagggagaccggctgatctacgccacccatggccatgtgtacaatcccgggaatctgccgccgttgcagccgggagatgtgctgctgatggggcatacccatgtgcccatggataaggaagaaaacggcctgctgtttttgaatcccggctcggtttctatcccgaaggagcaaagtcctcatagctatatgatcctggaagagggaacattgagctggaaagacctggacgggaaaacctatcagagccgaagcctttaaacaaaaaaattccccggatgggggattttttgttgtggtatgatctgagaaatcagtgaatggaagccaccggttccggttcgggaagaggtgcatcctcccggggcattttccggcgcacccagaaatagcagcccagatgggccagggcggtgatgaaccaggacaccgggtaggagacatagagcatggacaaggtgcggtttgcagcaaaaagagtgaagatccacaaaatacgcaggccgcaggcgccggtgagggagacgatcatgggcagaatggaatagcccatgccccgcatgacgccggccatcacatccatgatgccgcagaggaaatagagggtggccacaaagcgcatccgcatggtgccataggcgatcacctgaggatcgctggaatagatgcccagaagctggttgtggaacagcacagcggtgaggcccaggcccaggcccacagcggtgaccagggccaggcacagacgcatcacccggctgaaccggtgatactgacgggcgccgtagttctggctggtaaagctgagggcggtctgataaatggcgttcatgccgttatagacaaagccttcgatgttgctggcagcggtgttgcccgccatggccaccgagccgaaggagttgaccgaagactggatgagcacattggaaatggagaagatgcacccctgcagtccggccggcaggcccacccggacgatctgccacattttgtccttgtagatgtgcagcttgtgcaggtccagatgacagggaccttccatccgcatcagacacagaaggatcagaccggcggaaaccacctgggaaatgacggtggccaaagcgacgccatccacatccatgccgcagacgatgacgaaaaacaggttgagcaccacattgatcagtccggccacaatgaggaaataaaggggacgcttggtgtcgcccactgaacggaggatggcggcgccaaagttatagagcatgactaccggcataccgcagaaatagatgcgcatataggtggcggacatatcgatcacatcgtcgggggtgcccatcagttccagcagaggacgggccaacagcacgcccacggcgatcaggaccacgccgcacagcagactgaggagcaccgaggtatgtaccgcctggctcacctgttctttttcaccggcaccgtagtagcgggccaccagtacattggcgcccaccgaaaggccgatgaacacattgatgatcaggttgatcaaagcgccggtggaacccacggcggccagggcctggctgctggcgaagcggcccaccaccacaatgtctgctgcattgaagagaagctgcaggatgccggagagcatcagtgggaaggcgaagatcaggattttgcccaggagcgggccgcggcacatatccacttcatagctgcgttttgccataatcgatcccctttctttggggcgtcccggggcaaaagcagcggggcgcgaaccgtaaaaattttatgatgaaaacattatagcacggtaaagccaagggggcaaccggcagaaacaggatgaaagggcgagaaaatcccccgtccccctttacgaaaagggggcaaatcggtataatattccttacgaagtcccctccgcccccgggaggaaacggacatgatctatggggagaaatggcggttttattatgaaattaggtatcgtgggcctgcccaatgtgggcaagagcaccctttttaacgcactgaccaacctgaaggcccagtcggccaactatcccttctgcaccatcgatcccaatgtgggcatcgtcaatgtgcccgacaaacggctggatgctctggcagaaatttaccatcccaaaaaaatcaccccggccatcctggaatttgtggatattgccggtttggtcaaaggcgcttccaaaggcgagggtttgggaaacaaattcctctctcacatccgtcaggtggatgtgatcgttcatgtggtgcgctgctttgaagacagcaacatcatccatgtggatggcagtgtggacccggtgcgggacatcggcaccatcaatctggagctggtgctctccgatatcgaagtgctggaccggcggatcgacaaggcccagaaggccctgaagggggacaagaagttcgcccacgaggtggaagtgctcacccggttgcgtcagcacctggaggagggcaacaccgcccgtacctttgcatgcgatgacgaggagagggagatcatcgaaggcagcgatcttctgtcctataaaccggtgatttatgccgccaatatggacgaaagcgacatcgccggggactatcggagcaatcctttgttccaggcggtggaggagtatgccgccactgaaaacagcaaagtgctgccggtgtgcgcccggctggaaagcgagatctccgaaatgtctgcggaggataaagccatgttcctcaccgagttgggctttgaggaatcgggcctggatcgcctgatccgggagtgctacgatcagctgggcctgatctcctacctgacagcgggtgaaccggaggtgcgggcctggaccatcacaaagggaaccaaggctccccaggccgcgggcaagatccacaccgattttgagcgtggctttatccgggccgaagtggtgtcctatgaaaaactgatggaatgcggttcctttgccgcggccaaggaaaagggcctggtgcgttcggaaggcaaggattatgtgatgcaggatggggatgtggtcctcttccggttcaatgtgtaatccaaacggagagcggggaagacggtattacgccctggatgtgctgcgggggctttccatcgttctgatggtgttttaccactggggctatgatctggtgctttatggcctgatccctgcctgggtgctgtacaatcccttgctggatgccttgcagcttttgtttgcttcggtgtttgtggctatatccggagcgtccagcaccttttcccacagcaatgtgcgccggggcctgcggattctggcctgtgcgttggtggtgagtgccgtcactttctggtttgatcctcaggaggccatccggtttggcattctccatttcctggggacggcggcgctgctttatgctttgctggctccggtgctgcgccggttcccccccaatccggtgctgtgccttgtgctgttcttcctgacccgggcgctgacacagccctattatcaggtccatggcctttggtggctgggtttccgccggccggagttttcctcggcggattattaccccttgctgccctggttttttatgtatcttttcggcgtgtggctgggaggatttgtgaaaaggggaaagatgccctcttggttttaccgtgtgcgcctgccttttctggaaaaggtgggaagtcatactttgatcgtctatctgctccaccagccggtgtgcatgggcctgaccttgctgctggtgaagctttgcgggcagtaatattttccgtctgaagagctgaaacagaggaggggtgagcgatgaatgtttccatccatatttccggtttgattttgtttctggccggggtgttgtttctggtgtccgccctcatctcccggcaggtctatctctatgccgccggagcagtgtgcctgatctgcggcctgatatggatgcggccccggaggaagaagaaaaaagaacccaaagagagcggcgctggccggtacctttcctgacagcaggaaaggccagacttttgcagcaatagaaaacgggagaggatggtaaaatcctctcccgttttatgatgtcttattctccttcgatcagagtcatggggtcgatgaaggctccatcccgggtcacttccagatggatgtggggagccatggcgctttcggtggtcatggtgctgccgcctccgcccaccagatcgcctattttcacggtgtcgccctcttccaccgtggcgtttttcatcagcccgcgcagagtgctgataacgccgttgccgtggtcgatggtgaggcaatagccggtgaggtcatcatagaaaacagcagtgacggtgccgtcgcctatggccgtcacctggccgccgtcctcacaggcgatatccacaccgctgtggacccgccagtcacccatggtctcatcctggatcagggtgtcgccggaaaagccccgcagcacctgaccgccctgtaccggattgatgaacttttccgccaccggcgcttccgtctgggcggcgggcacatcctcttccggcagagaagagggagcagctttttcttcctgggtctggggcgcaggaatttcagccgtgctttcctccggctggagggtttcctcttcctccggctgggagatctccggtgttttgggcaccgtgtccacctggctgctgatctgcaaaagctggtcctcttcctcctgatttcctccggtgaagaacaatacataacccgataccccgatggccgcggcacacagggcaaggattatgtaaaatcctttgccggagacgaagtccgatgccttctccatgaatcccgaatgtttttgctgcatattgtagcacctccgcctgtagtattgccttccctgggagggagtataccaaccggggcggagagaaatattttaattttgcagcaaaatttccgtgccgttataataccatttgaggatttcatcaaaggttttgccttccagagccagttcccgggcgccgtattggctcaggcctacgccgtggccatagcccacagtggaaaacaccagggcgctgtcgctggcctggagggtgaagtttgtggagttgagtcccaacagagtgcggatctcagagccgctcacccgcacgcctcccaccagcacatggatgatcccgccggtctggctgcgctgggagtcccggaaccagccttggggaggatcgttgaagttggcctccggatgcttttcccagaacttctgggcaaactcctggggcgtgatggaaacggtgccatagtagttggggcaggcttcttcaccggggctgtccacgctcaccagataaggatggctggtcccccatacatccaaagcgtcctcggtcttgccgctggaagcggcatggaacacggcggcgatggcctggccctcataggtgaccaccatgccgtcggtgctttccaccgcttcccggatggcctcccggtattcctgggcctgatctccccacagggtctgctgattttcttccaggttcacataggctttgcaatgggtgaagtcgtcgcagagctgggcgccctggtgagtatcggggatggctaccccttgttcataggcgttgagtttgtagagagtgtaggtccgggcggccaccgcctgggctttcagtgcctccgggggaaagctggcgggcatctcggcggccagtacgccctccaggtaatctcccagggccagctcttccacctgcccgtcccgcaaaagggtgatgtgaacgcgctcatcgtagctttctcccgttttttccggggaagcggtgggttgggcggccgtctccgcggagggagaggcggggggattttcttctttttcgcctccctccagccccagagtgcacaggggaagagcataaaccagcgccaatgcggcgcaggctgtgagcagagatcgtttcatggcaagttcctcctttccaggtccttttcccatatttattccgaagggaaggcagatatccctgttctttttgccgcctttgtgctatgatggtactgctcacagtattggaaagacccagaagaaggagtatttcaacatgaaaataaagaaattgcttttgtttttgccccctgtggcggcagggctcatcaccgcttttttccggtatcagatggtggaaaaaacggtggaccctcagaccggcattgcgtcctcccacagctggatctatgggatctatttttttgcggctctgatggcgctgttgttcctggctgccagcgttcttttgggaaaagggggcaaagtggagatcaaaggccccggggccatgggctaccggctgctgggagccggagcggcgctgctgtttgttctgtccggcggagcctatttcttctctctggccggagaaaaagccggagccctcacattggtgaaagctctggcggccattctttgcggcggcggtcttctggccggtttgctggccaaaaacaaagagggggagggggccaaagtgtgtctgctgctccctgtgttttacagcgctttttcccttttggtgttttatcgggacaacaatgcaaaccccttggtgtatagttttgccacagagctctttgcttatatcgccgtgatgttcactttgtatggtgcggcggcctttttctttggcaagagtcgtccccggctggtgttctttgcctctttgagcagcatctatctgctggtcaccgtgctgtgcagcgacaatttgctgccggccttcacccaggggcacatccattttaccgtgggggatcttttgtccctgggagctttcctgcttctcagcggcgcctggcttctggccctgcgtctgcccaagctgggagaaaaataaaaatatgtcaaaatagatttccctggaaaagcgattattttagattgtccaaaacctgtatagtcataggaaattgcgtactacccttaatcaattcgcaaaaaccggcgacctgtgcgtcggtttttgcacttctcgagggacaagtgtgcgccaaaggcgtgcacgcagccccttgcaaaaattcgaaaaagtggcgaaagtcactttttcgacatgtaaaaacggcttccctcgggaagccgttttttgatgtactctgtttattttttggggttgatggcctggggcttgatgcctgcggggatggggcacttgtaggtttccccttccaggcgctccaggaactcttcgtttgctttcttgatgatctccgggttttcgatcaggtcaataacagtggcgcccatgaccttgccggcacaattcacgcccttgtgagcgatggaagtgcggttgcaggaggtgaactgccaggaatgacccggggtcttggcggcggtggtcaccacatggatctgcgcggtggggcagttccagctcacatcgcccacatcggtggaaccggcgctggccttgtcataggactggagggacagcaggaagtcgttgagggagacgccgtgctcggcctggtactcggccagctccttgccccaggccttggtggtgccggcagcaccgtccatggcgttgggaccggcttcgtaatgggcgataatctggcgggcaaactcgtgctcttccggggtgtacttgggcacgccgatctccttgaagttttcatacagctgagcttccagcacattgttgggaatggtgttggagcaacccttgataaattccatttccatgcgggtttcggtcatcagagcggcgccctgagcgatcttgttcacccgctgatacagctcttccacctgggagtttttgggagaacggatcagatagagcacttcggcatagggctgcaccacattgggggaatatccgccggcgtccagaatggcatagtgaacacgggcttcatcgatcatatgctcccgcaggaactgcacgcccacattcatcagctccacagcatccagagcagagcggcccagatggggatcgcctgcggcatgggccgaggtgccgtagaagcggtatttcacctggtagttggccagggaggagccgctggttacattgttggtgctggcggggtgccaggtgatggcggcgtccagatccttaaagacgccttcccgggccatgaaagccttgcccgagccgccttcttcaccggggcagccgaaataaatcacagtgccggaaacctggggattgtgctccagatagtttttcacagcgatggccgccgccagagaagcggtgcccaggcagttgtggccgcagccgtgaccggcagcgccgggaaccagggctttcttttccgggcagccgcccacctggctcaggccggacagagcgtcaaactcgcccagaaggccgatgaccggtttgccatggccataggtgccggtgaatgcggtgggaatatcccccacgcccttttccactttgaaaccttcctgctccagcgcttcgcagagcttatccatggacttgaattcctggaaagcggtttcggcatattcccagatgctgtcgttcacatcgtccaaaagggcctgcttttcgtcgatgacgcggatcgcttccgccttattcatggggcattaccacctttatataagatttttgggacacaaaccaacgaatacagtataaacgccgctttcggggatttcaataaccctccggactttttgacaaatcggtgaagtggaaggccgtttttccggcgatttgcacaggggacgctgttgcaggtcatcgggcaaaatgcacgaaaatcgaccaatttttttggcaccgcctccggggacaggtttgatataataaagaacggtgaatatggccctttagggccttttcagaaagggaggaattgaccaatgaacaaatatctggaacgggccaatcagctggtccccgagctggtggaaaaccggcggcatttccatcgtcatccggaagtgcgcaacgagctgtttgagaccgtgaaatatgtgaaagcccagctggaagacatgggctatcaggtgcaggagatctgccagtgcggtctggtggtgctggccggaggcaaaaagcccggcaagtgcatcctgatccggggcgatatggacgcgctgcccatgcccgaggacaccggactggaattttcttcggagaatcccggcgccatgcacgcctgcggccatgacctgcatatggccatgctgctgggcgcagccaagctgctgaaagagcacgaagacgagatcgaaggcactgtgaagatctgcttccagcccaacgaagagacctttggcggcgcaaaggccatgatcgaggccggtgtactggagaatccccatgtggacgccgcttttgccatccatgtgggctccatggccgatgtgggcaccctggactacggcaagggcctgaccatgggttccgccgatggcttcagcatccatgtaaagggcaagggatgccatggcgccgctcccaacagcggtatttcccccatcaacatcggggtacatatctatttggctctccaggagctgctggcccgggaggtcaacccggccgagcagtgcaccctcaccgtgggctccatgctcttcggcgacggggccaccaatgtaatcccctcggaaggcgtgctcaacggcaccatgcggggctttaacgccgagctgatcaatcatctccgccagcgtgtggaggaaatcagcgtgggcaccgctcgggtctttggcggcgacgccgaagtggagtggctcttctcctctcccgccatgtactgcgatcctgagttcaccgacgaagtggtgcgctatgccgccgatgtggtgggacaggatcggatgatccccaaaaagagccgggccaccggttccgaggactttgcgtactttggcgaaaaagtccccagccagatcttctggctgggcgccggtgtggatgacaaaaccaagcggatttccaaccacaatcccaaagtcctgttcagcgaggacgctctgccctatggtgcggctgtgtatacccagtgcgccattgaatggctgaaagagcacaaataacttttcagttaaaaaaggagacaggctgcggcctgtctcctttttgtcgttttttacagtgccttttccgggaaatggagctgacgctggggataggggatatggaagccatttttctgcaaagcgtctttgatggcctcatacagatcacagcgggcagggatcatatccccaccggggacccaggcccggatgcgcagaatgacggcgttgtctcccagttcccacactttcacaaacaccggctctgtcttgtctatccggggatcggcggagaccacctgctcgatgagctggcgggccgcggcagagtcgtcctcatagccgatacccaccgtcatttccagctggcggcggccttcggcggaatagttgatgatcttgtccttgctcagctggccgttgggcacatagatcagcttgttgtcaatggtggtgagggtggtgtggataaagccgatgagctgcaccgtgccttccacgccccaaagctccacataatctcccaccttaaagggcttggtgtagaggacaaacagtccgccggcgatgttggaaagggtatcctggagggccagggacagagccaagccgaatacgcccagcaaagtgacaagggatgtggacgaaatacccagctgtcccatgaccatggtaagtaagatgaaatagagcaccaggcggcaggccgtgatgagagtgtgggaaatgtgggcatccaggttggtgcgattcagggcccggcgcaccagtttcagaatcagccggatgagcacatagcccaccaggatcagaatcgctccccgcagaagggcgtctatgctcaggcgggagagggtgtcaaaaaggggttccagactggtcaatggtttttctcctttcgattcaaccaaaaattgcggtgtattctttcataatatacactaaaattcagggttttggcaagatttcgtggacaagttccacagactgcggtatgatagaaccagcgggaaaaagggaagatgctctgccgtgaggcggaggccttgcctgcatggcgtaaagccattgattttttttaaaaccggaaaaggagactgagcagtatgaaaccgatcaaagttcctgactttgccaattacaaaatgctctccaacatggaattttctcctgatggaaagtatggcgtgctctgcgtttctcaggccgatgtggaaagcaacagctattacacaaacctgtgggcctttaacaccaagaagggcgctttccgacagctgacctctggcaacagcgagcgttcctttgatttcaacagccccaaatcggtgattttccccggtgtgcgggccgaaagcgacaagaaaaaggtgcagaagggcgaaatgctcaccgtcttttatgagatcagcctggagggcggcgaagccaaggagctgttccgtgtgcctctcaacggcgccacagccaaaaaagtgggcaaggatctgtatctgatctctgccctgtttgacaatgcccgtccggattttgccgccctcaagggggataagctggcggcggccaagaaggcctgggaagaggaaaaggactatgaagtggtggatgagctgcccttctggttcaacggccggggctttatcaacaaaaagcgcaaccgtatctatctttataacgccaagaaaaagaagctgcaggccctcaccgagcccctgtttgatgtgggcggcgtgaagttctgctctaagtgcggcaaggtggcttacaccggccacaccttcaacgcccgtcgggcccagagcagcgccctctatctctatgatgtggagaccggagagaccagctgcctggtggaagacggcacctacagcatcggcaatttctgctttgataacgcccatggggagatcgtcttcagcgctaaccccatcaaggacggctatccggccccgggcaacaacctgtatgccgtgtccctcaagggcggcaaggtggaagccgtttacgaaggcatccctgaggagctgggctgcaccaccggctgcgatgtacgctatggcggcggcaactccatgaaggccgtggacggcgtgctgtatctggtcacctcctatgacaacaccagcggcctgtgctctttgaagcggggcgaaaagaagctgcatcatattaccgctcctgcctttggcgtggacttctttggcgccagcgaaggacggttcttcaccgtgggcctcaacggcaccaagatccaggaagtctatgaagtcaatgtggagaacggcgaatacaagcagctgagccagttcaacaccgctttcttcaaagacaagtatgtggccgagcctcagcccctgtcctttgtgaacaaggatggcgtgcgcatcgacggctttgtgctgctgcccatggattatgacgacaagaaaaagtaccccggcatcctggagatccacggcggtccccgcaccaactactgcggcggctttatgcatgagatgcaggtcatggccagcgccggcagctttgtgttcttctgcaaccccagaggctcttccgcccggggcgaggaatttgccgacatccggggcaaatacggcaccatcgactatgaggacctgatggccttcaccgatgaagtgctgaagaaatatccccagatcgacgagaagcgactgggcgtcaccggtggttcctacggcggctttatgaccaactggatcatcggccacaccaaccggttcaaggcggcggcttcccagcgttccatctccaactgggtcagcttctatggcgtgtgcgacatcggcccctggttcggccagcgggaaatgggcggcgccactccttggaataacctggaaggcctgtggagagcttctcccctgcagtatgccatgaacgccgagactcccaccctgttcatccattccgatgaggactaccgctgctggctgcccgaaggcatccagatgtattcggccctgcagctgaagggtgttcccaccagaatgtgcatcttccacggagagaaccacgagctgtcccgttccggcaaacccaagcatcgtattcgccggatgaacgagatcaacgactggctcttcggctacatcatggaaaaataagcgaagcatttttgggcattgtgtttcggccccgggtgcagcgcacaaaatcaacatgaaaaaagtccctcctgatcaggagggactttttgtatgccggattgcgatcaactaaacctggttctgttgcccagcgcggcagcggcggggtgcccccgctgccgtttctctctttgccattgccggttgtatttgcctgggcaaagaaagttttgggtgcagcgtcacgctgctttttgagaaattgcagccaaccaaacccggttctatttcccagcgcgggagcgcagtatgggtgcagcgtcacgctgcctagaagttcaggatttcgatggcgtccttgatggtcttttccatggcctcgtggccgtatttgtccacatcggccttgctcttgggcccgtgggtgatgcagcctgcaccgccgatgcagccactttcgcaggccatgccctcgatgaagttgttgggcagcacattcttgctggcccggagcagggcggctttgcattcggtgatgccattgcaggaaatggcgttgagggtgaactcctcaggggagatgccacattccttcaaggcctcttccaccgccacggccagaccgccgctgcgggcaaagacccggccgaaataggaggcgttgtccagagcctcgccgggaagggaggtaaggtcgatctccttgctgtcgaagagggcctgcaattcttcaaaggtgaggacgcagtccaccagatccttcacccgctcctgcttccgctcggcttttttggcggtgcagggcccgatgaacaccactttgcagccggggtgaatgcgcttgatgtacttggcgatctcgcccatgggggacaggttgtgggagatgtgctgggccatgtcggggaagctcttgcggatgtaatccacaaaggccggacagcaggaactggtgaggaacttcttttcggccagctcctgcgcctcccgccaggccaccatgtcggcgcccagcgccacttccaccacattgaagaagcccagggccttcaggccggagaccacctgctccactgtggcatgatggaactggctggagatggagggggctacaatggcaaagacctggtatttctggttgttttccgatttctggatcaggtcgatgcagtccagaataaaggacttgtcggaaatagcgccgaaggggcactgatagacacaggcgccgcaagcgatacacttgctgttgtcgatggaggcctttttgttttcgtccatgtggatggcgcccactttgcaggcgttttcacagggacgggaggatttgacgat

SEQ ID NO: 1492 - DNA, 14721 bp, Unknown
  16S sequences of unknown bacteria
gctgctttgccaaaatcccgacacctttatgtgggtttctcccgtgccgcggcggcttcttgacagatacgggcttgtgaccgtcgaatgcgtcgataacaggcggatttataaggatctgcttattcggcgggaggactataaattaagcgagcttgacaagctttttgtcgagcagctcataaaatccaaacgggaaattttttcggcggaggacaaataatggattacaataccgctgttgaatacactcattcgctgctgcgattcggcagccgtcccgggctttcgagaataacggcgctgcttgaggcactttcaaatcctcaaaaaaagctgtcggccgttcatgtggccgggaccaacggaaagggctcggtatgcgcctgcctttcggcaatatttgaaaagaaggggcttaaaaccggcctgttcatatctccctttatcaccgatttcagggagcgtatgcagataaattcgaagtttatttccaaggtggattatgccgccgcggcaagtagggtgagagaggcggccgagagccttcccgccgagctgtttccaaccgaatttgaatttgtgacggcggcggccgttttgtggtttgccgaaaagggctgcgacattgttgttctggaaacggggcttggcggacgtcttgattcgaccaatgttttggaaaagccactttgcacggttataacctcaatttcaaccgaccatacggccgttctcggggatacgattgacaaaattgccgccgaaaaatgcggtataataaagaaaaactgcccgcttgtcaccacggctctgcagccgacggcggcagcggaggtcataaaaaggacggcagaggaaaaagacgcgcccctttatgcggttgacccgacaaaggccgaaatccttttcgacggtctttcgggcagtgattttatctttgagggaatgaacatacatcagccccttgcgggagaatttcaggtggaaaacacctgtcttgccgttcgtgcggcgaagcttgccgtcggcagtcttaccgaggacgatataatcgagggacttaaaaatgtccgtcacccggctcggtttgaaataatgtcaaaaagcccgcttataattcttgacggggctcataacgacggcggcgcaaaagcgcttgccgagtcgctgaaaaaatatctgccgagcggacatttgttcggaatttgcggaatgcttaaagacaaggaatatgaaaaggcgctttctcatctcacgccgctttttgacgaaataatgacggtgactcccgaaagcccccgcgccctccccgcagaggagcttgcaaagagccttgagggcaaggtgaaaaaggtctgtgccgaaaagaccgacgaaggacttttgcggagggcaatcgaggcggctgcgggacgtccgctgataattttcggttcgctctatcttgcgggacaaatgtataaatactttgaataacaaaagcccgaaaagcaaattgttgcttttcgggctttttcatgttttaatcagaattttcccttgctttcgaggcgttcgcagcactcgtctgccttgggctttttgggaagctcgggagcgggagaggtggcgtctccgagtcccgtcgtctcggaaaagaggacgtttgccttgacggcgtttaccgcgtcggtgggaatgatgatttttgcggcctttccgtcggaaagctttataagcgattcatattttttaagctccagcacggcggcgtcggggcaggagtccttaagcatacgaaggccctcggcctcggcctctttggcaagcttaatggcctttgcctcaccctcggctcttgcaattcgggcgtcgcgttcgccctctgccgcaaggatcatggccgccttgtcgccttctgcgcgggtgatggccgccgccttgtgagcctcggcctcaagcagggtctggcgcttgtcgcgctcggccttcatctgcttttccatggcgttttgaatttcggtggggggaatgatgtttttaagctcgacacggtttaccttgattccccatttgtcggtggcctcgtcgagaattgaggtcattttgccgtttatggtgtcgcgggaggtgagggttccgtcaagctcaagctcgccgacaatgtttctgagcgttgtggcggtgaggttttcaagagcgcttatggggttaacggcgccgtaggtgaaaagcttggaatcgaatatggtgtagtaaacgacggtgtcgatttgcatggtgacgttgtccttggtgatgaccggctgaggcggcgagtcgagaacgtgctccttaagggttatacattttgcgattctgtcgaaaaacgggattttaacgtgaattcccggaccccaggtgtgcttgtattttccgagacgctcgatgacgaattccgacgcctgcggaacaattctgatgtttaccgccaaaagaattatgacggcaagggcgactatcaacagaacaattgcttcaactgtaatatccattaaaaattctccttttttctttaacataacatatattatttcaaaaagcaagaaatttattgcaaaaagacaggctctccgacaaaatgatgccgaagagccgtctttggagaataaaagaaaaagaagaattaaaacgaaatgttaaaatgaagagattttacccaccgaatactgaagtataagcagggcgtcggttgccgtgatgctgccgtctttgtccacgtcggctgcattttgccgtgcgctttcaagggtgattttgcccaccgtggcctgaagggcaagcagagcgtcggaggaagtgatgcggccgtcaagatttacgtcgccgagcgcataatcgtcgtcgccatcaagagagctgtcgtcaattacaatgctccactcggaggtgtcggtcacgtcgggggaggagtaaataacataattgatgtttttaaccaccttgattttaaagaccgtttcgccgttttgcaaaatgttaacggtttttcccgacgcggcggaggcccttgaggtgatatagccctggctgtttctcggaacggttgtcattgcggaggagcccgcaccgaaaaccgtggcgccgtctatcgtgagggtgccgtcgcagtcgagaggttcgttgtcgccgccggccttcatgccccatataacgaggctgccgcccagcagattgaggtcgccgttggagtcaagtccgtctccctcggcgttgacgaaaatttcaccgccgtagatgtttatggtatagtcggacgaaccgccctgacctggagccgaaccgccgtttcctccgggattgcctccggggccgccctgaccgggacgtccgccgccggggttaaatccgccgccggcagggccttggttttcgtcggaaccgccggctgcgttaatgccgtcgtcggagcttaccacgcttatgtttcccgaataaacgttgacggttcccgcttcaagaccctcatagcaggtgagaatgttaatgtttatcagcgaattgtcggcgtcgttttgccccacgtcaagggtggtgtcggcatgaattccgtcgtcacctgttttgatttcgaaatcgccgcccgttatgcaaatatagctgtcggaatgtatcgaatcgtcggccgtgttaaggacaaatcttcctccgcttacggttatcgagtttgtgctgtcctcggtgtcggcgtcctcgtcggaggaaaaggaggcttttatgcccttgcggctgtcggtgtcggaattaaagctctcgtcgtcatatcccgtgcccgttgtgatgtcaaagctgccgtcggttattgttatgtcctgagccgactgaattccgtcgccgcccgcgtttattgttatgctgccgccgtttatgtaaatctgagcggcggtgccgtcctcggctgaaaccgcgtctgggtcggtgcgtattccgtcgcccgacgccgtgatgtttatgcttcccgagtttatgttgatgatattgtcgcaggaaattccgtggtttgccgacacaatgttaagggtcaggctttcaatcgtcaaaacacccgatgtgccgagcttaatcgcgtttttggtggcgcagttcaaattgagaacgccctttcccgtgagggttatgtttgccgagacttttcctttgatgaccgccgattcggcatatgcggcgttggtgccgtcaccgccgtctgacgtgtcgccgtaaaggtcggcattgttaagctcgctgtccgacagggtgttttcaaagccctcaagagcgttgaccgtgaccttcgcaatgccgacggcactgtcgtttgccgtcacggtaaccgtgtctcccgccgattcgacggttacaagctcgctgtcgcaggaggccgtcataacctctgtccccgtgatgaccgctccgctgtttttgcacagcgtgatttgcggatcgaaaccgctctcatcctcggccagacaaaaaggtacggccgaaaaaatgagaaaaacacttagcagtaccgataacggttttgaaaattttttcatctttctcactccttaccgtgccgcatcggaatttgaaccgcggcacctgatttctgtatataaaataaccccttaaccttaaagaaacttaaaggttaaggggaaaatataaaatattttaaattttatcccgcaaggccttcggcaacgcccatcagaatgattcccgtgcccgcaaggccgatggaaacatactgaacgggggtgagcttttcctttataatgattcgcgcccacaccaccgagaagaggcagtaggaggagatcatgggagcggcggcaatggtgttgccggcaatggcatatatgtaggcaaactgtcccgccgtttcgcaaatcgcgccggtgagacggaattttccgcttttgaaggtgaatttctcacgctttatgacgtaaacgaagatgaagcagattatcgccatgagaaggaaggtcagctcatatgcgatgttggcgctttcctcggacagcacgcccgaaacgacgttgccggcgtcgtcctcttcaataaggagcattccgtcgaagaaggttccgagggcgtcgattatacagtaggttatggggaggaaaatggcgataaagctgtgagtgtatttcttgtcgattttttcgccctgcaaaagacggtcctgtttttcgtatttgcgttcaagcaccgaaagcagaatgataccggccatgataaagcaaacggcaacgatttgaagggccgacagctcgtccccgaggaagaaatagcacatgacggccgccaccgcgcccgagcagttgcatatgggggtggaaaccgacagcacaagatagcgcagaccgatatatccgattatcatggaaagaatatacatgctcgaggcgggcaggtaggttatcatgtcggaaagtttgaattccgctccggtgagcagctctattccggcatgaattcccatgacaagaccgacggcgatgacgattttccattgggtgtatttttcgtttttgtccgaacccattttcgtaaacaggtcggaagcgctccaaaagaagattgcgacaagcgcaagtatgaaccacataaatattattcctttgctattattttaaaaagctccgccgctctgtccttcatgtcggaaagatagagccagccgaaaagcgcctcaagccccgtagccgcatgatagtcggcggaggaggcgttttttgccgaatggggagggtgggcgtttctgccccgcttgaaaatcgcaagctccttttcggagaggcaatcggaaattttccgaaaggcctcggcctgagccgccgcctttaccatttgaaccttgcgggaattaagctccccggcggggcggttggcaaggcaggcaagatactctctcacaaaaagctcataaacgccgtcgcccacaaaggcgagggtgagggggcttaagttgtcgggattacagttttcacctaaaagtctcataagctctccgaaatcaggtcacaaagtcaaattccatgccgtcaatggaaacggtgtctccgtcctcgacgcccatgtccttaagcccgtcgattatgccgctgtctctgagcacgcgctcaaaatactgaagcgactcatagtcgtcggggtttattgtcgacatgattttggaaagccagggtgcgtcgacaacatatatatcgccgtcctttgttatttcaaacctgttgcgggcgatttcggtttcgggctcgggatcgggctcaaagcgaactaccgggggaagggcggacagcatggcggcgattttgttgactatttcccttgttccctcgcatatgggagcggtcagctcgaaaaactcatagcctttttgttcgacataatttttaaatctttcgatttgctctgccgaggcaaggtcgcacttgttgcccgccacgatctgcgggcgctttgccaaatcctcgctgaaaacggcaagctccttatttatggcatcgaaatcctcgcagggatctctgccctcgctgcccgaaacatcgacaatgtggagcagcatacggcagcgctcgacatggcgcagaaattcgtgaccgagccccacgccctctccggctccttcgataagaccgggaatgtcggccataacaaaggatgagccttctccgaggcgcacaacgccgagcacgggggaaagggtggtgaaatgatagttggcgattttcggtctcgcctcgctgaccaccgaaacaagggtggatttccccacgttcggaaagccgatgagccccacgtctgcaagaagcttgagctcgagctgaacctctttttcctcaccgggtacgccgcttttggcaaaacggggagcctgccttgtgggggtggcgaaatggctgtttccccagccgcctctgccgccccttgcgacaactgcgggaacgtcgtcggaaacgtcggcaagcagccttccgctttcggcgtcctttacaagggtgcctctcggcacgcgtattataaggtcggcgccgtttttgccgaagcagcgttttccgccgccgggcaggccgttttccgccgtgtattttcttttataacggaagtcggcgagggtggaaagattgtcgtcgggcaggaaaacgatgttgccgccctttcctccgtcacccccgtcgggaccgccggccgcaacgtatttttcccgtctgaaggatacggctccgttacctccgtcaccggcttttattttgattttcgcaatatcaataaacatttgaaattacctttcgggcagaataaaagggcgaaaccgcaaagtccgccctaaaattcatgtcaacaaagattattgttcgaccgaataaacgctaacacgcttgcggtcacgtccgacgcgctcgaactttacctttccgtcaatgagggcaaaaagggtgtcatcggaaccgcggccgacattttcaccggcatggatgtgggttcctctctgacggatgaggatgttaccggcggtaacaaactggccgtcgccttttttaagaccgagacgcttggactcggaatcacgtccgttcttggtggaaccgacgccctttttatgagcgaaaagctgaatatttacattaaacattgttttttcctcctgttaaagttaatttgcaaaggcgaaaattttcgggatattgccgccttatgtcggcaagctgaaatccgagagcggtaaagacactttggctcagctcatcgggagctttcacaaaaaccctcattttgccttcctctatgcttattttcgcattttctccgtcaagggaaataatgtttgcggcaaggtatgcggccgaagaaagagccgcgcagactatgtcgttgccgacacttccgtgaccggaatggccgctcatgacaaagcccttataaagtccgttttccctcaacaaaatcgcggcggtcattattttacgccgtttatggaaacgatctcaaccttggtgtaaggctgacggtgacccatttttctcttttcgtttttcttgggcttgtaggtgaaaacggtgatcttcttgcccttgccgtttttaacgaccttgccttcgacgggaatgtcgagggtgggggctccgacctgaactccgttgtcgtcgcagaatgcgagaaccttgtcgaatttcacggtttcctctgcctgaacgtcaagcttttcgatgtagataacgtctccgttagacaccttgtactgctttccgccggtttcgatgattgcgtacattaaaaaaactccaatacaatagactcgctgtcagccggggcggatttaacacttgtggtaatttttgcagagcaaaaactaccgcccgtaacaagcggctttgttagtgtaacacaaagagccgcgtttgtcaagaaaaaataccgttttcagtcgattttgccccttttccattgacttgacggagcaaatgctatattatatgtatgctttttgagttttaaggagggaatctttatgtatctttatgagactcattgccacacaaacgaggccagcgcctgcgccgtgaattccggacccgaaatggcgagagcctataaggccgggggatatgcaggcataatggtcaccaatcatttttggagaggcaacaactgcattgacccgaatttgccttgggaggagtgggtgagagcctactgtgcgggataccgcgccgcaaaggaagagggagacaaaataggcctttcggtgtttttcggccttgagaccaattttaaggccaccgaattcctcgtttacggaatcgacgaggagtggcttgtgacccatcccgaaataaaaaccgattcggttgaggaacagtataaaataatcaaaaacgcgggaggaatggtggttcacgcccaccccttcagaatcgtacacggaattgtggatgaggtgagactttatcccgattttgtcgacgcggtggaaacgcgaaatgcttcccattcaaatccgaattgtcataagccccaaagcgttccgcagtttgacgttgacgcggccgcatatgccgaaaagcacaaccttccccaaacggcgggcagcgacaatcacgacacaaatatgcttgacggcggcataggggtggaaaagccctttgaaacggtttttgattatatggaaacggtcatgaaacgccgtccctatgtgctttttgacggaagcgaaaaaagctatccgcagaatttttgagattgaaattttcgggaggaattgttatatctaccgcatcaacaaaaaaaatgctgggcaatgtgctgcttgctcttgccgcatttatatggggaacgtcctttgtggctcaaagcgaaagcgtcggccttgtggagcccttcacctttaacgggtcgcgaatggtcatcggctcgctttgcatactgccggttgcgctgctttcgtcgcgaagcccgaaaaattccgacggccccgtcggtcacagaaagcccaacaaagcggttctcatcggcggaattatatgcggagccgttattttcgtggccgcaaatcttcagcagttcggaattgaaaacggaaccacggcgggaaaatccggatttataacggcgctctatgtcgttatggtgcccgttgtcagtatctttttaaagaaaaagccgcccaaaaccatatggataggcattgtgcttgccgttttcggtctttatcttctgtgcgtcaaaacaggcgatggcagcgcaatatgtatcggcgacgtcataacccttttctgcgccatggcctttaccggtcatattctcgttatcgattatttttccccgaaagtgaacggggtctggctgtcctgcatacagtttttcgtgggcggagtgctgtcggtcgtctgtatgtttattttcgagcacccgtctgctcaaaacatactttcggcggcaatccccattctttactccggcgttatgagcagcggggtggcctataccctgcagatcgtggggcaaaaatacaccgaccccaccgttgcgtcgcttataatgtgcatggaatcggtctttgccgtgctttcggggtggataattttgggggacgccctgggcgcaagggaaataatcggctgtgtgctcatgtttacggcgattttgctggctcagatacccgccgataaattaaccttaaaaaaatccaaaaatcaattgctttaatacgaaaaatagtgtataataaatcggaaaccgaaaaggagtggaaagaatgaaaaaaataattgcaattatgctcgctttggcatttgtgcttgctttctcggcctgtaaaaaggcggacgacgataattcgggcgccgacgagacttcgaccgtctcctccgccgaggcaacaagcatcgaagccgattccaaaacccaggaatacattgacaatttcacaaacagcaccattgaaaatcccgccgagtctatcgaaatagccggccaaaatgtaagcgcttcggcaggacagagcgttacggtgcccgtcaccgtgaccgaaaattcccgcataggagctctcgatctgaccgtttcctatgacaccgacaagcttgagtattcgggctttgagtcctcgggaaaatctcttgtcaccgacaacgaggttgagcccggaaccgtcagaattgcggttatcgacgcaaacggccttgcggacagcgccctgggaaatctcgaattcaagagcaaggacggcgtttcgggagaaaccaaggttgtcatttcctgcaacacctgcgtcgacgcggaaacccatgctgagcttcatccgaccttctcggatgctgttataaacattggctgattacacttgaaatttaatttaaagaggtctttaaaatgaaaacaaaagcagtaagaatttacggcgaaaacgatctgcgcctcgaggagtttgagctccccgagatgcaggaggacgagatactgctcaaggtagtgtccgacagtatttgtatgtccacctataaggctgccgttcagggcgcaaagcacaagcgcgtgcccaacgacgttgccgagaaccccaccattgtgggacatgaattctgcggcgaaatcgtcaaggtcggaagcaaatgggcaaatgactttaaagagggtcagcgcgtttccattcagccggctcttaacgaccccgaggacatttatgccgctcccggttattcctttaagtatatcggcggagacgcaacctatgttatcgttccaaacaaagttatggagctcggctgccttctgaactacaccggcgacgccttcttctacggctccctttccgagcccatggcatgtatcgccggcggacttcacacttcctggcacaatgttcccggtcatcactatgctcacaaaatggacattgtccaaaacggtaaaatggccattctcgcaggtgcgggccccatgggactcggcgcaatcgactatgccattcaccgcgacgttcatccctctcttctcgttgtcaccgatgttgacgacgcaagacttgcccgcgccgcttccatctacactcccgaggaagccaagaaattcggcgtcgagcttcactatgtaaacaccgcctgcgacgatcccgtgggcgtgctccgcggtctgaccggcggcaagggctttgatgatgttttcgtttttgctccagtaaagcccgttgtggaacagggcggcgcaatcctcggtcacgacggctgcctcaatttctttgcaggccccaccaagaccgaattctcggccgaattcaacttctataacgttcattacgataccgcacacatcgccggcgactcgggcagcaacatcgacgacgttgtggaggtcatctccatgatgggcagcggaaaggtcaaccccgcatccatgatcacccatgtgggcggtcttgacagcgttgtggaaaccaccctcaacctccccaacatcaagggcggcaaaaagctcatttatacccacatttccatgcccctcaccgccattgccgattttgaaaagctgggagaaaccgatcccatgttcaaaaagcttgccgagatcgtggccgccaacaacggactttggtgctatgaggccgagaaatatcttctcgcaaacgccaaatccatcgactgatttgttttaaattaagcttgccgccgaatttttcgacggcaacgcgaattcttatattggaggaactataaaatgaaaatctttctcgacagcgcaaatatcgagcagatcaaaaccgcttacgatatgggcgccatcaccggtgtaaccaccaacccctcgatcatttcgagagaaaacagaaagtttgacgatcttctcaccgacatcaccgcaattatgaccgacggccccgtttttgccgaggttctcagcgttgacgccgagggcatgatcgaagagggcagaaagcttgccgcaaagagcaaaaacatcgttgttaagatccccatgatccccgaaggacttaaggctgtcaagaccctttcttccgagggcatcaccgtctgcaacaccgttgttttctcctcctgccaggctattcttgccgctaacgcaggcgcttcctatgttgctcccttcgttggccgtatggacgacatcggtgaaaacggactcaaccttgttgccgaaatccgcgagatcttcgacgctcagggcatcgacaccaagatcgttgccgcttccgtccgtcatcccgttcacgttgccgagcttgccagaatgggcaccgacattgccaccatgcccttcaaggttgttatgcagatggctaccaaccccaactccgccagagccgttgaaggcttcctcaaggactgggaaaaggttcctaaataatcaaagcacaaaaatcaaaagaggactcactgcgagtcctcttttttgtttatagaattattaaacgatatatctaagagataatcggccgaaaccttaaaaaatttacacagtactctaaggtcgtccatgctcggctcgtatctgtcacattctatataggatatgcgccgttgggtcattcccgttgcttttccgagctcggtttgagtaagccctgcttcttccctaaggttccttattttttcaccaaaggttattttcatttcaatcaccgaaagtattatataatagacggtatctttctattgacttttagatagaaagcgtctataataaacttgcaaaaattgttgaggggaagaaagcttatgaaaagtatggtatgcgaaatgtgcggaagcaatgatattgttaaaaaggacgggctttatgtttgtcagttttgcggaacaaaatattctgtagaagatgcaaaaaagatgatgatagacggaacggtgaatgtacagggcaccgttaaaatcgataaaagcgaaaccgttcaaaaaaatcttatgaacgcaagaaggacatatgccgatgaagattatgaagaggcggaaaaatattatggaatagtgagggaagaacttcccgataatttggaagcaatgtttttttatacttgttgccagctgaaggcaacaagaaacataggaatatttaaaaagaaggcaaatacgcttacaaatacgatccgttatataggtgagcagtatcataatagcgatgatgaaaaagaattgcttaaaaagatgtttagggaaatttgcggaataaaagaggataaatataactatcagctgagtgatgttataaaaaaattaagaaaaacttttttcgaggtgtgcaaagaaatctcaaaaaaatatgatgaagaattcttaaagaagatcgtttcaaaatttgaggctgaacaaaaagaagaaattagagagaaattaaaaggcgagcaaaaggttgaaagagagcggcgatatgaaaagtggggaatgattatcggtgttgtaattgcaatgacagtgtcaattattatttttatggaatttgaaaaagcttatggtacaggtgggggtgctatattatttgcctcatttttaagcttgggatctttacttggcgccataggatggaaattaggaggttatattgcaagaaatttgaattagaaaaaagatgaaaggaggatatgtatgtttgaaaaacaaaacgaaaagctcttgcaccgagaagaaaatgaatatttaaagatttcagaggacggaacagaagcaagcggaatttattttcccaacgcagtacttacctttagagacggcgacagttcggtaatcagctattccgataccggggtttttatattgtttagaggaagcgacatcaattcgaaaaatataatttccgagaaatatcttgatgaaaacagcagaacaattaaggatgtggtttttcaaagcagaaatatggcagcaaaagccgtcttaggcgacaaaggctgcacaaactcttggaaaaacaaaaataaggagaatgcaaaatgataaagaaaataatatctgtctttttaattacggctataattttggggctatgtagttgcggaaaaacatcaaaaagcagtaggtacatatgcagacggtgcggatcaagtaatgtcagagccggtaaccacaatacacaaactggtattcaaaatttttggtgtaacgattgtggctactcttggacaaaatttgacaatggaatgtatggagataaaaacggctatggcttttaaatcttagataatgcaacaaaaatacaaaatttgccctgcacctg

SEQ ID NO: 1493 - DNA, 24603 bp, Unknown
  16S sequences of unknown bacteria
ctaccggctcgcttgacgatcaggttttgcgctccctttacgagcggcttaccctactcctccacagggattcgaactcacgacatatattcagaccgtaatttcttttgttcctataaagattttacgatctttttttatgcctatttttcctccttgcagacgaatacatatcctgttgttatggaatttcacggtgtgggcagaatactcggcccgcaaattatggctgaggtcggagatgttttacgctttaaaaagaaagaatctcttgtttgctttgccggtcttgaggcaccgccgtatgaatccggtaaatttgaatcgcataacagaactatttccaaaaaaggttcacctcatttaagagccgctttatttcaagttatggattgcttgttaaaaactcaacccgttaatgaccctgtttttcaattcatcgaccgcaaacgtttcattcaatatcctccgatacagattctgaatcatctattttttcgacaggcgtacagtcatcaccgcaagcgccaactgtgccaccgtcagaatagcaaatgtccagccaggctccatccgaccacggtaaaaatgaccgtagctgatgattccaaaacatattgcggcaacgatactgcatccgaacacaaccttaccattctttttccttttcattattaaaacactccaatcagaggctgtgtgaaattatagtgattggtcaatagaaacttatctgccagcttgccgtccggcacgggattgccctgcgcatccaccggctccaaaatcagccagtcgtcattgatatgcagatgccgcagggtacatttgcaggctacggtgccgccttccacgcaggcatatgaggtctggaaataacaatggaacgtatccgtcagacgctcgcgcagctcatcggataaaaactctccgcccgtcataacgattaccggagaaatgtgcagccggccacttttctgtcagcatccggcaggggaagcataatcaaaatagtttcatttcttttcgtcattgtccttatttgatgcttcttttatatgacacattcgaccgctttgtttgactttttcagttgtttcgtaccgcccccttgtctccagaaacaaacgcattaaataattgttataatcaaacgtccgcacaatagagcaaagggcttattctgttaagacaacaagcgattgccttcctaattcgatgtatctttggtttaccgttttcttttcatattttacggttttgcctgcgtaaggatcgttgaaataataactgttgctatcatagcccgtaagcacaagacaatgttcgttgccaggccacgtaaaacgctttccgttgcttaagtaccatgaatttttcgggtcaatctccagcatatttatcgttgcccaaaccattacagggatatcgttgtcgatatagtcttcgcaaagttgtgcaagctcagcacctgttgtgtttttaaccctctcggaattaccgaaatactggcaaaatgccttttcaatcacaggtgccatacatccgtaggaagccgcagttcgaggatttcctataaaatactcatatggcgaaggtccgtatttttcccccattcatagtaaaacttggtactttttggcaaatatttatcaataaaatcatcggcggagatattttcttcgaaaaactttagcagcataaccgcacttaacgattcacagcccgtcggaaaatcgggaaactgcgacaaaacggggacgccctcaataacccttgctttttcagacatgtccgcctcgggtatatttatcttgggctctgttttttctggaatatcaaaatcattcacggtaagcggtgacgtgtgcaacgcttccaaatcacaaaaataaatactgtgttttttgcttgaagcgtcgcccgtcacaattaaaagcccgtcgttgttcgtatagcaaacgctttccaccgtatcgttaacatttgcttcagccaccgttttattcttaagattgtaaatccgaagtctgtcgccgctttcaccggaaacggctgtagtaaagccctgttttccgatacctaccgcaagttcgtcagtagagctaaacggaatatattttacaccgcttccggaggccgcgataaagttgtattcggtagttccgagactgtaaaagggactgtatgtgttaagccgcttatcgttgtacacctcggttagagctgaggaatcggcaatatcaatagcaaaaaccgcaccgtctattcctgcggcatagagtactccgttatgaaaaccgagtgattcccggaaggcggttttgtccgcaagcttttttttcgtattgttttgaagattgtagacataaacatcgccattgaacgcggcggtataaataaaatatttttcgtcttcgcttacaccgcatacgggcgaccaaacttccttatccgaaaaggtattttcatatttgagtttgcccgccttatcataaatttgaagagttttttcggacttttccacgacgtaaaagccgttttcggtttgccccgttatccagtctccttccgggaaatttgtttcggaaagaagcttatctgtctttaaatcgtagattgcaaccctcattgagtagatatcaagccctggggtaataagatcgattttcgcagtttctcctatacagcccacatttacaagctcggtgtcaaaagaaattaaattagctgtttgaactatgctctttccgttttcacccgcatatttcccactatcctgctcgggcttcattttaatattatatactgcgataaatgcggcaattaagaccgccgcacaaagcaaaatcgaaactgacctgcgtgtatgtgattttctttttttcatgttcttataacctcttaatacattttttgggggagtaattattacctcttcgcgacaaacctcttcttgttttttcaaaattattgataaaacttagtgaattgtaggcactgaaagagtttttaagcattctcttttcgtttttgtaaagaaatctcgcctaacgctgtttctatcggagacaagcggacaattcaaaaccacgatcaaaacagctttattcctttttgtcatcgttctgtttttctttctttttcttgcccgcgcttcttgcaaaaaatactgccagaaataaaccaatcgcaatccacggcagcgccgcccgaagaaaatcaaataccgcatccatattgtccctatttatatgtaattgccaaatacgcctactgttccgcttggaaaagggagcctgttttctcctaataggtaatcggcgtgcggaacagcgcgctcaagatacaatcggtagaaaacaccgatagcaataccaggcatacagttcgaacggttacgggcttcagcctttgtacaatcagcgaccctgccggttccagccagtagtggaataccagtcccatgagggcgaagcttaccacgctgcgaaagcagatgatcccgttgatgttccaaagcaatccccggtagtcccagagccgcatatcaaagtaacggataccgatgtagccgataatatactctacaattcccgtcaccacggcactgaggacgaagagcaaaaccggatgcttcttcacaggcttcatggcatagatgcccagcgcgccgatgccgtagatgggcagccacgggccgtataaaataccccggttgcgcagcagcccctcagtgatccaatagaagatttcctcatagacccagcccaccaggcagccggtcaggaagatcaaaaacaggtaacacaggcggtctatatttacttttcttcgatcatcatatatacaatcctgcatagtatttttcttccttttgatttctacagccccgcaaacagtctacagcccctctttttaagccagaagtaaagcagggcgcacaaacccaaggttaccgccccaaagaggctcatatacccgataaagccgagcttccagccgtttaagagcatataacctgcacagagcaatacggtatacccaaaaccgctgaagagagcaatcgcaaccggagcgctctgctttatgggggtgatttcgctcgtccagttaaggttgggcattttaagccctaaaaacagcccgaacagcgcggaaaacaaggtatataacatagggacaagcaccgtcaaaagcagttctaagggagtaaagggatagataaaagcgatacaggcggtgcaaaacagcacgggaatttccgtaagaataagctgcatactaagcttgctccgaagcacctgcctcggcgttaccggcagagactgcataagccacagactcttgccctcaagggagaccgagggcgatgtcatatcgttcattgaggcaagcgtacataccaccgcacagagcagtacaggggtacagcccgcccgttcaccgaaaatctcatttaataccgaaattacggctgaaccctgccagagtagcattacgcctgcaatcggcaggagaataataccgagaccgcagttgagcatgtagttagggcttgaagtaaaccgcccaaattcctttgacaaaagtgttaaggcaatgcttttctgctttaccgcagtttctttgtatacctttttagctgtatttcccgaagaagttgctattttaaggaaactatgggaaatcagcgcccacatcagcccaaaaagagccagtatgactgccgatacaatcagcattgcaaaagcgtctccagcccctactctgccgaaaaggtaaagaggataagccgcacccttaattttctcgccgtaaacggcggcgtttgcgagcaaatcctgaatcagagtctgggccttgaaatatagaaaatagtatccgcctataaacgccaaggaaatcacaaccgtgataaagctcttgtttttgagcttgaggctgattttggctaccacccaacccaaggcgcaggataacgtcagaacaaagaccgagataagcagtataagaagcagaccgcctaaaatcacgcctgccgatacggtcgcgttgacccagtaaacaatgaccgccgggagaataacaacaatggaatacataagccccataagatagacggtaagcagtcgggacgccataatcacatttacggaaatcggcattgagagcagaaggtcattgtcttttgagagataaaggcaggagtaggtgttaaacacactgccgaaaacgccaagcagtacagacagcattcccataagtgcaaaatacagccaatccataccggcggcggacagaggagcacacaaagttatggacagatatgtaaacattccgcccaaaagaccagccattatcgcaataaacaggataatgtaaccaataatccctgccttggagcgggctgtattcttcttaggttcatagaagtaattgcggaatatttcagtaagttgttttttaaggagcaattttagcatgattcttcctccagttcaaggaatacttcctctaaagaatcgtcgccctttacctcctccatcgtacccgagcggacaagttttccgcccttgataattgccaccttgtcgcataacttttcggcaacctcaagcacatgggtggaaaagaagatagccccgccttcgtcgcagacctgacgcatcatacctttaagaagatgtgaggctttggggtcaagacctacaaagggttcgtccataataataagcttaggactgtgtagccatgccgcaatgatagccagcttttgcttcataccgtgggaataggcggcgattggctgtgccaaatcggctgtcagctcgaaaagctccgaatatttgcgtatacgctccttgcggtctgcggcacttacgccgaaaatatcggcgatgaaattaagatattttataccgctcatatagtcatacaaatcggggttatcggggatataggcaatatcgcgtttgcagtcaagcggagcggtacggacggatttcccgttaatcaaaatctctccatcgtcaaactgcaaaatccccaccacggatttaagcgttgtggttttgcctgcgccgttgtgaccgataaagccgtagatttcaccgggagcaatatgtaaggtaagatcgtccacggcttttttctcaccgtaggtttttgtaagatgttcgattttaagcattttgttttcctccgattatttttttaattccatgggcggcagcttttgtgccagcccttcttttcccaatagccatagtccggttctaaaggctgtaaatgcttgtgggcaaagcgcatcaggtaaaaccactttttagcccgaccgttgcacccacgcttgcctgcaccttttcggatacggcacgccagacggtctgtctttttatgaattttttgcattattctgttgggtatctcgtcgggcttcaccgcctgtacgccaagccctagcttatataccttacggattccccacatttcgagactgtccgccatatcccgaacggtgcttttcattcctccgccggcggctgtggatatggcgaccgcctgctttccgctcatttgaggcaaaggcctgtgaaccatccaccaagtgccgaagtgatcgagaaagctcatcatttgacccgtggcatggtatacatacacagggctttccagtatcaacagatcacagtcaagaatcgccgtaacaaggggctccagctctttataatgcgggcagtcggataagtcatttttgaaacaggtataacagccaaggcatgagctgttaaaatcccgaggcaggaaaaactcccgaatttccccgccaaccttatttgcaagctcccttgctaccgtacaagtgcttccttcatggctctgtccgtgaataacggtaattttcatcattgtaaacctctcttcaaagttggttcgatattttcggcagtttacatcctatattatacaagattatcccgaaatttcataggtggttttatataaaaatgtgtcgtttttttagatagacaaatttatgtgcgtccccccgccgtattcctctcatataaaaacaatctactttcacataattcggtatccggagcttgtcagtccgaatataaaatcccaaaacaggcttgctgttttacctatcattttgccgttgtctatgatatggaaggacaagattttgttttcctcatcaagccatacagtcttttcttcttcattcatattcttaaattccttttcgtcttttgcaacctatcgttcgttagtcataagccttaaaatcaagcggatgtgccgaacggacacaaccgcgttgctatgcacatagagtttaactgatgctgcaaatcttacattaaatcaccgtgactaccgctgatagcgtttgaaaaactggcggatatgcttatccaccagctccataacctccgtttcccgctccggttcccggtcgcacaaattgatccaaaccgagatcggcagacagaactgagctgccataatttcggggtcatccttatccagaacccctttcagaatcaggcacttgataagcccggtgaaataacccagcacgtctaaataattctgtttcgtttgcaactttgcaagttcaggattttgaaactgttcaatcaccagcattttcctcgccctgcttatagcggaatcgtggagtaaatagcgaatctgtcccccaatcattttcacggcatcgtcgggggtcacaggaagattatcggtgtctttctcccaatccgttttggcaaagatagaatgttccgcatactgttctaacactactctaaccaattcatccaaaatagcctgcttattttcaaaatgactgtaaagcgacgcctttctaatgccgacggcgctcgcaatttgagaaattgaggttgcttcaaagccctgtacggaaaacagttccagtgctgattccaaaatttcttgctttgtgtttccccgttccataacgaaacctcctttactacaactaaagtcttctgtctatattataactaacgaacggtaggttgtcaatagaaaaatcaattgcctgtcaagagatttaaggaaagcaaattaatcaacccaaaaaggtcgacagtatgatgaattgcagtagggaggaaattgtcatatttttttgttataatagtattatattctcaacagacgacaaggaaattaggaattaacaaaaaaactgtaacattttctgccctgtgtagtcataaataaggttgttcaagtcttaaagtactgcgaaaggagaattttaatggcttacagcacaaatagtttatcacatacaaaatggttatgcaatgggaatcagtatatactttgaggaacagcatattgattcgctcaaagaaaaaacgaggcgtatataggcatattcggttcgatagcacaaagcgagagcgaaaacatatgcggcaatgtccgttggggtattttaagaagaatggggaacggcacatactcttctaaaatggatatgttcggttaccgcagagataaggttacaaaagagacatatattgtcccgaagaggccgaggcagtacggctgatataccgatactttttagacggaacgagcacacataaaatcgccaaagagcttgaaaagaataatattaagacctataacggcggtgataaatgtcatcaaagcacgattatgaatattttgcagaacgaaaaatactgcggagatgtgatgtaccaaaaaacatatatcttagattgtatgagtaaaaagcagattgtaaatcacggaaaacgaaacaggtatcttgtttccaacgaccatgagcccatagtaaacagagatttattctatgccgttcaagcagaatttgcaaggcgtaaaaccaaaagaagcacccccgattcagccaaaaccggtatcggcagatacagcagtaagtatgccttttccgaactgttagtctgcggggactgcggcggtcatttcagaagaaagacggttaaaaagaaaaacggcacaatgcactactggagatgcattaaccgtcttgattatgcggataaattttgctcaaattctgtgggctttgaagaaaatgccttaaaggatgcggtgtgcagggctttatccgaaatatttaagaaaagagcaaacggtatggagcttgtaaagagccatttggtatatgttgcctctgccgacgacatatcggatgatttgtattttattcacaaagcgataaacattgataaagaagggtggtgcagttcgacgagggaaactttttcagagcttttgtgcaatcatatccttgatatagccaatgaaaaaggcgctttcggcggaagcattgccgctgttaaattttcgggataagccgaacgctcgtttgcctagccatacagatgactttcccttaggcgggtcttctttgtttattctccgtttttttggcaataatatgaaaatcggagggatgaatcatgaagagaagaaccgctgtgcgggtaatttcattttgtgtgaccgtggcgcttatatttgcgggctttgccttaaagagccgcacggaaacaaagaactataggcttcagatacaaaacgggtattcgcgttcgctcgaggagctgctgtcgggtgtgaacaatatctctgtgattttgaaaaaagccgaatacacaagctctgcgaagcagatgagcaatatggcggcgcagctgcttaccgaatcggaaaatgcgaaaaacgcgctttcgaatctgccgaacggcggtgaacttacgattttgaaccgttttctgtcgcaggtggggaattacgcaatgtcggtttccaaaagtctggcggacggaaaagaaaatgctgaatatgcggagaatataaggctgcttaaaaataccgccgaaaaaatatccgacgcgattgaggaggcagatattacctacggcacttccgacaaatgggcagaggagcttgaccgtaaaataggggagaacgtaccgcaggagtcgcttgcgggggcgctcggttcgcttgaagagagcctttcggattatccgacccttgtttacgacggaccgtattccgatcacattttggaaaaagagccggaaatgattaaaaacgccgccgaaataagcgagcatgaggcgcttgaaaaggcggcggaaataacggggcttaaagcggatgagctgactatggacgaaaaaacctcggggaagatttcagtttaccgtttttcggcgaacggcgctgtcgcggcgataagctgccgcggcgggtatcccgtttatatgcgcaaaacgggtaaaatgggggattttatccttgagtaccgtcaggcgctcgataaggcgaaaagatatcttgaaaaaataggtcttgcgggctttaaggaaacctactatttcaccgacgagggcgtttgcgttataaattttgcctatcttgacggcagaaccgtgtgctacaccgatcttgtgaaggtgggcgttgcgatggacagcggcgaaataatgcttttggagacgagcggatatctttctaaccataccgaccgcgcctttgaaagcccggcggtgacaatagaaaaagccgctgaaaaggtgaataaaaagcttaaaatacggaatatggagctgacccttattcctaccgactcgggcggggaggtgcgttgctatgaattcctttgcgaaaccgaggatgagcaggaaattttaatatatattaatgccgtgacgggtgaagaggagcaaattttaatactgcttaaaagcgatggcggaactcttgtaaaataatacttgatttttttaaaggtttgtggtagaatgataaggctgtttgaaacggaaggtgtttttctgcgccgtttttaacaggtgcatttgatttcacccggccttacggggtgggttcattgccgaaaacgacattgaagcggatggtcctctgtcaacttgttgagtacgaacatctggtattatttaaggaggaagaaaaaatggacgtaatcaaagagcttaccgcagatatgctcaaaaaagacgcacccgaaattcttataggaagcaccgttaaggtacacgtgagaatcaaagagggcgagaaggaaagaatacaggtgtttgaaggcactgttatcgctaagaacaacagcggaattgccgagaccttcaccgttcgccgcgtttcctacggcgtaggcgttgagcgtgttttcccggtacattcaccgaatgttgccaaggttgagcttgttcgcaagggtaagatccgcagagcgaagctttattatctgcgtgacagagtcggtaaggctgctaaggttaaagagcttatcggttaatcaaaaaagaaggaagggggacggtttatactgtctccctttttgctataaggaggtgcgttatggaagacgaaaaggaatttaaaaccgatacggaagtaaacggtaatccggagcctgcggatgaaacaggctttaatataagcgaggaatttgcaagcagtctgcccgacgcaaagcccgaacccgaaaagcgcagtatggtggatgagctttttgaatggcttgacgtgcttgcaaccgccataatatcggtagttattatattcagctttattttccgcgttgcaacaataagcggcagatctatgacaaacacacttcaggataaggataaggtcataataaccaatcttgcctatacgcccaaaaggggcgatatagtcgtaatatcgcgcaatgccgacaattcggtcgaaagcgttaaaaccggtcaggtaccgatcataaagcgcgttattgcaacaggcgggcaaacggtggatattgattttgaacgcggcgtggtatctgttgacggcgtggaattagatgagccatacaccagaacccccaccaccagcaaatatgatgtggaattcccgatttatgtgccggagggatatattttcgtgctgggcgataaccgcaacgattctatggacagccgtgattcccgaataggcgatggcggactggttgacacaaggtatgttttgggtcatgcggtgctgcgcgttttcccgttttcaagcttcggaaggttggataataaatgagcggacaggagatacagtggtttcccggacatatggcgaagacccgccgaaaaataaaggaaattcttccgcttatagacgcggtggcagaggtagtggacgcgcgcgtgccgaaaagctcgcgcaatcccgagctgcgcgatataataggcgacaaaccgcttataattttacttaataagtgcgatatggcagaccccgccgccaccgccggatggatagcgcactattccgctgcgggaatacccgcaatagcgcttgactgcaaaacgggcaagagcatttccgcttttaaggatacggttaaaaatacgcttaaaagtaaacttaaagcgtatgaggaaaagggaatggcgggcaagccgctgcgtgttatggttgtgggtataccgaatgtgggtaaatcatcgtttattaaccgcattgcgggcaacaaccgcgccaaagccgaaaaccgccccggcgttacaaggggtaaccagtggttcacggtggataagcagcttgaactgcttgatacacccggcgttttgtggccgaagttcgaggataaaacggtaggtgagcatttagcgtttaccggtgccgttacagacagaatacttgataccgagtggcttgcaatgcagctgctttcgctgctgtcacgcgaatatcccgaaaaaataacctcgcgctacggcgtggagcttacggacgacagctatgagctgctttgccgcataggaaaaaaacgcggcatgatgattcgcggcggcgaaaccgataccgaaagggcggcgaatatgctgcttgaggaatacagaaattgtaagattggaaatataaccttggaaagggcggaaaaataatgcctgattacgaatttgaaaaagccgcagtaaacagcggctttagctgtatttgcggggtagatgaggcgggcagaggcccgctggcgggtcctgtttgcgcggcggcggtaattctgcctgagggtgccgttattgaggggcttgatgactcaaaaaagctgaccgagaaaaagcgcgaaaagctttacgatataataaaggaaaccgcagttgcttacagcgtggcatacggcacgcttgaagaaatagaaactgtaaatatattagaggctacatatcttgcaatgaaccgcgcaatagagggtttgaccgtaaagccggactttgccctgattgacggcaaccgcgtaccgcgcggaattaaaattccctgcgagacggtagttaagggtgattcaaggtcgatgtcgatcgcggcagcttcggtgcttgcaaaggtcactcgtgaccgccttatgcttgaatacgataaaaaataccccgaatataattttaaaaaacacaagggctacggcacaaaggagcacacagaactgataaaacagtacggtccgtgcgaaatccaccgcctgtcattcctgaaaaacattttggggtgacggctgtggaaagagataaggcaggaaaaaacggcgaacgccttactgcggaatttttaaggagtaagggctgcaccgtaataaaaatgaattatcattcgcgtttcggggaaattgacataatagcggaaacacgggaatatataatttttaccgaagtaaagacccgcgccgaggggagcttaatatcgcccgccgaggcggtggacgcgcacaagcgccgaagacttattttaacggcggaggattttttaagcaagtttgaaaccgatctgcagccgaggtttgatgttgcagaggtgacatataagacccgaagtgacggaagcacgggctacagccttaaatacataaaaaacgctttttaacgcggagtgatgagtattgaattattttgatctgcactgcgatacaccgtatgaatgttattttaaaaatcaacccttttccgtcaataagcttgcggtttcgggcgaaaagggcgcggaatttgaaagctggcggcaggtttttgccgtttggataagggatgatataccggagccctttaagctttacagtgaaataatgcgggatattaaactcaagctgaaagcagctcccaaaaatctgaagccgctttttgcggttgagggcggcgcggttatagggaaggatttaaggctgctcgaagcgcttaaaagcgacagcgtgtgttatctgacgctcacctggaacggcgaaaacgcgatagcgggcggcagcggcaccgataaagggcttacgcgcttcgggcgcgaggtgataagagagcttaaccgccttaaaatctgcaccgatttgtcccaccttaacgataagagttttttcgcggcgatagaacgggcggagtaccccatagcgtcacactcaaacagcagggaaatatgccccgcaccgcgcaatctcaccgatgagcagctgaagctgataggcgaaaaaaacggacttatagggctttgcttttacccgaaatttttgggaggaaacgcgtttgaaaaaatatatgaaaatatctgccgcctaggaaatttggggcttgaaaataatattgcgataggctctgattttgacggagcggatatgtcggatgagctttcggatatatcgaaggtgcctgatttatatgcgtatcttgaaaatcgcggtatatcggcgggaacgcttaaaaaaatattttatgaaaacgctcaaaattattttgacaaactaaacggtatataataaaatatagatgatgctaaaattaaaggagcaacctcaatgaactatgtaagcacaagggacaaaagcaaccgggtctcgtccgccgaggcgatagcgcacggaatatcaaaggagggcggactcttcgtacctgaaagctttccgaagctttcaaatacggattttgaaaatttaaaaaagcttgactatatcggcagagcaaaatatgttcttaaattttttctcaccgattttaccgaggaggagcttgattactgcgtaaacggcgcatatacgggcagctttgatgaagataagcccgcgcctatcgcaaagctcggagacagaataaatatgctggagctgtggcacgggccgacctgcgcttttaaggatttggcgctgcaaatgctgccgtatcttttaaccgtttcggcaaaaaaggcttccgcaggcaaaaaaaccgttatattggttgcaacctcgggcgatacgggcaaggcggctcttgagggcttcaaggatgtggcagacacagagatcatggtgttctacccgaatgacggcgtaagtccaatgcaaaagctgcaaatggcgtctcaaaagggcggcaatgttcatgtttgcgcaataaacggcaattttgacgacgcacagaccggcgttaaaaagatatttaccgataaagaggtggccgagcgtctcaatgagcacaatatgcagttttcatccgcaaattcaataaactggggcagacttgtgccgcagatagtttactatgtatctgcttactgcgatttgctgaaccgcggcgaaagccttgaaaacggatttattgttaccgtgccgacgggtaatttcggcaatattttagcggcgtactacgctaaaaaaatgggtgtgccgataaacaagcttatttgcgcatcgaactcgaacaatgttctgaccgattttataaagaccggcaaatacgaccgcaaccgcgaattttacaccaccgtatctccgtcaatggatatacttatttcaagcaatcttgaaagaatgctgtttgagctgtcgggctgcgacgataaagcggtggcggaaatgcagaacgagcttaaaaacagcggcgcgttttgcgtgaccgatgatatggaaaagaaaattaccgagcttttctggggcggctgctgcgatgatacgcaaactcttgaaactatcgggaatacttataaagactacggctatctgtgtgatactcataccgccgttgcggtgaatgtttacggtcagtatgtaaaggctacgggggataaccgacccgtggttatcgcctcaaccgcgtcgccttataaatttgccgacagtgtgctttcggcattgaccgacgataaggcggaaagtgatttcgataaggtaaggcagttatccaggcttacctctaccgaaattcccgagccgataaaagcgcttgaaaacgcggaaatacgctttaaggatgtatgcgaaaaggacgaaatgctcagcgctgtgtattctgcgctgaaaatctgaatttaattcggaattgaaaatttgattttaaaaaatacccctcagccgcctatcggcgtcagctcccctctgtaaaaagaagggagcctttgggatttcaaaaaaagcctcccctgtgtaaggggaggtgtcatgcgtaagctatgacggaggggttgtttgatatgacaatcccaaaacttttttagcttatcttgcctcgaaggtatcgcagcaggtgtccttgcaggtggacgcttcgccgtgacctacgcgaatcttaccggcggcacacatatcgtccgcagtgtgatgaacgcagttacatacatcgcacgctacgcaaagcttggtttcgcatttacagtctgacatacagtatcaattcctttccgaccctttttaaggtctttattattatgtccgattctgtttaaaaaattaaaaattaaaaggaggaaaagctctgagtatatacggaatttccgatttgcatttatccttcggctcaaataagcccatgaatattttcaagggctgggaaaatcacaccgagcgtatttcggctaactggaaaaggcttgtaaagccttcggataccgttattttaccgggcgatttctcttgggggctgaagttagaggaaacaaaaaaggattttgaatttttggaaaatttacccggcaaaaaaattcttttaaagggaaatcacgacctgtggtggagcacctcaaaaaaattaagggaatttttagatgacaataaattcgattccattgattttatttttaataattgcgccgcatgcgaggggtatgccgttgcgggaacgcgcggctggttttttgacgacaagcccgacccgaaaattttacagcgcgaggcgggaagactggaagcatccttgacggcggcagaaaagacgggcttgccgatacttacctttctgcattacccctgtgtttggggcgacgaggtgtgcgaggaaattttcagcgttataaagcgccacggaataaatcagatctaccacgggcacatacacggcgcgggcgtctgcaaggtaaaaaccgagtacggcggcgtgaaatttcggcttttatcctgtgattgcgttgattttacacctgtttttattgcttaatatataaattttgccgaatttacgaaaagtttaaaaaatgtatggaaaatattatttagttatgctataataatttgaactatgtaaaatgagtaaaatgtgcgtgcgcactgctcgttttgctttacggaggtaaaaaaatgagcttaaaagaaacaaaaaagattgataccaacagatatcagttggaaatcaccgttgacggtgagaaattccgcgaggcaattcgcgaggcttacaagaaaaactgcaagaagataaacgttcccggtttcagaagaggtaaagctccgcttcacataatcgagacctattacggcaccgaaatattctttgaggacgctctcaacctgctttacaacgacttggttgacgacgctataacagaatcgggactcaaggtcataaacgataaaatggactttgaaatggtttccatttccaaggaggacggcgccgatttcaaggtgtccgtaacaacctatcccgaaatcgaaataggcgagtacaagggcttaaaggctgaaaagaccgccgttaaggttgacgccgcagaggttaacgccgaagtaaacgctatggctgagcggggtgcgcgtatggtatccgttgaagaccgcgccgctcaaaaggatgataccgttataatcgatttcgagggctttgttgacggaaaggcatttgacggcggtaaggcagagggtcactcgctggtgctcggctcgggtcagtttattcccggctttgaggatcagataatcggcaaaaacatcggtgatgaattcgatgtaaatgtaaccttccccgaggattacggcgctaaagagcttgcaggcaaggctgccgtattcaaggtcaaactgcatgagataaagattaaagagctgccgacggttgacgatgagtttgcaaaggatgtaagcgagtttgatactcttaaggaattaaaggcagatattaagaagaaggctttggagcgtaagcagaaggctgcggatgaggctgttgaaaacgagctcgttcagcagattgttgacggtattaagggtgagatccccgaggcaatgtttgaaaatcgccttgagcagtgcgttgaggactttgcttacaggcttcagtcacagggtctcaaccttgaaacctacttaaagtataccaattcaaatatcgacgagttcaagaaatccttccgcccgcaggctgaaatgcaggttaagtacagacttgctcttgaaaaaatcgttgagcttgaaaatattactcccgatgagaaggatattgaggagcagtacaagaagatggcggaggattacggtgtagagcttgaaaaggttaagtcggcaattcccgcaagcgagctttcaaaggatatagccgttggcaaggcaatcgattatatcaaggaaaacgcggttataactgaggtcgagccgaaggcaaaggcagaggaagaggaagagaagaagcctgccgcaaaaaaaacagcggctaaaaagcccgctgcaaagaagaccgcagctaaaaagacagaggaaaaaagcgccgagtaattcggtaagctaacactaaagagcgtggcgacttcttcggcacgctcaattgattataagtaccgtcaattgtcaatactaaggcgagagcctaaaaaacggaggtaattagaatggatatgagcttggtaccatatgtaattgaacagaccagcaggggtgagcgctcctacgatattttctcaagacttttgaacgaccgaattataatgctgaacgacgaggttaacaatgcttccgccagcgttataatcgctcaaatgctctaccttgaggggcaggatccggaaaaggatataagcttctacattaacagccccggcggtgcggtcaccgcaggtatggctatttacgataccatgcagtacattaagtgtgatgtaagcaccatctgcatgggtatggcagcaagcatgggtgcgtttttgctggctgcgggcaccaagggtaagcgtttggcgttgcccaacagtgaaattatgattcatcagccgctcggtcaggcacagggtcaggcaacagatattctcattcatgctcaccacattgagcagattcgcagcaatatcaataagatattggcagaggaaaccggcaagccgcttgagcagattcagcttgataccgaaagggataactttatgactgctgccgaggctgctgagtacgggcttatcgacaaagtaatttctaagagatagaggtaccaaaatgcctaacgacagggacaatgaaatacgctgctcgttctgcggtaaaacgcaggacgaggtgacaagattggttgaaggtccgggcgtatatatttgcgataactgcattgaattctgcaacgccttgctcttcgacgatgagggcggcgcgcagaaaaaacgcaaaaaaaagcaaaacgaagagtttgtgctcccgaagccgcaggaaataaagcaaaagctcgatgaatatgttatcggtcaggacgacgcgaaaaaaacgctttcggttgcggtttataatcactataagcgcatttttaaagccgattccgccgatgtcgaattaaacaaaagcaatgttctgatgcttggccctacaggtgtgggaaaaaccctgcttgcgcagactctggctaaaatacttgatgtgccgattgccatcaccgacgctaccacccttactgaggcaggatatgtgggcgaggatgtcgagaatatacttctccgcttgattcaggcggcggattatgatattgaaaaggcagagcgcggcataatctatgttgatgagatagataagatcgcgcgcaagtccgaaaatgcttccataacccgcgatgtaagcggcgagggcgttcagcaggcgctgcttaaaattcttgagggaacggtttcgaatgttccgccgcagggcggcagaaagcacccgcagcaggacttcattcaaatagacaccaccaatatactcttcatctgtgcgggcgcctttgacggaatcgaaaaggttattgagcgcagaatagggggcagcagcttaggcttcggggcggatgttaagtcgcctaagtcgatggaagcagaggctgttgctgctcttgcgactcatagggatctggttaaattcggtatgattcccgagcttgtggggcgtttgcccgttataaccgcgcttaacggcatggataaggaaacgcttgtgagaatcatgaccgagccgaaaaactctattgtaaagcagtacaaggcgcttttcaaaatggataatatcgatcttgaattcgataaaaaggcgctcgaacgcattgcggagcttacaattgagcgcaaaaccggagcgagaggtttgcgctcaataatagagagcgttctgcagccgcttatgtttgaaagtccgtccgattcttctataaccgcaataacgataactgaggaaacgattgaaaacggtaaagcggaaattatgcgtaaggcttcttaaaaaataccgtggcagcgggaatctatcggtttcagctgccgttttaatctcaggcggtgaaagaatatgaccgaaaagttcattttcgtatttgaaatgctcggcgtaattgccacggcagcttcgggtgctatgaccggaataaaaaagcatatggatatgttaggcgttggggtgcttgcggtaacggctgctatgggcggcggaataatacgcgatctgattctcggcgcgcttccgcctgtggcatttgtaagaccgatctatgccggaacggcttttgcggttgcggcggttatgttcttctttcaccgcgcatttcccgagcacagctttcaaaagctgcatgcggcggtatttctgtatatggatgcaataggactcggcgcgttcactgtagtcggcgttcagaaagccattaccctgtatggcttcaagcatatatttctgctttttaccaccggctttttaacgggagtcggcggaggaataatgcgggatatttttgcgggggagataccgggaatattcataaagcatttttacgcatgcgcgtccgtaataggcgccggggtatgtattgttctttggaagccgctcggaaccggaattgccttgactgcagggatttttgtaaccaccgccctgagactttgcgccgcgcatttcaagtggaactttttcagggacagaaatacataaatgattttgaaatatgcaataatatatattacaattttataaaaaacagtttttttaaaaaaaatacttgacatatcaaaaaaacggtcttataattatgacaaatttaagaagcacctgatagaggcgcggatatgatgagtaccctgcggtatacgtcggcaaacggcggtgggggaaaggctgttccgccgaagtagtttttgcggttgccgccgcgggctgctggggtcgcgtttaataggcgcggcactgtcgcaatatttgcggagagctatcatgagtatttgtttttatttattttaaatatcagcaaagcctgtgatgcctttcgggtcgcaggcttattttttaatatttttttcgggagtgttcaaaatgaacagaacagcaagaattttatcggcaatcttatccgttgcccttgcggcaaccctctttgcgggctgcggcggcaaaaagcagaccgcggcaaagtcaggcgtagaggacggtgtgcttaccgtagctatggagtgtgcgtatgcgccttataactggacgcagagcgatgattcaaacggcgcggttaaaattaaggactctaacgactacgcaaacggttacgatattatgatggcgaaaaagatttgcgaggctaacaactggaagcttgaagttgtacgccttgactgggattcgcttgttcccgccgttcagacaggcaagattgacgcaactatcgcgggtcagtcaatgacggcagaacgtatgaagcaggttgattttgcagggccgtacatttacgccagcattgtttgcatggcgaagcaggacagcaagtatgcctccgctaccaagctttccgacctttcgggcggcaagtgcacctcgcagctcggaacaatttggtatgatacctgcctgccgcagataaacggcgcgaagattcaaactgcgcaggaaaccgcccccgcaatgcttatggcgcttgaaacaggcgcagttgactttatctgcaccgatatgcctaccgctcagggcgcgctgcttgcttacagcgaccttaaaattctcgaccttgaggataatgcctttaaggttgatgagggcgatataaacatcggtattgcggttaagaagggcaattcagagcttaaggacaagataaacgcggttttaaaggatatgaccgccgacgactttaattccattatggcagaggctaccaagattcagccccttgccgagaagtaattcgggtgacggaatatggataaattggcccagctttggagcgatatagttgaatgttggggtgacagctcatcacaatatttggtgggagcgcttaaaacaatagagcttgcggtcgttgcaacggccataggctgcattataggtcttgcgtgcggaatagttcagactattccgtgcaaaaagaacgataatattgtaaagcgcatgctcttgggaatcgtaaaggcgatagttcgtatttatgttgaggttttcagaggaacgcctatgataattcaggcaatcttcattttttacgcgataccgtattttaccgacggcgcagtgaatctggaggttacccttgcggcgtatttggtagtttcaataaacacgggcgcttatatggcggaaacggtgcgcggcggtataatgtcgattgatatagggcagaccgagggcgcaaagtctataggtatgaaccactttaaaaccatgctctatgtcatcctgcctcaaacgattcgcaacataatcccgcaaataggcaataaccttattataaatattaaggatacctcggttatgttcgttataggctatgccgagctgttcgcggcgcacaaagcgattgtgggtgctaagtatatctacttcccctcggcggttataacccttacgatttatcttattatgacggttatctgctcgcttattttaaggctttgggaaaagaaaatggacggccctgccaatttcgatgttgccacgaaggatacacttgcgctcacaagcggcacttattcatatgttaaaaagtcggaaaggagcggtaaataatggcggaaccgattttacaggtaaagcacctttcaaagaccttcggcaagcacgaagtgctgcgggatattgatttctcggtaaactcgggggatgttacaagcattataggcgcgtcgggctcgggtaaatccacccttttgcgctgcataaacctgcttgaaacgccgagttcaggtgaaatactttaccacggcgccaatattgataaaataaagggcggcgccagcgcctaccgctcgcacgtgggaatggttttccagtcctttaaccttttcaacaatatgaccgtgcttaaaaactgcatgatagggcagacaaaggtgctcggcaaatcaagggcagaggctaaggaaacggccatgaaataccttgaaaaggtaggaatggagccatatatcaatgctaagccctcacagctttcgggcggtcagaagcagcgcgttgcaattgcacgcgcattggctatgaaccccgaggtgcttttgttcgatgagcctacaagcgcgcttgacccgcaaatggtcggcgaggttttggaggttatgcggactttggcgggagagggactcacaatgatagttgttacccacgaaatggcgtttgcaagggatgtatcctcgcatgttgtattcatggctgacggcgttatttgtgaagagggaactccgtcggatatatttgaaaatccgcagaatcaaaaaacgcgcgatttccttacaagattttttgatagataattaatgtctactgaataattgcattagcaaatgcaattatataaaatcgagttaaaatctcgattttatgggtcaaaacctttgttttgaccgtcagtatccattgattgtcgcctgatttta

SEQ ID NO: 1494 - DNA, 9398 bp, Unknown
  16S sequences of unknown bacteria
cccgattccttgtgtatcaagggaatgtttgctgcgataaaagcgtttaaagataccattaaggccgaaaaggaaaacgggctgtatgggtatgagcgcaccgatgagaaagaaaaaatcactgtgttcctcaacaatcaatctgcctccgcagagattcctccgatgaacggaaagatgctgtggcagcagggatacgaggaaaagaacaacagccttgcccctatggggtttgccgtattcacacaggaggtgtaaaacgtgagcgtgacgattcaggaagtggccgaagctgcgggcgtgtccaaggcaaccgtcagcaaggtgctgcataaatcatattctatatcgcaggaaacctgtgaccgggtaaatgcggtcatcaaggaactgggatatcagccgaatcgtcgcgcgcaaagttttgctaccggcgcaacaaaaacgattctttttttggcagaaatgcagcatggtgtgggatttgacaacccgcatctgtttgaaatcatggccggggtagagaacgcactttccgaaaaagggtatggtctcattgtgcaacacagcacggcgcttgacctttggcaacatttcgatgaactgctgcagggctcctatgtggatggcgtgattctgcacgcatcagtcgtgtcaaaggatgtggctctttgtctggcccacacggaattgccctacattgttgtaggtgcgccggatttctccaaccagctttgctggatcgataccaataactcggtggccgggcaaattgcagttacacatctgtggcgcaacggatacgacaggatcgcattcatcggtggccccaaagaagatacaatttctgcgcaccgtttgagcggcgcacttgccactctgaacgagaaaatcccggcaggatatttgcgggaagggccgcccaccagtgagggcggcgcagcagccgcacgcgccctgttggaactgccaacacggcccaacgccgtgatttgcgcaaaccagtatattgcgtttggctgcgtaaatgaactgaaggcttccggaatacgcatcccggaagatatggctgttatcacatttgacgattttccattttctaaaatcattgaaccgcaactgagtgttgtgaacctcgatatgtatgatatgggtgagcaggctgcgaaagtcgttctgcggcgaatccggacaccgcagtatcttgtacaatcgcagaccacgctgccgatattgatagaacgacaatcgacaaagaagttaccgtaaaggaggtaagtatggccaaacatttggcaaaaaaggcagcgtgccttatcggatctgcagcagttgcactctcgatgacgctcggagcattccctgtgtatgcggattctgctgcatcggctccggaactgggaccagttacgtccaaggatgtcgtctaccagatcatcacggaccgtttctatgatggagacacatccaacaatgttcccgcaggatttgatgcaacgctctatgatggaaccgggcaggatctgaagctctaccaaggcggcgactgggccggcatcatcgagaagatcccttatttaaaaggtatgggtgttacagcagtttggatttctgcaccgtatggtagctgcctcggcaaagggctgggtgttccgttcgcagatgcatcgcctttttataaaactctgccaagggcggcggctcctgcgaccacgtcatttcatggcggtactctgcttcctgtaagccgtaaataccacgctcatcaccataaaagacggacggaatccctgtaaaagtcatctggaaaagcacggcgagctgcattcttgccgggtctttttcacacagagaatagaagcggctcacatcatggctgtccagcagattgagctgcgcgtacagtaccgggagtttataccgcatccgcatattggtcacgcgggcatcgaattctgctgcatcgatattctgttcggcaaagaatcggcggcagtgcttgcggaaatcgtagttcatggtggagtcgaaaatatcaccgttcagccaatgctgggcagtttcccatacctcaccaatcaggatacactccggcttttcttctttcaccgcctgccgaaatgcccgccagaatccgtcgttgatctcgctggcaacatccagacgccagccgtcaatatcaaattcccgcacccaatagcggcccacctcgcagaaatactcctgtacttccgggttgcaggtgttggttttcggcatcatgcgctcatagccgaagcattcataggtcggataggtttctgggtcttccggcctctctacagggaattgcagatggtaaaaccagtttttatattttgagttttcgccattgcgtaccacgtcatcaaaagcgaaaaaattccaccccacatggttgaacacaccatcaataataacacgcattccccgtgcatggcagtcgttgaccaactgtcggaaatcttcatccgtaccgaaacagggatcgatgtgatgataatccagcaaatcgtacttgtggtactcccctgctgcaaaaatcggattcatgtaaatgcaggtagcacccagttcttgaatgtaatccagattctcgatcacgccgcgcagcgttccgccgagttttccgcgtgtaatctgaccgttccactctttttcggatgatttgccagagataaagcggcgacccgtggcaaagctatctgggaagatattataaaccactgcatcctgcgcccaggcaggcggtgctgcaatgtctgccggatggttaaacggcagctggtagtattccgacctgtcgtccacgcggtgatctgtaaagaaatcgccgtaatacagcagcttctgcgttccgtcatcaagttcaaaatagtaacagatccgcttataggggctttccaagatgacttggaagtaatcaaaccattcgtcctgcgcttccacctgcatctctacagacgagaaaataaccggtgtcaggcggcaggctcgatctgcataaaacaacgtgcagtgctttagatcatcgcgcccggcgcgcagccggaacacgacatggtttgggtcaatcccgtgtgcctgctgtgacatcgggacgtgttggatggcttcaaaattcattgtgtcatctccctgtttggggcaatcaacctttgacaccaccggcagtcaggccggaggtcatatgacgctgtacggcaaagaacacaatcagaatcggcaggctgactaccagcgaggctgctgcaaaaactggccagcttccgctcatttctgttgcctgcaaagagtacaatccagctgccagtgtataattctcggcacctgtcataaaggtcgttgcaaagagatattcattccagacataaatcaaaatcataaccgccgtaaccaaaatactggggcgcgccagcggaagaacaatgcgcgtgacaagctggatgccgcttgcgccgtcaatttccgccgcttcctcgatttcgcgcggtatcgtatcaaagtatcctttcatgttcaacagaccaaactcagccatcgttccggtataaatcagaatcaagccaactttgctattgatcagtcccagcgggcgcagcagtgtataaatcgcaaacatggaaaggacagatgggaaagagtacagcagaaccaactgcttcaatatcggcttgcgccccttaaagcgcatacgggaaaacgcataggcagccggaattgctgccgccagcgaaatgacaacggtgactaccgccagcgtcatactgtttttaaaccacagcatgacaggttcttcggtaaagaccgcaacataattccgcagcgtgaagttcttcgggataaaacggaagtccgagctcacaaggctgttgtcggcattcaaagaaaccgacagtgcatacaaaatcgggatcagcgtgacgaaacaaatcacggtgaacaaaatgtgcagacaaatctgcttggctgcctgcttgagcatacgcttttgatgccgcgtcatctgttacccctcctttgctttccggctggtcaccatcgagaacagaatcaaaatagcaaaaatcaaaatggagaccgcagaactgtatccgtaattgtttgtgataaaggcattctcgtaggcataagtcaggatcgtgtggatattggcaccggttttcgcacccgcctgctgtgtcagcaggtataccacgtcgaattgcttaaatgtcgtaaacacggtaatcagcaccgacggagcaataatcgggcggattgcgggaatcgtaataaagtacgcccgctggaaccagtttgcgccatcgagaattgcactctcgtagcagctatgatccaccgcctgcaaagcaccatccataatcataatcataaacggcagcgccagccaaaggttgacaaccgtgcagcagagaaatgccgagacatcgtttgccagccagcgcactgtcgccagccccagcttctgcatccactggttcagcaaaccgaactgcgaattgaagatgccggttttccagagcaggatcgacacatagcccggcatggcccaaggaatcataagcagtgtcttgtagacccgcctacccttaaaatcctgtatgttcaaaagactggccagcacaaaggcaatcacaagttgcagcaccatattctgcacagtccacaggatggtccgaagcagtgccgccaaaaagccggaatcaaaaacaaacagcgcgtctttataattcttcagccctacaaacgagaagttgaaccaatggtaaacattcatgtttgtaaaggagatgtacgccgtgtacagaattgggaatacaacgatcagcaaaatcaaaagcaacgagggggcgctgcacaaataggcccaaaacgtttcttttttatttttcttcatagtgcggcctttccgcattactgcatctgtttgataaggctctctgcctgctgctgggcggcctgtgcgctgcttcggacgtcttttccactcatgtttacatccacaagcagattttccgtaaccgtccacataacgtccatttcgggaacgttcggcatgggaactgcatcctgcgccgtatcgtacatagccataaccatgtcgtcaccgctgataacagggtcatcataacaactctgcttcgcaggggcgcagccgcttgctttcgccatcgcaatgccaacggaatcatttgtcagaacctgcaagacctttgcaatggcatcgtgcttgcgctcagctgcaactttcaagacatggataccctgcacaccggaatacggtgcaattttgttgccggtctcatctacagtaggcatcggtgcaatgccaaggtcaataccgctctcgcgcgccgtaggaaccagccagggaccaccgatggtggagtgcgctttgccttcgcggaacagcgtattcacggtagaatactcaccctcggtgggcataagctccacgaatttcttgtggtattccagcgccttgatggtgttctcatcatcgaggccgggttcaccattttcgttcagaatgtaaccgccaaacgcatggagccagcccgcagcatagtacgccgtgctgtgctgttccacgaagccgtaatgtccgcctttcgtgttttcctgcatatatttgtacagttcttctgtggtcgaaggcacttcatcgtcactcatataacgtctgttgtacatatctcctgcggggcagcgcgggcattttgctccggctttaccccgatgcagtcattcaaccttgattgtggcgtataccgccccagcgcctcgcatatttcacggtaggcatcggcattgccggtacagttatagcgggcatacagtgccagcatcccgcccgccgcgccgcatcggttgcaacgccagacgtttttgtctgtgttgacgttgagccgcccgcgcagatccccgcaaaaggggcagtttaagtacaggctcgacggcagacggcgacggacagtaagccccagcagttctactacatcggcaatgccaaacggaaacgtatcggaagatgaggtcatgcaaaacggcctcctttccggttatcccgcctgtttctcctgcaagctgtcccatataatggcggccgccgcgcggaggacgttgttctctccctgatagcctttcacataccagcgcaggctggcagggcggcggtcagccacctgcgccagcgtccagcccttgcaggtgccgcagtctacgatgacgttctgcgcctgctcgtaggtcatctggcggcagatttcctccaccggggtgctttgggtatacgcagcggcgggaggttcctgttccagcacaatgacattctgcggcggttctgccggggtctgcacaggctgcacggattccagcacaaccgtcttaggcttttctacgacttctgccgttacctgttcgggaacaggcatatcgtctgccatgatggcatccagcgggtcagtctcctgcgaggtggctttcatgacttccggctgcttctgcacaagctctgcgacttccactttcgtctgtaccagcttggaaatctctggttttgcgcccaccggcacctcgctgccgtactcctcggattcactgcccacatcggcaaactggatgccaaagcccgcattggagagtgccgtgtccagcgcttcctcctgcgcagcctccacatacagcccaccaggcgttgcgtccagtgtgcagttggcaacatagctgctcagcggctcggcatcctcgcgggcacggtagatcttggcttcaaaaattgccattttctcggtgatgcgcagggcgttgagcttcagccgccccgtggggcaggccagccggaaccacagctttttgtaccgcaagtcaaggcgcatcacgtcctccccggtcttgcgggaagttgtgcggcgcaggaatttcagtgggtcaaagcctgacacatgatttaaggatgccacagcggcgttggtagtgtacagcataggttcttgattccctttcatgggtgatttctcccttcattattacattcagccggcctgttgcagttccggcagtgcgtttcgttcggtgtggtatgccttgcagtacaggtggatgcgctcgcccagcatggtattgcgcttgctgatgtcagcgcggtgaaccgccataaacaggatcggcttatgccccacaaggatgacttttttcttggcgcgggtcacggctgtatacaataaattacgatacagcataattgtgtgcgccttgacgatggggataatgaccgtttcaaactctgaccccatcgctttatgaatcgttgtggcataagcaaggtcaacgtgcgccagttgttccgtcgtgtaagtcaacttgcggtcgccgccaaaatccatctgcacaagccgttcgcctttgctgttcgtggtaatcccggtaataaaaccgaggtcaccgttggacactttctcggtgttctttgtctgcataacgcggtcatgaacacggaatgtgcggctgccgattctcacttcttcctcggccgagcggaacggattgacccgttcccgaatggcccggttgagctgctcagacgctgcctcccctttttcgcggaacggcgagaggatctgcacattttcaataccacgctcggcggcttccttgcagtaaatatcttggatgcgccgcgccgtctcgatctgcgttgggctgtccacaaacacaaagtcattgccgtagtacagcttggtgctgccctcattgatgaacttcgcgttataggcaatcaagccgtccttcgactggcggaaaatccaatccagtaccgtgacaggcaccattccgctgtggatcagttcatagaacacattgccggcgcccacgctgggcagctggttcggatcgcccacaagaacgacccgcgtatgctgaccgatgcgcttgaaaaactgctgtgccagccacatatccaccatagaaaactcgtccacgatgacaaggtcggcatccacaaagcgaacgcgctcgccatctccgatttcttccccggtgccgaggcccagtgcactgtgcagcgtgcgggcttcgtctacgccagtgctttccgccatacggcggctggcgcgacctgtgggagccatgagggcgaactttcctttcgggtgcaggttcttgaacacctcgatgatggcctttaacacggtggttttgccggtgccgggtgagccggtgataatcgtcagcccatgctgaaatgccgtgcgcaccgcctgctcctgcttttgggaaagcgtaatgcccaggctttcgcgcaccgattccagcgcagattcgatattctcagccacactgatgttggcaagccgctcggcaatcatgcgggcggtgtcatcctcttgcccgaacacacgcgggctgtacaggtactgcttgtaggctaccactgcgccgtgcagaatcatctgccgcagggtttcctgcacttcctcggcgcggacgcgctgttccgggattggaatgggcgcgttgagcagcagaagcgtttcctttaccaaatcttccgatggcaaaaacagatgccccgatttactgcgggcatcctccaacgtgtacagcaccgcgcccttgatgcgctcggcgctgtgcaggcggttgtccgtcttacggacgatgccatccacgcgcttgaatccgaagccggagatctggcacagatcatacgggcattttttgaggatgtccacacacgccggaccaaagttctgataaattttcagcgccgtggcgggcgtaattttgaacggtcccaaaaggctcataaggttgcgcagaacgcggctctcggcgtaggattcctcaatgtccttgagtttgccctcggtgatgccgcggatttgcagcagcttctctggctcgttgtcaaggatattcaaggtatccgggccgaacgtggcgacaatatcctctgccgtcttggggccgatgcccttgataagcccggaaccaagatacgccaacagtccgtccgctgtctgcggaacgatttcctgccactgctcgacttgcagctgatagccgtacttgttctccacccattcgccgtccagttccagctccaccgccttggtgcggggcagttcgtaccccaccgccgtaaagcgcagcatgcggtcgccgtaataacggccgttgcaagcctgtggcgggatgcgcgggtcgctggtcttgacaacgatgatggagaatttgtttgcttcattgtaaaaaatcgtggattcgtaggtgacacggcagccggtgatgccgctgtgttcctgttcactgtcgtgcataggcacgctcccttctttgtcaggcggcttcgtccgccgcttttgccttgatgc

SEQ ID NO: 1495 - DNA, 1831 bp, Unknown
  16S sequences of unknown bacteria
cgcagtcgatataataaatctgaaagacggcagtctttcttcttccttctcacttaagactaaagtgaatcttcatcaggggaagtctcttagaatacgctcgtagtctaaggaaaagaaaattgctttgctctttcttgcgaaagaaaaaggctgagccttactccatatcccacaggatatcgaaaaagttcagccttacctatatcgcgatataggaaaaatttcgcgccgttaattttccctcatcttgtctgccgccgccatgattgcaagtctggcactctcgtacgtcagtccgccctgcatgtacgcgtagtacggctccctcatcggtccgtctgccgacagctctatcgaagagccttcaacaaacgcgcctgccgccattactacctcgtcctcgtagcctgccatctcggaagcgcacgggataacgtagctgtcaatgggcgacgccgactggattccgcggcagaacgcaagcagcttctcccggcttccgcacttcactatctgcacaatgtcgcttctcacgtcgtccggcttcggggaagtctcgtagcctatctctccgaacatatatgacgtaagacaagccgttttcagcgcctgcgataccgtgtgaggtgcgtagaacaagccctttatcatgttgcggttctgtccgagcgacgcgccgatgtccatgccgattccgggagctgtcagacggttgccgcagagacgcacgcattcttccgttcctactatgtatccgcccacgtcaaccataccgccgcccggattcttgatgagcgagccggcaatgaggtcagcgggagcttcgtttacagcgccctcgggaacatagcacggttcggttgtctcaacaaattcgccgtagcagttgtccaccatgaacacgggctttcttattcccatctcacgcgacaccttttccacctcgtatgcggcgcggcgtatctgggacacggtgagtgcgggacggaacgcatagcctctcgaacgctgaacgtaaaccatctttaccttctctccgtgccgtctgatgaactcaaccatcgcggggacgtcaatgggttcttcggcagtgaacgggtcggggagaagctcgagctgtctgtaatccacgccgaggtcacggagcgagccttcggagcttatctgcggcttttcgtctcccgtctgatccagtccgaggacctttgttagagtatcgtagggtctgcccgtgacggagagcataatgtcgccggggcggaggataccgtagagagctactgcgagagtatgagtgccggacaggagtgagggtctgatgaagcctgcctctgctcggaaaatctcggcagcgagcttatcgagagcgtcacgacctctgtcgccggagccgtagccggtagagggagtgaagaaggactcggacacgccgcagcttttgaagcaatcaaggacatgttcggtattggtgcgtgcggtttggtcgatttttgcgaacgtagaggcaagtgcggcttccgcagttttagccagttcgcgggaaaatgttgaaatttgcattgtaaatatccttttgaaacaacttaaatttattcttttggattatcaaatggggttttgcttaatcttttagaaagattaaagtagaaaaggcgttgccttttcagattaattatatgctcctatgcggagggcacacaaggagactcagacgccgtctccttgtgaatctacgctcgcggtttcgttaggctgatatgatacactttatcatcgcccatttgaacagctcagtcgcgcggcaacgcgtaagccttagtagtggcat

SEQ ID NO: 1496 - DNA, 1828 bp, Unknown
  16S sequences of unknown bacteria
ccatttcatctataagcgttgcttttgacgctccgccgccgaaatctatgccgagtaggtatttcaaaatacttacctcctaaataaaaattgaaaacattacgggtattgtaataaccgaaatcaagtgagaaacaagcgccattcccgcacccggcgttgtatcgccgccgtatgccgcgggaaacaccaccgtgttaagaccgagcggcatagcagtagcgcaaagggcaacccttattatatccttatcggttttaagcagcaacagcaccgccataaaagcggacggcaatattataagccttataacagaggctaagtaaacctttttatcgcttgcaagggttttaaggctgtactcccctataacaaagcccgtaagcagcattgcaaggggcgacatacacgcccccgcgcttgatattgctgttgttataaactttggcagcggaacggataaaagaccgcacacagcgcccaaaataagcgcgataaaaatgggattcacaaaggttttaacgctgagcttaccgcccttctcggtcggaattaaggaagccgtaccgatagaataaacataaaggttaagcggcagggtaaatatcatataatcgaaaagcaccttttcgccgaaaacgcccagcaccacggcgttgcccataaagctgaaattggcaacggcaaaggaatatgtatatatttttttaaggtagccgtcctttgcaaagaattttgccaaaacaatgcctatcggcagagataccgccataacagccgcaccgtaaagcatatatgtccatttttgtttgaaattttccaccgtgcagtatttataaaataccgaaaaaacaaggcacggcacaaaggcgtaggtttcaagctttgaaagcactaccgaatcgtcaagcggcaaaagccgttttttatttaagaaaaaacccagcgccataaaaatgaacagcaccagcatttggttaagtgtggctgtaaatacctgcattttaaaaatccttaatattttattttccttaataatttattttaaaattctcccccgaaataccgggaagtacgcctctatctataagtcccttattgtcgttatgagttataagccacttatttttgcggaataacagcgggtcggaggcttcagactcaagcggcgtattggtgccgagcggcagccccacaacgcagccgaagccgcacttttccacctcgcacgggcaaaaatgcagtgtggttgagtaaacctctgcgacagtgcccgctggcagataaaacgccgtgaattttgaagaaccggtttttccgcttttaatatcccatatatgtcccaaaattaaaacaagcggcgttacggcaatgttgatctcgcttgacatatgccattcggcggcgtttaaaaggctgttgtgtccgtggcagtagcctatctgcgcaggcagcgtaccgaaaaatttattttctatttcctttgcaatggacagcttttcaaagctttcctcgctcggcgtataggcagagccttccgccggtctgcttattttttcggcggctttaattatttccgaggtatcaagccccgttataaccctgccaaaggtcttaaattcttcgctgtttaccgaataaagcttaatatcgggatttttcagtttcaggttatcaagcataaatttctctcctatatattatcataaaaggggctgcaataacagcccctatgtattatttcttttctatccactcgtggtcggggtcactgcttctgttaaagccctggtggtcgcccgccataagccacaggaaatatgtctga

SEQ ID NO: 1497 - DNA, 2255 bp, Unknown
  16S sequences of unknown bacteria
ggcggataaacaccgagctttccggcattttaagggacgctaaaaacgaatacctaatgatggtgcttttggtggtcggaaatatcccgcttttgtatcttttaaaccgcgattggtttaacacccttatatataccacacccggcaaggcggtaacgggcatttgcggtgcggtaattttaatcacctttattttaatgaagaaatataccaagcctgtgaaagtgagggattagatgattttaaggattatatttttcacacttttgtcaatcgggcttacctttatagcgctggatatttttaaaataccgtatttaaaaacctcaagggcggttaaaaatctcttaaaaaagcggagcaaaaaggagtccgctgccgagctgtggctatcgggagtgtcgttaaaattatccgagcatattaagataaacgaatataaaaggatttcgcttgctaacgaccttgcaagcgcagatattccacttacgcccgaacaattcaaagcaaacgcgattgtaaaggcgggggttacagcggtatttgccgttcctttcggctttatattcccgcttttgtgccccgtttttttaatagccgcggtggttacatatacgggcgagaaccggaagctatccaaaaagcttaaagcaaggcgggagaaaatagagtacgctctgccggggcttgcaaacgccgccgaaaagaccttaaagcattcaagagatgttttatatattattgaaagctattccgcaaacaccgaaaaggagcttgccgacgagcttaaaataacggcggcggatatgcggtcgggcggttatgaaacggcggtaacaaggcttgagggcagggtcggcagccctatgatgtcggatatatgcagagggcttttaggtattatccgcggcgacgatatgcggatgtatttttcgtcgctcacgctgaaattatccgacgtccgccgtgaaaagctgaaggaaaaggctaagaaagcgcctaaaagggttaaaaagctctcggtcgcgctgcttgtctgctttatgcttatatacatgacggtgattgtttgccagattggcagcagtatgagcgctttgtttgggggttagaaaatgcttaaaagagttaaaaatataaaaggagacggatatgttgaggtatgtatttcggcgcttgttcttataaccctcgccgttatacttcttaatatttttgagcttataatgctccgtatatctttagggcagaccgccgacgaccttataaccaccgcctgttattcgggcgggtttaccgatgaattctgggagtgtgacgctaaacattgtgacgaatatctttactacgatatagactacggcgcggatgaattttttgacgcgaccgccgaaacggtgcagttaggcgacagtatgtgggtagaggtatccgccggaatggatgttaagggcgcgggagcctttaagatacccataaccgtgacagtgaaaagattcggaatttctgagaggtatgcaaaataaaatgtgcattaaaagtaaaagggcagaaggatatatacctgcctgcataataacggtctgcgtttgtatggtcttatctgttaccctttcctttatatccgctgtaacggcggtaaatcagtcgaaaagagatgtccgtcaggcgcttgacgggtttgtaacccataaatccatagaaatatataacggcgtaaagaactattcggagtttgccgaaacgcttgacgaggaaagctttgaaaacattttaaacgagtatacgggcggtcagggaaactatgagataaaggatttaaaaatagaatttcgcgagacggacaggcttaattacaccgtcagctatacgcttaaagcgcctgtaagattcgggaatataaccgcagtgtatacaaatgtgccggttaaaataaccggagtatttaattttaaattttaaaggaggattgaatttgaaacctaataaaattgttttaataattttaagctgtttgctttgtgccgggtgtattgcaggcattatatatgctgctgcaaggaaaccgggcaaaaacgagacagtaagcagcggggataattcggaaataaaaatatctgccgaaattcccacaagtgacagcaaaacagaaagcacaaaggctgaaattgaggataacggcaatggcttaaagcccgacgaaaccgaggcggataaaatcctgcaaaaagccgagcaaaagaaagaggtttaca

SEQ ID NO: 1498 - DNA, 32759 bp, Unknown
  16S sequences of unknown bacteria
caaaatttcttagaaaaacttcttgctttttccttgacttttttttgcaggtctcaataaatagtcggcttttattttccagagcggcccgacgaacgtcgccgcgatcgccgccgccgagagcagggcgatgacgacgttaaagatgaataccgcgaagcggctgcccgttttcgacatgacgtgcctccttttttgaaaagctttaataatgtatattcagtttaacctatttttgtcgaaaagtcaacggctttttttctttttcttgcccgcggggggtataaagtttgtccatttttcccaaattatagatatgaaacgagtgaaaactttcgacgaaatgaaaacgcgcgacgagagggaaagttgttttcccgcggcgtcgggcagagaaaacagaaacctgtccgcaggggcggacttacgaggcggaggtgaaaaatgacggggaaaaacagggaaaattacaacaagaattatatcgcttacgtcaattcgtttgatccgcccacgcaccatttcaaaaactgcatccgcgcctttgccgtcggcgggcttatctgctgtatcggacaatttttccgctatatgctggaatatattttcggcctcagcggcgacgagctggcgggtacggtcagcgttctgctcatctttatcggcaccctgctgacggggctcggcgtttatgaccgcatcggccgaaacgcgggcgcgggttcgatcgtgcccattaccggcttcgccaacagcgtcgcatcgcccgccatagagttcaaaacggaggggctgatttacggcctggccgcgaaaatgtttatcgtcgcgggacccattatcgtgtatggggttctgtcgggcacgatcgtaggaatcatttattggtttctgcgctgaacgcgataagataggggaaatttgaaaattatggctaagcatacgatttattttgagaaacaaccgagaattatttctacgggcacgatcgcgggaccaaaggaatgtgcgggcgtcgtcggaaagtacgtggacagggctctttccgacgatatgttcggcgaaagcacctatgaaaaagccgagtgcaagatgcttacttttgccattcagaaggccatcaaaaacgccgctttggaggaggagggaatcgatctgatgatctcgggcgatttgctcaaccagattatttccgcatcctttgccgcgcgcgatttcgattttccctttctcggcgtttacggcgcctgttccactatggccgaaagctttgccttggcggcttcgtttatcaacgcgggatatttcaaaaaaattgtggccgcgacgggcagccacttctcctcggcggaacggcaataccgctatccgctggagctgggcaccacccgtccccctcaatcgcagtggacggtgacgggcgcgggcggcgcggtgattgccgaaaaggggagccataccgcgattacgggcgctacgttcgggaaggtggtggatttcggcgtcacggacgtcaacaatatgggcgcggccatggcgcccgcggcgtgcgataccattttgacccacctgaaggatacggggcgcggagccgattactatgacctgatcgtgacgggagatctcggggcgctgggcagccgtatcgtcaaggatctgacctgggaaaagggcgtcgatattcagcccaaccacgtcgattgcggggaaatcatctataaggtgatcgaggacgaatttcagggcggaagcggcgcggggtgcagcgcggtggtgttcaattcgtatatctacgacaaattgaagcgcagggagatcaatcgggtgctgtttgtcgctacgggcgcgctgctttccacggtgtcgagcgggcagggggaaagtatcccctgcatcgcgcacgcggtgagtatagagaatgtgtaaaagttaaaaagacgcggcggaagccgcgtcttttttaatggagattttcgaaaggttgaaacggccggcgaggtcgtttcagaggtcgtttcagaggtcgtttcagaggtcgtttcagaggtcgtttcaaacgctgtttcagataccgtcgaatacgaggcggatacccatgtctttgatgagcttgtttgccgtctttacccgatcgggcttgtattcgcgcgcgatatggctgtcgaagcctacgctcagctttacgcccgatttttttacgatttcctgctgggacttgtttttgaaaaattccgtcacgtaatcgtgcgtgcggaaaccgtgcagactgtcgagattgacgttcatttcccaaaagatgccctgctccgccattttgcgaaaatacctgttcggctcctcgccgcgcttttcgataaaggcaaacatgtccgtgtgggcgatccccgtgggacagccgcaacgcttcgcaaaggaaaaaatgtcgccttgcgcgatggaaaggtttgtattgtcgaggttttccacgaggcaataatcgaagaaggagacgtccgcggaatagggcagggcgtagcggtcgcggctctttaacgtacatatctcgattccgcacagcaccttgatacgattgcggtacttgtccctgacggagtttacgtggtcgtaataccgcaaaagcgttttgccgtagtccgcgtcgagggcgggacccttgtcgtagcaaagctccgtccgcccgcagccgatcccgtaattgtggtcgctgatcccgatcagaccgacgccgcctaaaagcgccgtctcgattaccttttctattttatcctccgaatcgaaggaataatacgtatgggcatgcagatcctgtatcatcggtttgacctctctttcgtccgcgcgcgtctgcgttttgcgttttcgttattattataatccctctcgagagataaagcaagcgattgaaagaacaatcaatagataaaatttacgtcgccttcgtccgtgccggcggggggaggcgcgtccgtcaccacgagatcgtaagcggaaagctcggtgaaacggtaggtggcgtgcgcgccgaatttgctgtgatcgaaaatgagcagacggcgtttgcagtgatcgaacgccgcgcgttttacttctttcgtttcgatggagctttcatagacgtccttgcctaaaacggacgcgcaggaggagatcatcagatcgaaggaaaaatcgtttaactgccgcgccgtccagctccccgaagcggaattggtgttattctgaacgctgccgcctaaaataatgagattgatgttcggctttttcgccagctggagcgccgtctgaaggttgttcgtcaccaccgttttgaagcttaaatccagccgctccgccagggcgagcgcggtggaggagctgtcgataaacagagatttgaagggcggaatgtgcggcagggccttcgtggccgcacgctccttttcgttggcgtttttctccatgcggaaaaaaatcgagatttcttccgcgttttctggtaaaatcgctccgccgtgactgcgttcgatcagccccatgctcttcatctccgccagatcgcggcggatcgtcgcctcgctgacgtacaaggtcttggcgagagcgtttacgcttgccgtcttgctctccttcaaggtgcgcaggatttcattttgtctttcgttgattgccataactcgctccgaaacgctgatttttgcgcgtttgtgtttatatctgttcatatcatatcataaaaaagtttttttgtcaatcttccgaacgtatatagacaaaacagaaaaagtgtgatataatgtacaggataaaaaagctcccgcttcagggcacggagggaagataagtgaaatattatttggcaatcgatatcggagcgtcgtcggggcggcatattctggcgcatctcgagggcggaaagatggtgacggaggagatttaccgcttccggaacggccccgaaacggcaaaggctttcgacgggaaggaacatctcatgtggaaccccgaaggtctgtttgcggaaattctgaacggactgaaaagggcgaaggaaatagggaaaattccctgttccgtcggcgtggatacctggggcgtggattacgcgctcctcgacgaaaacgatcgggcgatcggcggcgtttacagctaccgcgacgcgaggacggaaaagaccgttcccgaagtgcatgcggcggtgccgtttgcggagctttacgcaaagacgggaattcagtttaatacgtttaacaccgtctatcagcttttggacgacgagcggacgggcagaatggaaagggcgaaggccatgctgatgctgcccgattattttcatttccgcctcacgggcgtgaagaaacaggaatacaccaacgccacgacgacgggcatggtcaacgcgctgacgcatacgtgggacggggagatcatcgaaaggctggggtataaaaaggagatgttcggcgagctgtcccagccggggacggaagtcggggagtttacggacgaggtggcggcaatcgtcggatacaaggcgaaggtcgttttgccggccacgcacgacacggcaagcgccgtgctcgccgcgccgctttcgggacagacgccgtatatttccagcggaacctggtcgctgctgggcgtagagcaaaacggcgcttatacttcggccgccgcccgtgaggcggactattccaacgagggaagcgtaggctttaccttccgtctgcaaaagaatatcatggggctttggatgattcagcaggtgcgccatgagctggaggataaatacagctttgcggagcttgcggctctcgcgcgggaaaatcccgttcccgacgaaatcgacgtcaacgatcggcgctttctcgccccgaagagcatgatcgacgaaataaacggcgcggtgggcagaaagctcggcgtcggggaaacggcgtacgtcattttcaataatctcgcgcggagttatcagagcagtcttgacgcgctggaaaaagtgacgggcaaaacgtacgggacgctgaacatcatcggcggcggaagcaaaaacgagtttctcaacgagctgacggccaagcatacgggaaaaaagatcatcataggcccgacggagggcacggcgatcggcaatttcctcatgcagatggtgggcagcggcgaagtgaaggacgtggcggaaggcagagagtatatcaaaaactctttcgatatccgggaactttgaaaatcgaaaaaaataaaagacatagggagaatttttatgtccagatatgaagaagcgaaaaagatgtatgcggcttacggcatcgacaccgaagccgcgatcgggcggctcggaaaaatccccgtaagcgtgcactgctggcagggcgacgacgtgctggggtttgaaggcggcggctctctcgacggcggaattcagacgacgggaaactatcccggcaaagcgcgcacgcccgaggagctgtttgaggacgcgaagaaagcgttttcgttgatgccgggcaaaaaacgtatcaacgtgcacgcctgctatgcgctgctcggcgcggataagggcaaggtggatcgggacgaatatacctataagtatttcgaaccgtgggtgaaatgggcgaaagagatcggcctcgacggcgtggatttcaatccgaccttcttcgcgcatcccaaaatgaaggacgggctttccctgtcctctcccgacgaggagacgagaaggttttgggtgaggcacggcagagcctgccttgaaatcgcggcggagatgggcaaggccatgaacagcccctgcctcgtaaacatctggatccccgacggatacaaggatatccccgcggacagactttctccccgtttgcgcctgaaaaagtcgctcgacgaaatgctggaaggatacgacaaaaaatgggtgatccccgccgtcgaaagcaaggtgttcgggatcggtatcgaaagctataccgtcggcagcaacgagttttatcagaattatgcggcgaaagcgggcatttgctgcttgatggatacgggacactatcaccccacggaagtggtttccgataagctgcccgcgcttctggcgttttacgacaaggttgcgctgcacgtttcccgccccgtccgctgggacagcgaccacgtggtgattttggacgacgagctgaaggagcttgccaaagagatcgtgcgcagcgaagccgacgagaaggtgattatcggcctcgattatttcgacgcttccatcaaccgcctctgcgcctgggtgacgggcgagcgttccatgcagaaggcgcttctgaacgctatgcttcagccgtatgcggaaatgaaaaaattgcaggacgaaaataatttctccaaaattatgttcctgagcgaaaaattcaagatgatgcccgtgggcgacgtatgggacgaatatctccgccgccagggactttccgaggattggttcggcgaagtggaggcgtttgaaaaggacgtcattgcaaagcgcgtataaccgtaatattttaatatatttcggaaatacgcggcaattccgcaggtttacggaagctttacggctgtattgtagaaataagctgtggcttacggaagctttacggttatcttgcggaattttaaggctatattttcaaggtatgctatcaggagtttagataaataatgaaaatacttgttgtcaacgccggcagttcttcgctgaagtatcagcttttcgacatggaaaccgaaaaggcgcttgccaagggcaactgcgaacgcatcggcatagacggtgtgcttacgcataagcgcccgggcaaggaggactacaagacgtccgcgccttttcccgaccaccgcgcggcgatcgaatacgttttgaagatactcaccgataagacgctgggcgtcatcggaagcgtggaggagatcgcggccgtggggcaccgtttcgcgcacggcggggaaaggctgaaaacttcctccgtgctcggcgacgaggagatcgcctatctcgaaagcatcgtggatcttaaccctctgcacggcccgcccgcgatcagcggctttaaggcctgcaaggcggtgatgccgcgggctaaccacgtgggcgtgttcgatacgtcctactattccgatctcggggaatacgcttacatttatcccgtcccttacgagctgtacgaaaagtacaaaatcaggcgttacgggtttcacggtacctcgcacagatacgtcgcgggaaaggcggcggagcttttgggcagaaaggacgcgaagatcatcacctgccatctgggcaacggctcgtcgattaccgccacgaaaaacggcagggcggtggatacgtccatgggcttcactccgcaggacggcgtaccgatgggcacgcgcagcggcgcgctcgatcctaccgtcgtgacctatatcatgaaagcggaggggctttccgccgaggagacggataagctgctcaactccaaatcggggcttctgggcgtttcgggcgtttccagcgactgcagggacgtatgcaaagcggcggaggcagggaacgcgagagcggctctcgccatcgatattctcgtccacgatatcaaaaagatcatcgggtcgtactttgccgagctagacggcgccgacgcgctggtgtttacggcgggtatcggtgaaaacgaccgtaatctccgcgaacgggtgtgtaaaaatatgtccgccttgggcatagaaatagacgaagccgtcaacgcctcctgcccgaggggagaaatcgccgatatcaccaaggcgggcgcgaaggtaaagacctttgtaatccccaccgacgaggaatatatgatcgccctcgataccaaaaatctgacaaaataaaaaatcacataaaggaaaggaaaaacatgaaatctccattcgaaatcaaaaaggaaatctgcgaagtagggcacaagctctacatgaagaacttcgttgccgccaacgacggcaatatttccgtcaagatcagcgacaacgaattttattgcacgcccacgggcgtttccaagggctcgctcacgcccgacatgattatcaaggtcgatgcggagggcaaaaaaatcgagggaaagctcaatccctcctccgaaatcaaaatgcatatgcgcgtctataaggaacgccccgacgtcaacgccgtcgttcacgcgcatccgcccatcgccacggccttcacggtggcggacatcgacctcgaccagtatattctgcccgaagcggtgctcacgatcggcgaagtgcctacctgcgattacggtactccttccacgatggaaattcccgattcgctggagccgtatattcaggaccacgacgcgttcctgctccgcaaccacggcgcgcttacggtcggctgcgacctgacgaaggccatgttcgtcatggaagaagtggaatttaacgccaccatctgcaagcatgccatggagctgggcgccgtgcacgaaattcccaacgatcagctgaaaaaactgatggagctgcgcaagaaaatgaatatccccggacgtcaccccggactcgagatcgaagaggagaagcccgcctgcaattgcagccaggaagagcttgtggaagcgattacgcgcaaggtgcttgccgcgctcggcaagtaagccgcgggcgcaaaggagcattcgatggcaatcaattggacggaagcccgcatagaggaagtggttgcggaggtaatcaaaagcctcggcggcgctcccgaaaagaaagtcggctgggattccacacagtataacggccgtaagtttatcggcgtgtttgcggacatgaacgacgcgatagacgcggcgacggccggttacaaggtcatccgcgcgatgtccctcgaggaacgcgaaaaggtgatttcggcgatccgcgagctctgccgcaaagaagcgtccgtgatggccgagctcggcgtcgcggagacgaagatggggcgcgtggagcacaagaccgccaagcatatcctcgtcgcggacaagacgcccggcacggcggacatcgtcgcgcaggtcaagacgggcgattacgggcttaccttgacggaaatggcgcccttcggcgtcgtgggcagcattaccccgagcaccaatccttcggaaacggttctctgcaacagcatcggcatgatcgccgcgggaaacggcgtggtattcaatccccaccccaacgcgatcgctacctctaattacgcggtggatctggtcaaccgcgcctgcgcttcggcgggcggcccgcaggtgctggtcgcttcagtggtaaagcccaccctcgatacggcgcagatcatgtacaaacaccccgcgatccgtctgctggtatgcacgggcggccccggcgtcgtcaaaagcgtgctctcgagcggtaaaaaggcgatcggcgcgggcgcgggaaatcctcccgtcatcgtcgatgatacggcggatatccgaaaggcgggcaaggacatcatagacggctgttccttcgacaacaacctgccctgcattgcggaaaaagaggtgttcgcgtttaagaatatcgcggacgagctgatttccgtcatgaaggaaaacggcgcctaccagattacctcagagcaggcggacagattggcggagatcgttttggtggaagcgaaaaatcccaagacgggcatcgtcaaaaaggtggtcagccgcgagtgcgtcggccgcgacgccgccgtattgctgaaaaaaatcggcgtgaacgtcggtcccgaaataagatgtatcatctgcgagacggcgtttgagcatccgtttgtgcaaaacgagctgatgatgcccattctcccgatcgtccgcgtgagcgacatcgacgaggcgatcgacctcgcggtgaaggcggagcacggctgccgccatacggcgcacatgcattcgaaaaacatcgaccacctcacgcggtttgcgcgggcggtggagacgacgattttcgtcaagaacgcgccctcctatgcgggcatcgggttcggcggcgagggacacacgacgtttacgatcgcggggcctacgggcgaggggctgaccagcgcgcgcagctttacaagatacagacggtgcgtcatggcggacagtttccgcattatttaagaagcgtaaaaaggagaacaatatggacattacttcttcccaggtggagaacatcgttcggaaaattctcggggaaatggacggcggcgcggccgtaaagagcgcgccttccgcaaggctccccaagacggcgaaggtggctatgctcacctccccgaaacacatcgaggtaaaggaatttgagattcccgcccttcgggacgacgatattctcgtaaaggtggagggctgcggcgtctgcggtacggacgtgcacgagtggaagggcgatccgttcgggattattcccgtaacgctcggacacgagggcacgggcgagatcgtcgcgctcggcaaaaacatcaagacggacacggcgggcaatcccatcaaagtgggcgacaagctcgtcaccagcgtcatcagctgcggcgaatgctacatctgccgcaatcaccccgcaaacaccaacctctgcgacaagcagggcgttttcgggctcattccccacaacgacgcgcagccgcttacgggctggttttccacccatatcctcatcaggggaaagggcgcgacctatttcgtcgtcaacgacctcgaccttaaggaaagaatgctgctcgagctttcctgcgtctgcgtgcacgctttgaagcgcgccaacgccacggggctgatcaacttcaattccaaagtgctcattcaggggctcggccccgtcgggctggtgatgctgagcgttttgcgcgcggcgggcgtcaatcacgtcattgcgatcgacggcacccccaaacgcctcgaaatggcgaaaaagctgggcgcgaaaaccgtgatcaatttccgcgaagcgacctctctcgaggagcgcgccaggctggtgaaagcggccgccaacggcgtgggcgcggactttgccttccagtgcacgggcgctcccgcggcggcgaaggacatttacgaatatatccgccgcggcggcgggctctgcgaaatgggcttcttcgtcaacaacggcgaatataacgtcaacccgcatttcgccatgtgcaacaaggagatcacgatcgtcggctcgtgggattacagcgcggacgattatcctaccacgatggcgttcctgcggcaggcgcgcgaaatgaaaatccccatcaaggagctcatcacgcacagcttcccgctggataagctgaacgaggcgatggaagtcaacgtcaggcaggaaggcatcaaaatctgttacgtggccgagtaagacggctgaaaacagaacaaaaggagagacggaatggccctgggcatgatagaagtattcgggtttgccacggcgatcgtcgtggccgacgcgatggcgaaggccgccgacgtggagatcgtggcgatcgataaaaacaaacccgcggcgggagattccgccagggtgccgctggtcatggcagtaaaggcggaaggctccgcggcggccgtcgaggcggccgtggccgcaggtaaggcggaggccgaaaaaagagatttgtacatcactcacaaggtgattgcaaggcagagcgaggacatcgaatggtttgcccgtttgaatgccctcgggaaagacaaattgagataaaaaacaaaaaataaaacttgaggagaaacaaaattatgatggaagcattaggcatggtagagacgagaggtcttgtggcggcgatcgaagcggcggacgcgatggtaaaggcggcgaacgtcgtgctcatcggcagcgaaaagatcggcagcggattggtgagcgtgatggttcgcggagacgtcggcgccgtgaaggcggcggtcgaagcgggctgcgctgcggcgacttcgctgggcgaagtgatcgctacgcacgtgattccccgtccccacgcagacgttgaaaagcttcttcccgccattaagtaattatcgggaaaaagggtatgaaagcgatcgcattactcgaagtgcaagccatggtcgccgcaatcgtcgggcttgacgcgatggtaaaagcggcggacgtgaagctgattcacgtcgagaaacgcctcggcggacggctggtgacggtcgtcgtcgagggggaggtttcagcagttacggcggcgttagaggccgggaaaaacgcggctgcggaagtaggcaacgtcaaagtgtgcgaggtgattgcgcgcccgcaccccgacgtcatgaaatttttgacgacggattgacaaagcggcggggacaggcgccccgaaagagaaaaaagaaaagataattttcaggaggattcaggcatggaagcattaggcatggtagagacgagaggccttgtggcggcgatcgaagcggcggacgcgatggtaaaggcggcgaatgtcgtgctcatcggcagcgaaaagatcggcagcggattggtgagcgttatggttcgcggagacgtcggggccgtgaaggcggcggtcgaagcgggctgcgcggcggcgacttcgctgggcgaagtgatcgctacgcacgtgattccccgtccccacgcagacgttgaaaagcttcttcccaccattaagtaagaagcgttcgtttgtcaaaacaaatttccgcagcgcccgaaataagagcgtttgggcactgcggagattttagaacgccgaaaaatcgaaaaatttccgcctttcgtcgcacatcgtcgtgcgcgaacgcgaaaagcgggaaggggataaggccgatttcggaatattcggaaaatcggtttcagagtacgggaaagcgattgcaaagtacgaaaaaacgattttagaatatcgggaaggtcggttatagattacccaaaggacagttatggaaatttcaagcgctaaaattgcggaaatggtgaaaaaagttctcgcggatatggagggcggcgcaaatgcgtccgccgaacatgggcttgttcccgtcggcgtatccaacagacatatacatctgacgaaagcggaccttgccgtattgttcggcgaagggtacgagcttacccccttgaaggatctgtctcagcccgggcagtttgcctgcaaggagacgctcaccctcgtggggccctctcttcgtcccatagagaacgtccgcgtgctcggacccctgcggggcaaatcgcaggtggaaatttccgcgacggactcctatgtgctgaaggtaaagccgcccgtacgggaatcgggcaacgtcgcgggaagcgcgggcgtgacgatcgtcggcccgaaaggcgtcgtacagctgaaagaggggtgcatcatcgccaacaggcacattcatatgtccccgagcgacgcagcttctttccgcgttaaagacggggatacggtgacggtggacgtcgagggaaagcgccgcacgcgctggtatgacgtgcaggtgcgcgtcagccccgatttccgtctggaaatgcacgtggatacggacgacgcaaacgcggcgggcatcggcaacgggttcaaagtgaaggtcgtcagggagtgacaaagtgttaagaggaattatcagaggaaacatcgtttccacgagaaaacaggaatcgctcgtcggcgccaagttcatggaagtggaaattatggacaacggcgaactgacgggcagatacatcatcgccatcgacagcgtgggcgcggggataggagaaacggtgctgatcactacgggcagttccgcaaggctcgctctccataacaccaatgcgccgaccgacgccgtgatcgtgggtatcgtggattgagcctgcgttttttctacgcatcggttatcgatagcgcggattgagcctgtgtttttttgcgcggcgttcgtgaatggcgcggattgagtctgcgttttttcgcgcggcgattgcggttaaagcgttttttatgaaagcgcaaaatttcgttgcggaaaaaacagggcgcggacgcgatttaggaggcggttttttattcttatggaacttaaagaacttatgaaagaagccggtatcgtcggtgcgggcggcgcgggatttcccgcgtatgcaaagctcgcgcccggagcggatatcctcctcgtcaacggcgcggaatgtgaacctctgctctataccgattacataattttaagcagggagatgcccatggtgctggcgggcatcaaggctgttttggaatatgccgatatcccccgcgcgcttctgtgcgtgaaggagcatacggcaaaacggttgaacctgaaggacggcgaaaagctcgccgacaggatttcgctgaaaactctgcccgacgtctatcccatgggggacgaaatcagcctcatctatcaggcgacggggcggatcgtgaaaccgggcaatctgcccatcacggcaggcgttatcgtctataacgcggaaaccctctacaatgtggcggccgccgtaaaattttccgcaaaggtgacgatgaaatggctgacgattggcggaaacatccccgaagcgatcgtcgtgagagtgcccgtgggcacccccgtttccgagctttttgccagatattcggttaaaattcccgaggaacacgccgttctcgacggcgggccttccatgggaaaaatgatagatcccgaaagggcggttgtgacaaagacgaccaaggcgctcctgattttgcccgaagcctcggaggcggtgcagtccaagctcctcgacgcggacaaatcggtggcgcgggcggagacggcgtgctgtcaatgcacccgctgtacggacatgtgtccgcgggcgcttttggggtatccgctggagccgcacaaaatggtgcgcacggcgaaacaggcggcggaaatctcccccgcgatggtgctttcggcaagcctctgctgcggctgcggcgtctgtgagagcctcgcctgctgtcagggcatttcccccaaggcggtcatcgcgcattataaagacgttttggcgaaaaacaagcttcgctatgtggggaaaggggaagtgtcggcgctgcccgaacgggaataccgcatgatcccttcctcgcgctgggcgggcgtgctgggcgtgggcaagtatgacaaaatgcccgtgttcaaaggcgaaaatacggattttgaccgcgtggaaatctatctcaagcaacacatcggcgcgccgagcaaagcgatcgtcgcggacggtcagaaggtggagcgcggagacaaaatcgcggagagcgcggacggactttccctgccgcagtacgcttccgtctcgggctatgcgaccgtgtgcgagggcgaaaaaatcatcatagacaaggtaaattgcaatgtttaagtcgatcggtgtcattgaactgaaaaacgtgcccaagggcgtggaggcgactgacgatgcgcttaagagcgcgggcgtggaaatggtttccgcgcacccctcctgccccggaaaatacgaaatcattttgacgggctccatctccaacgtgacggccgcgatagaccacgtgacgggaaaattcgaaaattacgtgatcgattcctccgtcatgggcaggatcgacgagcaggtgattacggcgctgttcggcacgcagcagagcgagaaaaagggctcgctggggcttatcgaaaccttttcggcggcgacctgcatcaaggccgcggatatcgcggtaaagacggcgcgggtggagattttcgatctccgcgtctctcgcggtttgggcggcaagggcgtcgtcatcatcacgggcgaaatcggcgacgtgacggcggcagtcgaggcgggggcgaattatgcgaagggcgcgggcatgctttccgccacctcggtgatcgccgcgccgcacgaagatctttggaaccaaatctgaaagtaagacaaaggggcagagggcatggaaaatataaaattcgtcatcgaaaaaagcgcgagaatagataaactgatagacgagctgtacgcgaaaatgccggagatcgaatcggcccgcggcgtgctcgtcacggaaagctacaaggcgacggaagctctcccgatcatcaaccgcagaagtgccgcgtttgcgcatatcctgcgcaatatccccattatcatcagggacggggaactcatcgtgggcagtgccacgctcgcgcctcacggttgccaggtattccccgaatattcctacgaatggctggaggcggagttcgacacggtggcgacgcgggcggccgatcctttttatatcagcgaaaagacgaaagcggagctgcgcgccgtctatccctattggaagggcaagacgtgcagcgacctggcgaaatcgaacatggcgcccgaggcctacgaggcgtttaccgtccacggcatgtttacgccgggcaactacttttacaacggtatcggccacgtgaacgtggattatgcgaaggtgctcaaaaagggctaccgcggaattatcgcggaagcgcaggccgcgttggagaagctggacgtctattgtcccgaatacgtgcgcaggcacaatttcctttcggccgtcgtcgaaagctgcgaagcggcggtgacatatgcgagaagatattccgccctcgcccgcgaaacggcgaaaaaggaaaagaaccccgacagaaaagcggagcttgaacggattgcgaagaactgcgcgcgcgtgcccgaatttcccgcggcggatttctatgaggcatgtcaatccttttggtttgttcagctgcttttgcagatcgaatcgagcggacactccatttctcccggccgcttcgatcaatatatgtatccctactataaaaaggacatcgacgagggcaggctcacgagggagcaggcgcaggaatatctcgactgtatctgggtgaaactcaacgatatcaacaaagttcgcgacgcggcttccgcagacgggtttgccggctacggaatgtttcaaaatctgattgtcggcgggcagaacgtccacggcatggacgcgacgaacgacctttcgtacatgtgtctggaagcggccatgcacgtgcctctgcctcagccctccctgtccgttcgggtatggaacggctcgccgcaggatcttctcgtcaaagcggcggctttgacgcggctgggtacgggactccccgcgtattataacgacgaggtgattattccgtccattatgtcgcgcgggctcacgctggaggacgcgcgggattactgcattatcggttgcgtggagccgcagaagggcggaaagacggacggctggcacgacgcggcgtttttcaatatgtgccgcccgatggagctggttttttccgacggtgtggataagggcgtaaaaatcggccccgatacgggcgacgtcacgaaaatgaacaccttcgaggagttttacgaagcctataagacacagcagaagtattttatccgcctgctcgtcaatgccgacaacgcgatagacgcggcgcatgcggcgagatgtcctttgcccttccaatcgtgtatggtggaggattgcatcggccgcggcaaatcgttgcaggaagggggcgcggtatataatttcacggggcctcaggggtttggaatcgccaataacaccgacgggcttctcgcggtaaaacagcttgtgtttgaggaaaagaaggtgaccatggctgagctgaaggaggctatggaggccaatttcggttacggattgcagggcgcggcggcggagcgcgtgacggaggaaatcgcctgcgggcttgccgagcacggcttggaaatcacggcggacgcgatccgtaccatttacgaggaagtgacgacggggaacggcatcggcgcggaaaagcgcgcgagataccgcgagatcaagcggctgatcgacgaaacctgccccaaatacggaaacgatatttacgaagcggatatgtttgcccgcgacgtggcgaatacctataccaaggaagtggaaaaatacaaaaacgtccgcggcggcaggtttcaggcggggctttaccccgtgtccgccaacgtgcccctcggcgcgcagacgggcgctacccccgacggccggctggcgtttacgccgattgcggacggaatcgggcccatgtcgggccgcgacgtaaagggccctacggcgacggccaactcggtggcgaagctggaacagggagtggcctccaacggcaccctgctcaaccagaaatttcatccctccgccttggcgggcatggaggggctgaccaaatttgtggcgctcatccgttcgtatttcgatcagaaaggcatgcacatgcagtttaacgtcgtcacgcgcgaaaccttgatcgacgcccaacagcatcccgaaaaatacaagacgctcgtcgtccgcgtcgcgggctacagcgcgttgttcaccacgctttcccgctcgttgcaggacgacatcatcaatcgtacccaacagggcttttaaccgaaaaaacgcaaataaccgcgctcggccgcgcttcggggataagcggaggtttttcgcggcgttcccgtaagcttgcagagagcttgcggctttataggacggggaatatgtcgtagtttcgtggcggggcatattttccgatttcgcaggacgggatatacttttcggctttgcaggcgggacattatataacaggaaaaaattatgcaggcatatcacggcaaaggcagaatattcaatatacagcgcttttcgattcacgacggcccgggaatccgtaccatcgtgtttttcaagggctgttttatgcgttgcgcgtggtgctgtaaccccgaatcgcaggaattcgaaattcagaccctcgtcgagaacggcagggaaaaaactgtgggacgggacgtaacggcggaggaaattttgcccgaaatactcgcggacgtgccgtactatcggcggtcggggggcggcgtaaccctttcggggggagaaatcctcggccaggcggattttgcgcgagacctgctggaagcgtgcaagcagtcggggctgcataccgcggtggaatccacggcaaacgcgccctttgaaacgatttcgcggattttgccctttctcgacctgtatctgttggatatcaagcatatgaattccgccaagcataaggaatatacgggcgcgggcaacgagttgatcctcgaaaatgcgaaaaggctggcggaaagcggcgtggaactgattatccgcacgcccgtcgtgccgaatttcaacgatacgcccgaggaaatcagggcgatttcgaaatttgcggcctccctgcgcggggtgaaggaacatcatctgcttccctatcaccgtttggggcaggataaatactcgggcttgggcaggaggtatgccctcgaaggcgtggaaccgccctcgaaggaaaaaatggaatatctcaaagcctgcgccgaggagtgcgggttaaagtgccaaatcggcggataaactctcccgccgaggagcgcggcaaatggtaggaaataaagctttccgcaaacagcctacccacccaaaaaaacgcatttgggcgcggcggtataaaaaagaatgctttatctgaaatcgggaaatataaaaataccgattgtcaaacggcaaaacggtataacggagaaggtttttcgtaaaacgtcccgttaaaaaactgagaaaaaaatcggacatggtgaaagatttatggaactgaaagacaaaatgagaatcgtacaggagcttgttcccggcaaacagattacgctttgccacatcatcgcaaaccccgacgaggtgctttatacaaagctcgggctcgatcccaaaaccgactactcgaagagcgcgatcggcgttttgacggtcagccccgcggagagcgccgtcattacggcggatatcgccatgaagtcctccaatgcggaaatcggcttcgtggacagatttacgggaaccttgattatttcgggctccgtttccgccgtggaggccgcgtttaccgcgatccgcgaatactttatcaataaactcggctatacctgctgcgagctgacgagaacctgatgaaaaaaattattctgatcggccgtgtcgcggcgggaaaaactaccctcacgcaggcgctgcgcggggaagaaatacattattttaagacgcagtacgtcaattatctcgatacgatcatcgacacgccgggcgaatataccgagctcaggcagacgagcggcgcgctcgcgctgtattcctacgaagcggacgtggtggggctggtgctgtccgccaacgaaccgtattcgattttttcgccctgcattacaagcctcgtcaaccgcgaggtggtggggatcgtgtcggggatagataaacccgacgcaaacgtggaacgggtttcgaggtggctgaagcttgcgggctgtaaaaagattttccccgtcagcgcggtgacgggggaggggcttgcggatatcatcgcctatctcgaaaaggaggattgacgttgagaaaaaccaaggtgatcgcctttgccaacaacaagggcggaagcggcaaaaccacgacttgttccaacatagcctgcgcgatggcgacggacggaaaaagagtgctgatgatcgacggcgacatgcagctcaatctcaccatctcctatttcgacgaggagagggcgctcgcctacgcgaaaaacggaaaaaatatctgcgaggccgtgaaagagggcaaggatttgtccgcttttatcgtctctacggaatttgaagggctggacatggtgccctcttccccctcgatgagcggcatcgaatttgagcttttttccaagccgaagcgcgactttgtcctttcggaatgtctgaaacccgtatcggaaaaggggatttacgattatatcctcatcgacgcgccgcccatgctcgggtgctgggtgacaaatgttctctgcgcgtccgatttcgtcgtgattcccgtggaggcaagcccgtggggactgttcggcctggcaaatatgtttgaattctgcaaacgcgcaaaacggccgtcgcacgaaacggagattctcgggatcgccgtcaccaaagcggacgagaggaaaaaatatttcaaacagaccatggagacgctgaagggcttgggagaaatcaggctgtttgaaaattatatccgcgtagatagcgcgatcgaatggtcgcaggacaacagcaagcccgtaatcgcttataaaaagacgagccgaagcgccgtcgaatataaaaatctggcaaaggagatcatgaaatatgccgataggtaaaaatgcgatcaaaagagtagaaaacaacggttattccaacgtggcgagcagcgcgcccgatatggaaaacagtatcgtcgccgaacccgcgctttccgaacagaaagccgcgcccgccgcagctgccgaaacgttgcccgaagcgaaaatgacatccgccgagcctgcaaagcgcagaaggggccgccccgtaaaggaaaagcccgtcaaggaggcggcggacgcttctccgacagccgccgcgccgaaacggagacccgcaaaggccgcggaaaagaaaacggcgaaggctgcggaaaatacggccgcagaagccgcagaagccgcagaaacgaaaacggagaaagccgcggaaaataagcaagcgaagcctgcgcgcacgcgcaaaacggccgcaaaggccgctaaaaacgaaaagaacggtttcgagcgggtggagcttggcggagaaatgccttattggctgctttgaccgaaaaaaatttctttccgtaaaataattctttcgaaaaatggttttttaacttgtttgggaagcttgtcaagagttctcgaacaagttttttttatggaaaggattatcgggcttttacggaatatttttttccgcgatgcacaaacttctcttgtcgaaatattaaaaatataatggctccgatcgctgcggcgcgcggctcggcaaggtccgaaaaaggggaaaggtatgtttgcacaatattgggaaattatttttatgtttgcgaaggcgtttgtcgtcggggggctgatttgcacaattgcacagatcatcattaatttcaccgactggacggcgggcaagatattggtctatttcatgctggcgggggtggttttgcaaggcctcggcctgtatcagtatctcgtggactttgcgggcgcaggcgccacggtacccatttcggggtttggatatctgctggccaacggcgcgatccgcggctcgcaaaaggggcttttcggagcgtttacgggcgccttggcggcggcgagcgcgggcataagcgcggccgtgattttctcgtttatcatggcgcttatcttcaaatccaaaagtaaaaagaactgaaaaaacggacctcgcagagaggtccgtttttctgtcagtcaacttttttctctttttccagcctttcgatgatggcgtttaatctttttcgcattctctccttcatcgcgtcgtcgtaaatttcctcgaaatcgtcttcctctttttccgtgtggaggagggcgatgatacgtttttgagcggttaccagtaagtcggcgtgcgctttcagctcgtccaatctcaatgagcacgacttttcgtgactgagaagcaacccgaacatgtcgagggataacatttgaaaaaataagtaattttttaacagaaaatagagaagaacggaaacggccgcccccaaaacgggtggaaaaagggaaaaccagctcattcccgaaagaaaaagcagaagtcccataaaaagaaagaaaagaaaggtgaaaaaggccgcgaggacaggctggacgccgtaatttatcaagcgcttattttcttcggctaaaagatcttctagagtttcttctgttttgtctgattctttcatataaaaatacctccaagttttaagaaagtagaattttctaattttttacaaataaagtagaaacttctatataatgacattatgaatacgaaatttagcgacatattgtccgaatttttgaaaggggaaggcatgaaacaaaaagactttgcgtataagataggcgtttcgccaagtcaagtgagcgaatggctaaaagataaagcgactcctaattatcatacgttgaaaaggatatgcttggcttttaacatatcggccgattattttttaggaattacagacggctattgaaattattttctgtaaaagtataacatagaaaattctatctgtcaatgaaattttggtagaaaattctacttttttacatattttagaagaaactttatataatctaaatatggaaaaagaatttgtagaaatccttacagagtttttgaaggaacaagacataaatcaaaaacagtttgcagagaagataggggttaagccaagtcaggtaagcgaatggctgaagggtaaagctaaacctaattatgacaccttaaaaaagattgcccgttcttttaatattcctgccgattactttctcgggctgaccgatacttactgaacagaaaaaaccctccgtaaattttacggagggttttattttacggcgtaagccccatatgcttcccaaaaatatctccttgcagatagacgtcggggattgcgcccaccagcacgcagtcgcacacgagaatgtccgtcgtgacggcgattttttccgttttggacggcatgacgatgctgatgtccgccactacgttgagatagacggagtgcttcgtctgattgatccccacgctttcgaaatccgaggaaaaggcgcaggtgacgctgctgacgggaatgatacggatatgtattctcggcccgaaacccgccaaagcctcgattcccgtcagggcgccgagcggaacggggattccgttgagacttaaatttttgaggttcgcctgcgaaatcgatgccgcgtcgcgtgcgattttattgattttcagtgcgttggccgacaccgccgtgatcgcgcccgcctcgctcctttcgatactgacgagatcttcataacgaaccccgtcgctcagcgtgtaataaatggcgtcgtttatcgcaacggtggtgaacgaacgcattgtcgcttcactgattgcaatcagcaccttggtgacgttcctctgaaaataaacggccgcgcctatgaccagcaggcacacggaaagaacgacggcggcaatcgtctttttccttctcttttttctcaaataacgcggttcgggcgtgtcgagtatgtattctccgccgtccgcgcacacaaagcgccgtttcatcgcctacaccaaaaaacgacggatttcatgcaggatatttgcattcccgctcgaaaaatcggacacggccagcgcggagatcagctccgtatccgtcagagcgtcctcgatggcctcggggagaaagtccgcttcggactgtttgagcacgcggcagagatgtttttgttgaaaataggcggcgttctgcgcctggtcgccccgcgtctggccctccagcggaatgagaatcgcgggctttttcagggcgaggatttcaaaaatcgtattgctgcccgcgcgcgaaacgacgagatccgccgcggcataggcgcttgccatatccgtttcaaattctttctgcacatagtgggggatattgctttccacggcgttgcccttgccgcagaggtgcaggacgttgtattttttgcaaagccgggagacgtttttacgcaacgcgtcgttgatggcgcggctgccgctgccgccgccgaacacgagcagcgtcttgcggcccgcgggcaggccgtactttttcaatgcttccgcgcggcggccctcgaacagttgttttctcaaaggagagccgcagtatttgccgtttttgaacttatccgccgtctcggggaaggaggtgagcaggtagcggcattttttcgccatcagacgattggccagccccggggaaagatcgctctcgtgggtgagacaggggattttcagttttttggccgcaaatacgacgggcagggcaacgtagccgcccttggaaaatacgacgtcgggacggaaggccttcagtccctccgtcgcctttttttccgcgcgcaaaaattcggcggggattttcagattgcggaaggaaaaggaacggataaatttcgggcaggaaatttcccaatagggaattttgaggggcacgatcaatcccttttcggggccgtccgtacccatatagcacacgtccgcttcgtcccttaccgcctcgatgagcgcgatattgggcacgacgtgtcccgcgctgccgccgcctgtaaacagtatctttttcatggatagccctccgccgtcgattttttgcgccgctttcggaaaacggtacatattattatagacggcggaagccgcggttatgcgtatttatcgatacaagagggcgattttttcggccgtttcccgcaccttctgccgcacgctttcgggaaacagcaccttaaccgcgtccccgaagctcacgattttgcggataaggacgctgtcgtcgggcaggcgcacgtccgcataccacttttcgtcggttcggcgcaggttttcgccgccgagccaatcctgaacgtcggcaaaggcctcctcgctcacctccaggcgcacatcgaccgacgaggtttcgtccgtccaatagttgagggggatatcctcgcggcggaaggggcggcggataaacttttctcccgtcagtacggcggtggagattcgccccaatcggaacagccgaaaggcgcgcttttttcggcaaaacgcatagacgtaccacacgctttgcttaaacacgagcacgtgcggttcgattctgcggtgggtatgctcgcccatgcgggaattataatcgacctccagcaccgcacaatcgcggatacacccttcaaacaaacgaagcttttcggaaaaactgcgggtgtcgccccaggtgccgctgtcaacgagaatagtccccacggtgcccgacagcgtgagatcgcggctctccgatttcgcctgcgcggaaagcttgcgcctggcggcgagaaaccgttcctcgggcaattgggaatacatcgcgccgagcgcctctatcgccgcgccgtattcctccttggtcataaagttgacgggcagcttataggaatcggaaatgaaaactccgccgtttcttccccgctggatctgcaagggcaccgaaaccgccagaatatcgagatagcgataaatcgtacgctcggaagtcgcatgcttttcggccagatagcgtgccgtcaccttgcgcttggacaacaattcgaataaaatgtccgtcaatatttcgtatttcatgcttttctcctcaaaaaaattgcattttctcaaaactattttataatacctgcgcgcgtttgtcaagttatttatgctataataggcgcataagatagagacgaaggagaaaaggcatgacgacgtttgatatttatgtaaagggaatagaggagcggagggcgcgcgaacgcaattttgccgtaaatgcggagcttacgcggcggcttcgggaccgcacggagacggagacgctggcggcgcttctttctctgacgctgtttcccgcggagacgaaagcggaggcaagggacccgagcggcgcggcatacgcctgaaaaagcaaaaaggagaagtattttccgaaaaacgcttgacaaaaggcgggaaaaagagtaaactaaaattatcatgaaatactttttcaacgaaaacggacgttataacatttatgcgtacgcctattgcggccgtgcgtttatttgccgtacgtaaaatcgtgaagaagtcttgacccaaaggggcggatcgacggtttgcgtatgcgcagaccgtcttttttgttttcccgaacgggacggaaaaacgttgaataaaaaaagcaaaaggacaaaggagtattttttatggctacaaacgttatggacacacttcgcgcgcggggctttatcaagcagacggttttcgaggacgaactctacgaaaagctggggaaagagagcgtgccgttctatatcggtttcgaccctacggcggattcgctgcacgtcgggcattttatgcagctcgtcgccatgcaccacatgcagcaggcggggcataagcccatcgtattggtcggcggcggcacgggcatggtcggagacccctcggggcgcacggacatgcgcaatctcatgacgcgggagacagtgaagcacaacgtcgaatgtttcaaaaagcagatgtcgaggtttatcgatttcgagggcgaaaacgcggcgatcgtcgtcgataacgccgattggctgctcgagctcaactatatcgatttcctgcgcgaaatcggcgcgcatttctccgtcaataaaatgctgacggcggaatgtttcaagcagcggctcgagagagggctgtccttcctcgaattcaactacatgctgatgcaggcctacgattttctcgtcctttacaggaaatacggctgcgcgttggagctcggcggcgacgatcagtggagcaatattctggcgggcgccaacctcatcaggatcaaggaacagcagcccgctttcgccatgacgttcactcttttaaccacctcggacggaaagaagatgggcaagacggccaagggcgcggtgtggctggacgaaaacaagaccaccccttacgaattttaccaatactggcgcaacaccgcggacgaggacgtggaaaagtgtctcaagcttctcacctttctgccgcttgagcaaatcggagagctctgccgctacaaggacgagcggatcaacggcgcgaaagaggtgctcgcgtacgagcttacgaaggaggtgcacggcgaggagaaagcggacgtggcgagacggcaggcgcaggccgcgttcggcggctcggaggcggagcttttgaccaaagaagtgacgggcgcggagacagtggtggacgccatggtcgccgcgggggtcgcaaaatccaagggagaggcgcgtcggctgatcgagcagggcggcgtcagcgtggacgagacgaaggtgaccgacgtcaatatgcccgtgcccgcggaacaatttgtcctgcataaggggaaaaaggtgcatataaaaatcgtcgtaaaatgatcgatcggcggccggaggaaaaaatggagaaagccgtgcttaccgttttcggacggcatgaaagcgaaaaaataatcgaaaaatcacgttttctcacctattccgcgcatgtggagagcgaggcggacgcgagggcgtttctctcggaggtcaaagccctgcatccgctcgccacgcattgctgctatgccttcgtcgcggataaagcgggaaatttgcagcggttttccgacgacggcgagccgcagggcacggcggggatacccattctcgacgtaatcaaaaacaaaaagctgtttgagacggcggcggcggtggtgcgctatttcggcggcgtaaagctaggcgcgggaggacttgtgcgcgcgtattcgtcgtgcgccgcggaaaatctcgcggcggcggaaatacgaagcctggaaatgtgcgtcgaatacggcatagaggtggaatattcggaggcggacgccgcgcggaaatttatttcgtctcaaccctgtaccctcctttcgagcgattacggcgagggcgttaccttccgcgtcgccgtgaaaaagtcgcaggcggggcgctttgacgaaaaattgaccgactgcatgcagggcagggtgaaaatttcggtaaacggagaatactacaacgctttcgaggcgtagggagaaaaaagagagggaaaagggtggaatatctgaatttaagggacgcggaggggctttgcccgcccgcgtacgccgacggacgtctgcaaatcgatccaaagctggtggaggcctataaaaaagaaataaaatcggagaggccgaagccgaaaagcgcctatgcggtattgattattctcaccgttatcgcggggttgggtattgcgctgtatctatgttcgaaaggtatggaagaagcgcccgccctgccgcagctcgtcgcaacgctcgtccttacgttccttttggcctgcgccgtcgtgtgcctgtttgcggtccctccgcgcatagacgaaaaacagaatttcgattggctgggctacggacagaagttgctcgatgcggaatttgtcgccgccgttaagcctttccgcgactattacggctataccgagccgaacgtggttacgaaatgttttgccgcttcggacggaaaatttgttttgcgcgacgtttgcgtatttgtcgccgcagacggaacgctccgcatcgccgcggatatcaggcacggctttttgcggatcggacacgatttgggctgttacgctttcgggcgggaggaaatttccgtgtcggagagaaataaatcggagctatgcatagaggacggaagcaaacggcaagggtgcgcgtatcttgcggcgggagaaacgtatttcgtcctggctgaccgcgctttgaagctgttgaaagacttcaaagagagagggccgcaaaaagaaaacggggaaaatttccccgcgggtattgacaaaagacaaaattcgtgataagataaagacacggaaggattttcgggaaaagcgcggctttttgcggaaacggcgggagcttcatttatgaggctcccatttttctgaaatcgtcgggaggcattgtgcgtaaaagggaaatgggcgaaaaggtttatcttacttatgaacagcagatagaaaagctgaaaagggacggactgattgttcccgacgaacgggaggcgaaacgcaggctgaaatgggagggatattacaattttgccgtcggttacaaccgccttttcaaagacgacaaaaagcgttatatccgcggtacccgtttcgaccatatagaggcgctgtacgacttcgacaagcacctgcgcggcatcgtttacgaatatacccaggccgtggaatgcaacataaaggcgctcgtcgccgatacgttcagcaagcgttacggcgtcaacgaacgctcctatctcgcggaggaaaattttacctccgaggagacggaaaggggaaacgtgcgttggctgatttccacctgcaaagagcttctcgaggacagcttaagggaggacgcaaagagctaccgcgactatatcgcgcacaacgcgagggtttacggacacgtgcccctttgggcgcttatccgcgccctgagctttggaaacacgtcgaaatttctcaagctgatgaaggggacggaccgcgcggagatcgcggaggaatacgggctcggcagctcggagctttgcaatatgacggaaatgctggtgggatatcgaaacatcgcggcgcacggggaacgcgtattctgcgcccgcctgcccgccgtgcggctgaccgaaaagcttccgattttccgctcgctccaaatcccccgtttccccgacggacgacaaaaatacggcagatgcgatttcctcgcgctggtcgtcattttcaaatatatgcttcccaaaggggagttttcggattttttgcgccgcacggtgcgcgaggtggacgcggtggaaaaggctcttcctccgtttgcaatgaggcgcgtatatgaagaaacgggcttgagcggcgcctggcgtaagctggacgccatgaaaaaatagataaaaatcgggaggattaaattatgaaatacacaaaactcggaacgagcgacttaaacgtgtcgcggattgttctcggctgtatgcgcatagcggataagcctctggagcgcacggaaaggcttttggaagcggcggtgggggcgggggtcaacatgtttgatcacgccgatatctacgggggaggcgaaagcgagcggctgttcggtctggcgctgaaaaatacgggcatcgcgcgcgaaaagattgtcgtgcagtcaaaatgcggtatccgaaaaggaatgttcgatttttcaaaacagcatattctcgaggcggcggagggaagtcttaaacggctgggaaccgagtacctcgacgcgcttctgctgcatcgccccgacgcgctgatggaacccgatgaaatctttgccgcttttgacgagctgtatcgctcgggcaaggtgaggcagttcggcatcagcaacttctccgtttcgcagacgaggcttttggaagggggcaggtatccgatcgctgccaatcaactgcaattttcgctcatgcacgcgggcatggtggacgagggactcaacgtcaatatgatgaagggcgaatcggtggagcgcggaggagaaatcctcgactattgccgtctgaaaaggattaccgttcaggcctggtcgcccctcaatttcggcatgttcgaggggattttcgtcggaaacgaaaaatttcccgagttaaacgcaaaactcgaggaattggcggaaaaatacgcctgcacccccgcggcgatcgcgtttgcctggattctgcgccaccccgcgggcatgcaggtgatcgcgggcaccaccgacccgtcgaggctgaaagagctttgcaggggagccgacgtggagctgacgcgcgaggaatggtacgccctgtatctttcgacgggcaaaacgttgccttaaacggcggaggaggctatgagcaaacgcgcgaaagtgcccgtaaattgtttctttcagggctgctacaatcccgaatacgaaaggaaaataagcaagtgcaaggacaagtgcttcaagtataatcaattgaaccccaacgacagggaaaatcagcggaagctgcttgcggagattctcggaaaagcgggcaaaaacgcgataatcaccccgcccttttggtgcgattacgggtacaatatcgtcgtcggggacgatttttattccaatcacaatctgattattacggacggggcggcggtgacgttcgggaataacgtctttatcgcgcctaactgctgttttactacggcggagcacgcgattgaccccgaattgcgcaaaaagggggtggagatcgccaagccgatcaacgtaggaaacaacgtctggatcggcgcgggatcgaccgtccttgcgggcgtgaccataggcgacgacagcgtgatcggcgcggggagcgtcgtcacaagggatattccgtcgggggtcgttgcggcgggggtgccctgtcgcgtaaaacgcgcgatatcggaggaggataagcgcagatatcccttttacgacgggaaatacgcggaagattgaagaagataaaacccgcccgcctttttgcaaggcgggcgggtttttgccctttttcagtcgttttgtccgtattcttccacgaggcggagaagtacccgcaccatggtttccaatgcgtccgcggggataaattcgaggacggaatgggcgttgaggccgcccgtagaaagattggggcagggaagccccataaaggaaagcgtgcatccgtccgtgccgccccgcacgggcgcctcgataggcgttacgccctcctttgcaaacgctttgcgcgcgttttcgatgagatgaaagtgcgggcggattttttcgatacagttgaaatactgatcgcgcagctttgcctccgccgcgccccgtccgtatttttcgttgagcctttcgcatacgtcgcagacgaattttttgcgcgcttcaaatttttccatatcgtggtcgcggacgatcagcttgatctgtcccgtttccacttccgcgcgcacgctttccacgtgataaaagccctcgcgtccctcggtcgtcgcgggcgtttcgtctgcgggaagcgaggcgagaaattcgcccgctattaccg

SEQ ID NO: 1499 - DNA, 3086 bp, Unknown
  16S sequences of unknown bacteria
cccggatgggactcgaacccacgacctctagcgtgacaggctagcgttctaaccagctgaactaccgggccacatgcctttggcgatgtgttcaactcacaaccgctccactattataataactataggagcatttgtcaagagaaattttcaaaattcgccgtttttttatttttcggcctatataagccggatgagagccgccgcgtctttcgctgaagtggcaaaggatgtcacaaatctgacaaccgagcgcccgttatgccgcttttgccaaactccgaaaacaaccttttccgacagctcctttattttttcgtcgctcattatgacaaaaatctgatttgtggggttttgtgcataaaactcatagcccttttcggcaaaaccgtttcttatgatttcggcggtttcaagagcgtttttcgcaagcctttcataaaggcggtcggtaaaaagagcgttaaactgaaggccgagcagacgccccttggcaaggagagccccctgctgcttgatatgggtgaaaaagtgggcgggagcgttgcccctcgggaaaaccaccgcttcgccgcaaagagctcccgccttggttcctccgatataaaaagcatcgcaaagagacgaaatgttttcaagtgtaacgtcggctcccgccgcagtaaccccgcaaagaaggcgggcaccgtcgatataaagaggcagaccgaatttttcgcatatgccgtgtatttcctcaagctcggccgccgaatagagagttccgtactcggtggggtgggaaagataaaccattcccgggaaaaccgtatgcccgtgatttttgtcggcataaaaatccgaaagaaaaccttgcaaatcctctgccgaaatttttccgaatttttcgggaagggttataaccttgtgcccggagctttcaatcgcccccgcctcgtgggtggaaacgtgagccgactcggcggcaacgaccccttcaaaggatttaagcagcgcggatattacggttttgttggtttgagttccgcccgtcagaaaaaagatttcggccctgtcgtttttgagcgccgaacgaatcttttccttggctttcgcgcaatactcatcctcgccgtagccgggctgaaaaaccccgttgcttttggcaaggctctctattatttcgggagcggcaccctcggaatagtcgttcaaaaagtgaagcattttcctttcactccgatgctattccgccgagattatggttccgccgccgagcacggtatccccgtcatagagaacgacggcctgacccgtcgtgacggcgcgctggggctcgtcaaaaacgattttcactcttccgtcaaccgaaacctcggccgtggcggcagcctcctttgccctgtatctgggttttgcggtcacccttgtcggctccgaaaaatcggaacccgacacaaagttaaaattgtttgcaaaaacggtttttgtataaagcccgctttcggggcaaagcactaccctgttgtgctcgatgtccttttccttgacataaaggggggcgggcagggcaagaccgagaccttttcgctgacccgtcgtataccgaataagccccttgtgacgtccgagcacctttccgttttcgtccacaaaatcgccctcggggaatttcagccccgcatagcgctcgataaagtctccgtaggactcgttttggacaaagcaaatatcctggctgtcatgctttttggcgttgacaaagcctctctgctcggcaagggctcttacctcgtcctttgactcgaattcgccgagagggaaaagggtgcgggcaagctgctcctgagtcagaaaataaagcacataggactggtccttgtcaagatttttcgcctttttgagaagatatttaccgctttccccgtcaaacaccacccgtgcatagtgccccgtaacgattttgtcgaattcaagaagctcggctcggttataaagcttttcgaacttcataaaacggttgcagtcgatacagggatttggggtttcgccttttttatagcagtcgacaaaacggtcgataacgcgggaagaaaaatcgtcggtgaaattaaagacgcggtagggaattccgagacggcggcaaacgcttgcggcgtcctccgaatcggaaagggtgcagcaggccttttcgcttgtaacattgacgtcgccgttgtcataaagcttcatggtgacgcccatacattcatatcccgcctcaacggtcagggcggcggcaaccgaactgtccaccccgccgctcatggcaatcagcgctttttttgccatatcagccgccgtattctatcatcttgtcgatacatttctttgcggcaagacgggtcttttcgtcaagaatgatttcctcgccgccctctttgcagcaattaagcaggtcggcaagggtggttatcttcatattgtggcacacaaggtcctttgaaaggggataaaatttcttatcggggcaatcgtattcgagatgctcggttatgctgttttcggttccgattataaattcctttgcgtcggaatttttcgcatattccataattccgctggtggagccgacataatcggcaagagccacaacctcgggaatacattcgggatgaacaaggaaaagagcgttcggatgagccgccttggccttttccacatctctgacctccattttcgcatgggtcgggcaaccgccgtgaaccagcttgatgtttttgtcgggaagctgatttttgatataagttccgaggtttatgtcgggaatgaaaagaatgtccttttcgggcatggaagtaacaatcttcacggccgaggaggaggttacgcagacgtcgcaaacggttttgagctcggcggtggtgttgatgtaggcgacgacggcataaccgggattcatgcttttgagctgttcgatgatttctctgtccatctgctcggccatggggcagcctgcgtccttgttggcgagatagaccgtcttttcgggagaaagaattttaaccgtttcggccataaaacgcactccgcacataatgactgtcttgttgggaacggcggccgcc

SEQ ID NO: 1500 - DNA, 8630 bp, Unknown
  16S sequences of unknown bacteria
cttaatatttcctgccagggggcttttttgtactgtccgcacaagatggggcagttcatgctcttggggtcttttctttgttacaaaaccttatttatttttcgtttcccaggcgtcataccgcacaatttcctccatgggtttgcggctgcgcacccggccttcctcggcgggatagccaaagggagataccgccaccacctggaacccggcggggattttcagcagctttgccacatcgggagcggaaaaagcccccagccaacaactgccgatgcccagttcagccgcctgcagctgcatataggacagagcgatggaacaatcgatggtgcgggccggctgtccgcaggccatatcccgcacttcatcggcacagagaaccatcaccacaggagcctgctccacaaatgcctgattccggcaggccgccaccagttcatggcgcagggccggatcggtgaccaccacaaacttccacgcctgctggtttgtagccgaaggcgccagtctcccggcttccagaatcttttccagcttctcttgctcgatgggcttatcctgataggcccgaatgctcttccgctgcaaaatggcttccataacgctcatgaggatcatcctttctcttctccacctttgcggccagaggccgctatgtgatctctttatttaatcatattgtagcatgcccttcctccccgggcaaccaacttgctttgaaaaaatccaaattccccttgacattgcctctatggcatgctattatgtacccgtggttagcgtaagctaactaacaaatcagcgggagttttctccctttgttttttgaatcatggttagcattaactaaccacaggaggtattcatggaacaaaccttggatcggctgctggcccgccactgtgcgccggcccttttaggggtcaagcctgccaatctggtcagtcttcccctggaggaataccggctgctggctcctcagatcgcctggtacagccatgtgcttcgacagcggggattgcggtttctcaccctggaccgccgctgcaaaacggtactgcttctgatctattcccctgcggagctcaagcggcatctggagcaggagtcttgccgtcagatgttgtctcaggcgggctatccatcggaaggactcagcgaaaaattgcttttcctccagtccaggctggccgaaaaccaggactttccccatgagatcggcctgtttctggggtatccccccagagatgtgctggcctttcagcaaaaccggggacgatgctgcaaactgtgcggctactggaaggtgtattccggcctgtgccgtgcccggcttttgttccgccgctacgactcctgccgggactatctctgttcccgggtggcccggggcgagaccattccccaggttcttgaatgtgcttgatcgtatcccatctatgatataggaggcaatatacctatgaaaaaagtcgctgtaatctattggtcccagacaggcaacacccagcaaatggcccagctgattgctcaaggcgcattggaagggggagctcaggtggaatgtatgcctgtgtcctccctcacgccggagcaggctctggagtatgacggattggctctgggttgcccggccatgggagcggaagtgctggaagaagccgaattcgatcccttcttcacccagttggaaggccatctgcaagggcgtactctggctatcttcggctcgtatggctggggggacggagagtggatgcgctcctggcaggatcggtgtgccgcggccggggcctctctcgtcggcggtgagggcctggctgtctgcggcgctcctgctggtgaggacgaagctcgctgcattgctttgggcaaagccctggcctgattgttttttcttgatcctttgatgtgatctttctgtttagcggggttgatctccgccggcgggggccggaaggtccctgccgtcctccttctgaaaaaggtgaatctttatgctttcatccactgtcattcgttatttgctcacgatttatcggctgagcccggataaccgccccatcccttcggttttcatttcccgccagctgaatgtgacccgctccagcgtggccaaaaccctttcccagcttacggaagaaaatttggtggaaaaagcccactatgggaaggctcgcctgtcccctttgggccggcgattggccctccaataccaaagagaacaacagactttccatcgtctgtttgtccagctgggcctttctccccaatcggcggaacaagaggccatgactgtggtttccgccctttctcctgaagggaaacaagctcttgttgctcttttgccccatcccatgcctctggcctcaggaaactgagcgatgttctccttcttcgcttccaaaataaccgaaacgggtggtatcaagcccctggtttcatgccatccgtttccgctattttccctggactgccctccaggatgggcggagatccttctgtactcttatcctcatcatctcacacagcaaaaaagccgcctgtatgggcggctttttgctgcatattcatattccttccagtacttgctccagcagagacgcgcctcctaagatgttgatcatctccagaagggctccggccgtcatattttccggcaaatccagctttttcagcagcaaacggcgcttctctttgctgtccggtccgccggacaggcccagggcataaaggtccgctttggtcaccggcttttcttcttccctggtttccttctcaccgttcatggccacgccgctgcggcgcaccgcctgaatgatctcctcttcggtgaccccttccacccccaactttccctcccgggaaggatgggccttccgcttctctttccccaaacggtcggggatgtaagcatggtacacctttccctctgctgctatgtttttcagatagccacggatgagaaacccggcatgatccggatcggtgagcaccagaattccccgcgtctgcgccagacggcggatgagagcggccttttccttgtctttgaaaatgccaaaccctgcggtctccagcactacggtatcaaagatctgtttgatcttattcttgtcgtaacggccttccacaataatgaccggttcaatggagatcacgatacccgctccttttcggccgccatgcgcagcagcaatagttccagcacccgggcatcatccggggtattgcttttcagttctttgtccgcctgatcgcacaaaagcagcgcccgacgcagccagggaaggctgcgttttcctgccgcttggcgtaaaagcttggccgggtaactggagcgcatatggaagagctccatcaaggcactctctcccagcccggcctgctgagccagttttgccgcatacagcttctgtacctgcttgccgatggacccggccagcaccaccggctcaaacttcagcgccaacagatcccgcaatgtgcggatggcggccaccgtatcccccttggaaatatagtcggtgagctgatagatctgggcttccagagcccgggaggccagttggtcaatggcctggcggtcgattcgtttttccatggtcccagcggcgattttgtcgatctcactggccaagttggtcatcaggctgccgcagacaaaagtgagatactcgcactcgccgctgtcgatctcctttcccaaagcggcaaagcgccgcttgatccaggcggtcagctccccttggggcgccttggcaaattccaccgcctgtccggccttgagggcggcctgccaggttttcagccgcttgtccggcttatattccagagcgtcaaaataaaggatcatgcacagggtatccggcagattttccaggatctccggcagctgctcccgcagcccggcgggcggacggctgagattcagatcccggatgaggatcagctttttttcactcatcaccggcagactttctacgctgtcaaccaggtcatccagggtcagactgtccccatccagcaccacctgattgaactgggcgaaagcctctccaccgatcagggaaaagatccgatcccgataatgctctttcagatagctttcttccccataaaacaggtaaagcttttccaggctgccctgatccacatcctggcgcagtttatcgtatgcagtgttcttttcgccctttttcattcttcgtcctccccggcggcccctgccgcccacaactccatatccatccgctccccatcctccagatagagaacggggccggaaaaggccgcgcccaatgaggcactttctcccccataagaggagcgagtgcacaccagcatctgacagcctgtacggcggcagatagcagccagccgaggcaaatcctccgccgccttctggtccaccagcaagacctcacactgaagatcctgttctttcaccgccgtcaatacctctcccatgtcctgaccacaggtggccagcactgtgcaggaaggcaaagccagctggagcagatagcccttttcctcaggaatcaaagcaccctcgccaccggaaaaggaaaaccgccctccttctccgtagacctgtttctcctcccccagcatcagtgaagagagaacccccttgggtgcgctcacccgctgaactccggcccatcgatcttccggcggcgcaatgggagcgatcccttctgtgcttgtgagccacaaatgggagacctgggccaggcccatccgatccagggtatcctgagcaccccggtaaaaatcgtcccctttcagatccccggtgctaaaagcggtaagctgtcccgcctctcccaccagcaaaagaccgctgccgccgcagttgaccaccgacagagaaagggtcagcgcctgctccatcccgactccgctgaggcaaacaaagccgcagaggaaataggtagcaaggcctcgccccactccctccttctttcggaagaagaacagggccacgcccaatcccaaaagggaaaagaacagcatcacaccgccgctgctcaccgaagaaaaggggagcgctgccgtctttcgctgcaccagatcgatccaccaaagcagggggtgaagcgccagggaaagcatctttcccaatatcggccagaagctgcccgccaccacaaagcagagccccagtacaagcaccggcgccaacaatggtacaatgagcaaattggaaaacaaggccaggagggacacccgctgaaagaccagcaccgaaatgggcaaagtgaaagcctgggccgccagcgtcaccgccatgccttccaggatcttttccagcaaacgatgcttcccacccagcttctcccgaatggcctgctgcattggcggaaagagcaacccgatgcccaacaccgaagcaaaggaaagctgcaatcccacattcagcacactcatgggagaaaatagaagcagcagcaaaagagccgccgacagagaagacagcgtgtctttctcccggcccatccaaaaagcggccatggcgaaaaaggccatgatcaccgcccgcagcaccgagggcgttcctccggccagcaccaccatcatcaggcacagtggaatccccacaagactcccgccctttttcccaaaaagggcaaaagccactcccagaagactggacacatgaagcccggacaccgccgccaaatgggctgttccactgagattcagatcccgcttttgctgggcggtaaaatcctccttatttcctgtgatgatgccggtgagcaaggcactttccctttgggggagccatttcccggccacctttgccacctgctggctcaaaccttgcaaccgaagccaccaaggcgtttctctgtcctgcgtttgaagctctccggtctgggatgcctgcaaaaacatcccctccgatgaaaagccacgccggggttccaacggtgcccgggacagacgcacttccactgtaaaatgctctccggcttttatttcaggagaggcatcctccagatacaaaggcaaggaaaaatttacttcttcttcccccaaagccagaacgcgcacctgcacctggccatagctgcctttgccccgggcctcctccaaggccatgcactccatggttcccgaccagccgctgaaagccagctggggctctgcccgcacaaggcgccaaaatccgaaaaaggctgtgcccagccccacaaaggccaggcacagcaaaagcccgtttcgccgtccccaaggcagggtcagcagaaacaaaccgaaaaacagcgccccggccaatgccagctttcccaaagcgaaaccgtggcaaaatgccaaagcgctgccaaaaatggcgcaaacggcaccggcagcggcccaacaaaggggccgctgcgccggaaaccgtcccagccactctttcatctcaaatcaggccatcttacccaaaggcccgccggccagcacatggaaatggatgtgctgcaccgtctgcccggcatcttcgccgcagttggtcaccacccgatagcccttgtccagcttcagttcccgggccagtttggcaatgatctgataaatatagccaatgatggcgctgttctcctcggtcacctcgccgcaggagctcatgatgtgctccttgggaatgaccaggaagtgtaccggcgctgccggctcaatgtcatagaaggcatagaccttctcatcttcgtaaaccttcttggaagggatctctccctttacgatcttgcaaaacaggcaatcatccattgtctatccctcactttaccatttcttccacgatgttgttcactgcttccagagccgcttccagcttggaggggtctttgccgcccgctgtggcgctgtccgggcgtccgccgccgccaccgccggtcatcttggccacctgcttgaggatgttgcccgcatgggcacccttcttcaccgcttccttgccacaggccgccacaaagttgatcttgccttcctctgtgaccaaagccagcacactcaccagattgggagccttgtcccgcagatcgtcgctgagagtacgcagcatatcggaactcatatcgtccaccttcatggccagcacattgacaccgctgtccccggcggtgtgggcaaagttgagcatctccaccgaacggagagccgccacccgggcgctgagcttatccaccttgtggagagcctggcgcaggtcgttcatagtctgctgggccttgttcaccagctccatgggagaggacttgatggccgccgcagcctgggcgatcatctgctctttttcatggagcatggccgccacctggctgcccaccaccgcttcgatacggcggacgccggcggccaccgaggcttcgctgacgatcttcagcagacccacccgggcagtgttgggcacatgggtaccgccgcacagttcaatggagtaatcccccatctgcaccacccggacccgatcgccgtatttctcgccaaacagagccatggcccccagctttttggcttcctcaatgggcatttccgaaatatttaccacatcgtcccgcaggatctcttcgttcacctgcttttccacttccatcagctcttccggagtgacggcgctgaaatgggtgaagtcaaagcggagacggtcgggctccaccaaggaaccggcctgctctacatggttgcccagcacagtgcgcagagctttctgcagcagatgggtggccgagtgggcccgcatgatagcccggcggcgatcctcatccacatgggcctggagagtatcatccacattcaccgttccctccagggcttccacctggtggaggaacttgccgtcggccgtcttgcgcacagccagcacctggagaagggttccttcccggcgcatcacaccggtatcccagctctggccgccgctttccgcatagaacggagtctgatccagcaccagagtgccctgggccccctggctgagggaaccggccagttccccttcggtgacaatggccagcaccttgccggtgtcctccagcttgtcatagccggtgaacacagtggcgggcagctccttgagggacacatcgtctccggcccagcccagccctgtggtgttgccccgagcctgacgggcccgctcccgctgggcacgcatcatctcttcaaaagcctgacgggccaatttgaagccctgctcttccaggatctccactgtcagatccaccgggaatccataggtgtcatacagtttgaaggcatcctcgccggacagggtgtccccattgccacggagagcggcgatcatctcatccagcttcacaagaccgctttccactgtggcggcaaagcgctcttcctcggtgcggatgagctttttgatatattcttctttttcccgcagctcgggataagcgccctcgttttcctggatgacggtttcagccacttctgccaggaagggctgggtcagccccaacaggcggccatggcgggcggcccggcgcagcaggcggcgcagcacatagccccggccttcgttggaggggatgacgccatcgcacaccagcatcacgctgctgcggatatggtcggtgatgatccgcagggatacatcctgcttcttgtccttg

SEQ ID NO: 1501 - DNA, 4857 bp, Unknown
  16S sequences of unknown bacteria
ctttttcaccaccaccattcattttcggggttgacttttaatagttaatctttccgttatttgttttcttcttgccgtccccggttttgttgagtctgctggtagccgccacggactccctttagcgtcctgctctgcgccgtcaatctttccaacacgacaccaacgagcaacaaggtcttgtgttactccccactttttagcggcctcttttgttcccatgtactcgcccaataacaattctccctttgtttgttttgtgcccattctatcacagaacatcaggtaattcaatatgttttacatcttgttttagttgattttatttgcttgcgctatcacccatacttgatattgaggtgatagtattgcacacaagaattagaaaagcccgtgaagatatgggatatacaagagaacagtttgcggaaaagttagatgtgagcgtatcatatatggcagaagtagaaagaggccgcacaggtatatctgtcaaaatgctgataaaaatatgtgatttattaggactatcggctgattatatcctatttggaactaatagagatactgatacaatgatattagataaaatccatagaatagataataaatatattccactcttaaataagattattactgaaattcttgcattgagtgattaaataagcggctagtatcaaatactagccgctttcctattgaaaaatggtctttcagcctttggtgccatgaatgaccttgatccattttcggcttcgcagccggaagacacaccaaatgcatttgatgatctgatcgactttcagcatggtatagatccagaagggggaccaatggagcaccatgccggccaggtaccccaaggggatggaagccacccacagaaagaggatgtcccctaccatcaaaaacttggtatcgcctccggcccgcagcacgcctttggtcagaatggagttcatggcctggaaaatgatgatgaagctgatggcatccatcaggctccaggcgatctctttggcctggggcgtcacctgataataattgatgatgggactgcgcagcagcaaaatcaccactgccgccaggcatcccacaaaaaatcccaagcccaggaaggtatagccctgccgctgtgccttgtcatattctccccggcccatggtatgaccggtaatgatgccgctggcattggaaataccctgggtcagcaccgagctgagctgctgcaccacagtggtcaccgaattggccgccacaaaagcagtacccagccgtccggtgatcatggccacagcgttatttcccaaggccagcaagccgtcgctgaccagaacagggatgctgatgcgcaaatattcgctcagaagatcccggcacttcataaacaaatgcccgatacgatagccgatcttctgatcccggaaaaagaaataaccgcaaataaacaccagctcaaaaacccgggaaatcagtgttcccagtgcagcgccggcaatctccatccggggtgcacccagatggccgaaaataaacacccagttaaagaaaatgttgataaagaaagccagaatggagcagaacagcggcagctttacttggctgacactgcgcagaacgatggtgcaggtcaaagacaggcccatacagaaataagtgggcagcagccagcggagatagagcacaccgtaatccaccgtaaccttttcggaagtatagattcgcatgaccatctggggactgatcaaagtggccagggtaaacatcgcggcaaaggccagacagatgcgaagcatgatggtgatggctttgcgcagtccttccttgtcctgcattccccagaaccgggaagtgagcaccgaagctcccataccgatgcccatgcaaaagatctgaaacaggttgataaactgcccggccagggccgaggccgaaagctgggcatcccccatgctgctgagcatgatggtgtccatcagattgatccccacggtgatcaactgctgcaaggagaccggcacggcgatgcgcaccacatttttataaaactccttgtcccccagatatcccctgagatcccatttttcctcactcatggcgcccctccttcccgagacgctctttgctttgctctttccttgtcacaaagcacctctcctttcgttttttcatccaattctattataaaaacattgtaagtttttcgtcaagtttccctagttcattcccatcgtcgtttcttcgttgatatttttgttctaccatattgacatctacattttctcatgctataattcataatgtccttcgaagaacgaaaacaatcacgaaatccgaaaggagaatatcacatgacaaatcaagaaattctgcatcagttgaaagagatccagggccaggtaaacggattgatccaggccttggagcgggaagagcaaagccagtcggtcactgctacggtgggagaagtgcgccgggccgccattctggaagaagtctaccgccagggcggcagcgtgacagcggcggacatttcggtttttgcccagcgctatggccgctcgccccgttcctgtggcggctattattccggcgccgctccctctctggccgccagcgaagataaaacccgtcgtgaactcaccgctgtgggaaccgaactggtgctggaagcccgggaaaaatggggagaagattggctggaccgtctgcccatggatgtgctttccaacccccacaccccggataccaccatcgctttttgatcttcccctcttccttgacacatccttcttccagtgctacacttcccctggagaccgccggattttctccggcggtcttttctttcgcaaaggagggcttttcttgaaggctgttttgctggcctgttcttctttaaccaaagatgtaatggccgcccaggaaaaaatgcacaccaatcacccggtgatttggctcaatcgaaaataccatgcagatcccaaagaaatgcgccgtcagattcaaaagacactggactcactggatcagtcggtggacaccgttttggtggccatgggcttttgcggcggctcctggggggatctggccgcccgacagcgcattgtgattccctgcgtagacgactgcatcaccctgctgcttcacaccgatgaccgaaaggcctccaatctgaagcaaaccggccatttttatttccgggaactggatgccggagagatttccttggaaagtatggaaaagcgcctttgtcaaagccgcggagaagcccagggccgtgcccttttccatcaatggtttgatcctttcacccatattgatatcatcgataccggaacctacgacagttatgctccggcccatctgcgccatgtccagcgggatgccgatctgacccaatgtgccgtacgccatgtcccgggcagcatccgtatattggagaagctggtatccggtcagtgggatgaacaattcttgatcgtggagccaggaaattccctggcctggaaggatttcttttgattttctgccagaagcccatttttcagccgccgtcaggcggctttttctttttttgaaattccctcttgacaaagccaacggacaactgtattattgtaccatgttcttaatacagtgatacaaaaggagcgtgagcctatggcctggcaatttgacagcgaccgccccatctatgcccagctggtggagcagataaagcggctgatcctctccggcgcctatcccccaggcagcaaactgccttcggtgcgggaactggcggcccaggcggcggtcaatcccaataccatgcagaaagccctggccgagctggagaccgatgggctgcttttcacccagcgcacagcgggccgctttgtcacagaggatggtgaagccatccagcggcttcgacgacaactgtgccaaggcatcttggaaaacttcatccaaagcatgaccggtttgggattcactccccagcaggctttggaacaattacaacttcatgtggagggaagaaactgatgaacgctttactggaatgccgtaatctgaccaaatcctatggcagaaaaccggcgctgtccaatgtggacctgaccatctcccccggccggatcgtgggacttctggggcccaacggcagcgggaagagcactttgatcaagctggccaacggtctcttgacccccaccgccggcgaaatattggtatgcggcaagcgtccgggagtggaaagccatctggcggtatcctatctgccggacaaaaattatctcaacgactggatgcgggtatcggacatcatcggctatttttccgatttctatcagaattttgacgccaaccgtgcccgggatatgctccgccgcctggacatcgacgaaagccagcggctgaagtccttgtccaagggcaccaaagaaaaggtgcagctgattctggtgatgagccgcagagcccagctttatctgctggatgagcccatcggcggcgtggacccggcggcccgggactatatcctcaataccatcatcacaaattacgacgaacaagccagtatcgttctttccacccacctgatcgccgacatcgaaaaagtgttggacgatgtgatcttcctggccgaaggccgggtggctctggtgtcctcggtggacgagatccgggagaaaaatggaaaatcggtggatgctttgttccgggaggtatacaaatgctaaataaactgctaaaatacgaatttaagtccacagggcgcacctttctgcccatctatggcgccctgctgatcacctctttccttacccggctctttgtcttcaacaaggacttctccaattcctt

SEQ ID NO: 1502 - DNA, 2873 bp, Unknown
  16S sequences of unknown bacteria
cgagattcgccttagtctcgtgggctcggagatgtgtataagagacagagcctgtctcatgccgccacccaacattttgcggtgcctgcgcgccctatggataaactgcttacttcccgcaaccatacttcctaccggcgcgcaaagccctttggaaaggcagcacatcacgctatcgcaatattgtgtaatctctttaacatctacccccagcgccgtggccgcgttgaacaaacgcgcaccatccaggtgtaccggtatacccgcgcgctggccgatgcgatagatttcctccatttctgaaagcggcaccaccgtgcccatcgaggttgcattttccaggctgatcaggccagtctgtggaatatgcacattgctgtcatccgtcaaagccgcctgtatatcttctggggccatccgcccgtctatcgtcggcaggatattcgcgcataccgcactcatcaccgcatgcccgcctgcctcgtttgaaacaatatggtatccttctccgctgatcacagcatcgccgcgctgcgtatgtgccatcaagctaacttggtttcccatcgttccgctgggcacaaacatcgcggcttcttttcccagcacctcggcggcctctttttccaaccggttgatggtagggtcatcccccattacatcgtcccctacctccgcgcggtacatcgcttcccgcatcgcctgggtaggctgcgttacggtgtcgctgcgtaaattgattatatgcatcgtatccgctcccccttattaggttccttttgtatggattataacataaagtatatctttgccgatgaaaaatttccgagccttatgtcgtgtgctctcctagatcgccttcccagcccattatgctataaaaggcagactgaattcagtctgccttttgacatgacgcccgctctaccagtatgcagggcaatatggccttgataggctgaggatcctcatgccggctgagcacatgatacagcagcgacgcgccatatagccccatccagtgggctggcgcgtgtatggttgtcagtggtggattggtaaaccgcgcggcattgatgtcgtcaaatcctaccagggaaatctcttccggcacgcgaatgcccgcttcctgcaaagcacgcaacgcgccgatggcaatggggtcgctggcgcaaaacacagcagacgggcgatcttcatttcccagtattgttttcatcatccgataccccgcttctgaagtaaaggcatcctcttgaatgtatggcaacgcttctatcccattttttttgcaaaaatccaaaaaccaccttttccttgcatcgggatacatcgtaccatccgctaaaaattcctgtccgcccagatacccaatccgtgtatgccccaacccttgtaggtaacataaggccgccccaaccgcttgttcaaaatccaaggtaatgctgctatcccccggctgcggcgcctccatatccaaaaacaccagcttagaggtatgctgcttgaaccgcgctgcctcctgccgggtaaatttccctacgcacaaaagcccatccacggcaggcaaggcatcggtattctgccagtccgccttgaaaatacgctggatacgaaccccattttgctcacaaaacgtttctatgccctgtctgatctgaagataataaggatcctccatttcctgtgccaaagtataccattgtacgatccccatcgtataaatatgcttcggcgctcttctctttttgatataatgcagcgtctctgccgcctgtaatacggtacgcctggtctcttccggcacggataaagtcgcatcgttgtttaaaattctggaaaccgttgcgctggaaacctgcgccagctttgccacgtccttgatggtgggcatttcattcctcctataacggtacggcgggccttttttaccgttggcccgtctttggatatattttattatagtctttaagtaaatataagtcaattttttagtaaatttattgccaaaattttactaaatacaattgacaattccctaacaagcggctagagtaaaaatagaaagggaggaagggtctcgatgaatcgtgaaatcaatgcactgctccagtatgctgtgcaaatgggcttattgccgctggaggaatacgattatgccgccaatctgctgttggatctgttgggcgaagattcatttgcatatgagcccgtgcagcctctgcccgaaacggctgaccctatcctgcaaacactgctggacaaggctgtttctaagggccttatcgaaaacgacggcaccagccgcgatctatttgataccaggatcatgaactgcgtcatgcctcgcccgcatacggtcatccagagcttttggcaggcctatgccgataccccgcagtctgccaccgattattactatcgcctttccatcgcctccaactatatccgaaagagcagaacggataaaaatattgtttggaactcgcccaccccctatggagatatggaaatttccatcaacctatccaagccggaaaaggatcctaaagagattgccagggcgcgggccattcagccgagtggctaccctaagtgccttctgtgcaaggaaaatgtagggtttagcggcgatgcggccagagccgccaggcagacgcaccgcatcatccccttggcgctggcaacgggcaaatactacctgcaatactccccctatgtatattataatgagcactgcattgtgctcaatcaaacgcatcagcccatggtggttgataaaagcacctttcaaaacctcttttcttttttagatctcttccctcactatatgattggctccaatgcagacctgcccatcgtaggcggctcca

SEQ ID NO: 1503 - DNA, 32759 bp, Unknown
  16S sequences of unknown bacteria
atggtggacgcgaaagggctcgaaccttcgacctctaccatgtcaaggtagcgctctaaccagctgagctacgcctccgaaatcttgctttactattataacaaataatctgtttcccgtcaactgatttgcgtctgtttttacgatttttacgaaaaataatttcaataaactttcacgatcctttatttgcgtcgcgtcgccgttgactttttgcttcaaatggagtataataatatcgccaaagcggacggtgtgccgccgcaagggaggaagctatgatcgggacggttgcgctcggtattttagtaccgtttatcggaacatcgctcggggcggcgatggtttttctcttgaaaaaagagatcaatccgaaaatacagaaattattgctggggttcgcctcgggggtgatgattgcggcgtccatttggtcgctcattctgccttcggtggaattggcgaaagaagcaaaaacaatcgaatggcttcccgccgcggtcggcttcgtcgcggggatgcttgtgcttttgctgctcgattcggtcatcccgcatcagcatatcgattcggaggtgcccgaagggcataaatcgacgctgggaaaatccaagctgctgtttttatccgtcactctgcacaatgtgcccgaggggatggcggtcggcgcggtatttgcggggcttctcgccgcggggcaggaaatctcgattgcggcggcattctctctgtccgtaggcatcgctcttcaaaatttccccgagggcgcaattatttccatgcctctgaaggcgggaggaaacggaaagggaaaagcgtttctctacggcgttttttccggaatagtggaacctgtcgcggcgttgatcacggtactcttttccgctgtcattatgcctgtgcttccttatctgctttcctttgccgcgggggccatgatttacgtggtggtggaggagctcattcccgaatcgcagagcggcgatcactcgaatatcgccacgatcggcgttatgctggggttcgtcattatgatgatcatggatatggcgctgggttaaagggaaaaaggactttttagactttgttttttcaagtttttccgaaaaaaacagaattttccaaagttgaaaaagaaataaaatttttttgtaaagtttgtttaatttgatgttttattccgttgactttcggcacttcgagattataataaaaggtgttgagcggagaaaatccgcaataaaatcaaaggaagaacagatatggaaaacaattacgacccttttgaaaacgtgcgtacggtaatggacgaggccgctgagctcggctgcatcgacaagcggctgtttgagattctcaaaaatcctcagcgggaggtaaaggtgtatctccccgtggaaatggacgacggaacggtgaaggttttcgagggctggcgggtacagcattccaacgtattggggccgttcaagggcggaattcgctatcaccagagtgtatgtctcaacgaagtaaaagcccttgcgacctggatgacgttgaaatgcgcggttgtcaatctgccttacgggggagcgaaaggcgggattaaagttgatccctcaaagctgtcgcagcgggagctttgccgtctgacccgccgttatacgtatgcgatcgaaccgattataggcgccgataaggatattcccgcgcccgacgtcaacaccaacgcgcaaacgatggcgtggatattggatacatacagcatgctcaacggtaaaccctgtccgggggtggtaacgggaaagcccgtagagctgggcgggtcgaaagggcgcgtttccgctacgggccgcggcgtagtgttttctacggcgtttattctggaaaagtacggaaaaaagctgaacgaagtatcgcttgcaattcaaggcttcggcaacgtaggcggttatgcggcggagatatttgccgaaaacggcgcaaaaataaaagcgatcagcgacgtctccggaggtatttactgcgaggacggattggatatcggtgagttgcgtaaattcgcggccgataaaaagttgctcagggattacaaggccgcaaacgtgaagcatatttccaacgaagaggtgctggcggcagacgtggacgttttagttcctgccgctttggaaaatcaggtcacggccgagattgccgaaaagctccgttgtaaatttcttgtggaagcggcgaacggccccacttcggtggaagccgacgggatactcggaaaacggaatatcgtgctcgtccccgatatctttgccaacagcggcggcgtcattgtctcgtatttcgagtgggtgcaaaatattcaggagctcacttgggagatcgaacaggtcaatcgtatgctcagggaagtcatgcgtaaagcgtttgacgatatatgggcgacaaaagaggaatgtaattgcgatttaaggaaggcggcctatattacggctcttcgccgccttgtttacgcgcaggaaataaaggggattttcccgtaacatagagaggtacataagatatgcgtaaaaccgaaacccgcgtgtcgtccacggccgacgacaccgatttacagatactttcccttttgcagggcaacgcgcggatgtctattaaacacatcgcggaaaaaaccttcctttctcccaccgcgatctcggcccgcatcgaaagattggaaaaggacggatatatcgcagggtattacacgcatatcaatccgcaggcgtttgggttcaacatcaaagcgtttatcaatctggaggtggagcccgtacagaaaaaagaattttatccttatatccgttcctgtcccaacgtagtggaatgtaactgcgtgacaggggattacgcgatgctgatagaggttcttttccgtactacgaccgaactcgaccactttatcggcgagcttcagcatttcggaaagacgaaaacgcagatcgttttttctacgtccgtagagcaccgcgacgcctttttggaattgaaataaaatagcttaaaagcttcgttagccttaaggagaacgaagctttttgtttcacgtgaaaatagaggaagaaaaaggaaagagaaaatacgatgaaaaaacgataaaaatactttaccatgctttacttttagataaaaagaagctataataaagataagggaggctcgaaagggaatggaagaaaaggttaggcaatacaaatattccgttctggaatatctgcggccatatctggagcacgagtccgtattgaaaatgaaagcttacgtacagcacggcgacgtcagcacctatcggcattgtctcaacgtggcgtgttacagcctgtatcttgcgcggaagtggcgttggacggtggatgaagaaagcttggtcgtcggggcgtttttgcacgacttctatttatacgactggcatatccgcaagcggaaaggacggcttcacggggtttgccatactgcgctggccgcgaaaaatgcgagggagacctttggcgtcagcgataaaatatattatatcattcgcacgcatatgtatccgttgactccgatgtggatgccgcgttccaaagagggatggctggtatgtctcgcggataaatactgcgcgacgcacgaaacgatgaaaaagccccattctcgcgccgtcaaagaaaattagaacagacaaataaaaaagcgcctgaagccgtgcggcgcaggggctttttataatgctcaaaacgtttattcatttccggcggcagagtttttcgaatttagagaaaataaataatagaataccgcaaagaaaacgaggttgagaaggtaagcgacgggcagaagcacatacttgagcagctccgcgggctgcttgagatctaccttgagatatacggcgatcatcgttaccgcgatgacggcgatgacaaataggatagaggcgttgaggatataagcgggatgcttgcttcggcgggcctgggggcgatagccgcaggcatacatgatcgtacacacgagaaaagccagaaatcccgcgccgcagccgattgcgggatagagccccgaaacgccgattttgtcctttacgaaaaagacggcaaggctttctgcaatcacgatacaaaacgcgatgagagccgccttaaataacgtcaagcccttattgaaaacgggggtgaaattgtctcccgcggccttgggctttccgcccatgctgcctgccgttttaatttggataccgtccgtccttgcgcgttcgtgcagatctccgaaatcgatccgttgctcctgtttttcagcaaagggtgccgattggacaggcgtttgggaaagcgggccgtttcgcccgccttcggcgtatccggcagcggcagccgtatagggggcaggggaggtgtagaactgatctgccggcgccgcgtatcccgcggcatagcggcgggagttaaattctctgcgcgctgcgttcaaagcgttttctctgctttcgagatcgagctcccgttctttaagctcggtagtctgtctgtccagtgcggcggatttttcctgaaattccgcaagggattcgaggtgctttttatcattttccaaccgcgatttttccgcttctgttttttgcctttcaagctccgctttcgtttcttccagctctgcctgtctcttttcggcctcctgcttttccgtctccagcttctgcttgagcaattgaaattcgttcttttcttcgttaaaccgcgcgagactttcgttaaattgttttacctgcgcgttataagtgctcaacctgtccgcaaaattgaactgctgagccgcaagcgtgtttttttgcgtcataaattccagctgttgctgattgtagattgcctgtctcgtagcaagatccttctgctgctggcggagcgcggccgattcgttttgcagttgttcgctgagacgaagtagctctgcatgtctggcggacgtctcgtcgcgctgacgctgaatatccgcagaggacgtatccgtctgcgatttttgcatttccaaagtctggcggcgggcttccagttcgtattccttttccgtcagttcgtagtttttcttttccaggtctgcctgtttttccgtaaactgcctgcgcgcctcctctaaagctgcctggtcggtttccagcgcttcgcttttcgactgcagttcgttttccttctcgtcgaggtaggtcttggcgctttccagcttaaggcgctccgcttcaaacgtttccttttccgcggtaaaagcgtctctttccgtttccaacagttctctgagacgttcgtattccgcacgttcggctgcgatagcttcttccttctccgcgacggcagcttcccgtgcccggagttcggagagggtagaggagacgttttcttccgaggatttcatggaatcggtcaattcttcgatcgccttttcccgctccgcaagctccgtttccttttcttccaagcgggctttcgtctcttccagctccgcgagcctttctgcagtttcctgcttggagagctcgagcttttctctttgttcgtccagctgtgcctgttgggcctttaattccaccgaacggttgaaatgttccgccgttttgttttcaaggtcggctttcaaaagctgcatcgcctgttcgtgcgaggccaaagcgcttcgaagggcggcaatatccgcctttttctcttcgagttccgtttttaccgccgaaagctcttcgttttcctcccgcacgctttcatattccgtctgccgctgttcgagcaggactttctgttcctccagcttcgtctgttcgtctcggaggcgggaaagcaggtcgtaattctccgaggttttttcgtcgagctccgaccgcagggaatcgagggcgatcgcccgttcttcgatgtctgcgcgctgaatcctgactttttcttcggcggcttcaatttctctctgcttgtccgccatgcgggtttcggtagcttcgagcgcggctgtgcgggcggcaagctcgctttctttgtccgcggcggaggattgcagggtggagacggcgctttcgcgttccgcaagggctttttgcgccgcttcgagcgcggagcgcttttcttcgagttccgcctgtatagagagcagatcgtcttgcttttgcgctaattcttcctgaagggaagacagctccgactgcttttcttcaagttcttccgattgggcaacggtggaggctttaacttcgtccagctccgtgatcttatcgtccagctcggttttttgggattctacggtatttttcagcgcgtctatttctccgcgctgtctttcgagctctgcctttgcctcgcggatttcgttctgcttttcgttcagctcgatctccttggcgtcgatttcaccctgcttttcgcttaagatacgctgtttttcttccagctctgccttttgagcgtttattttgtctttcagttcgttgaagtcggatttctgcgtacttaaagaggagctttgaaccgacagcagcgaccgttcgcgctgcaattcgtttttgagattattcagggcgtttctttcgtcttcaagggcggattcgcgcgcggcgagcgtcttcttgatatcgagaagctccttttgcttttccgtgataaaagaaaagtcgtagtgggcgttgccgtctgagataaggctgtcgatgatcgttctcgaatattcccattcggaaagatttctttcggtgatctccttgcccttatccgtcaaccggaaatatttgcgccgcccgccgttggaaaagtcgccgtaataagactctacgtagcggagggcttcgagccgcttaagcgcgctgtaaagcgtaggctgtttcaacgtataaagtccgccgctcttcttttcgatctcgtttataatatcgtaaccgtacttatccccgtcgtaaaggcttctcaagatgatcgtattgatgtgcccgcggatgagatcggagctgatcgtgatgccctgttcttcggcgcctcccgtcagagaaaattcttcgtcgggaatatcctcggcgcgcagtttttcctgttcagccattttttatctcctcattggtaattctgcctgacagagtattggtctgtctgaaatactgaaataatactttacatacagtattatacaacaaatatatacataagtcaacagaaatcctcaaaaaacctctcaaaatttgtaagttttttaagcggctccactgtcgagaaggttggtaaaaaggcggcctttttaccatatttatcatagataagggcgtttgtccgttgactttttttttcgtggggtgtataataattttatggaattatacgaacatattaaaacgtttgacgttaaatactgcgacgtggattttaaggacgagctcaaaccttcggcggttttggcgtaccttgaagaagtagcttgctccagcgcggacgagctcggtttcggctattcgtaccttaagccgcgcagttatgcttttatgctgacgaatatccgctgcgagtttcttgcgcccgtaccgctcggcgagcatatctctgtaaaaacctggccgacgccgccctcctatgtcgttttcggaagggaatatcaaattttatccgcaaggggggacgttttgttaaacgcgacgtcccgctggtgtatggtggatatgcacacaggcaagcttttgcagtcgaaagtgctcgacaatcaggattattcttcctataatccttcgagggcgctcgatataaatcgctggaaatttccgcctttccgtcccgaggagggggaactgcgcttttctatgacggtggccaattccgaatacgatcataacatgcacgtcaacaatacgcgctatgccgattattgtttcaattgtttttccgtggcggaattaaaggaaaagaaactgaaaggatttgcgctcggttatatccgacaatgccgagagggcgacgcgctccgattttaccgcaaacgcgcggagaacggcgcgtttttggtgcagggcttcaatgccgccgacgaggtcgtcgttcaggcggaaatcctttttttcgaaggataggacttttcaaagccacggattataatagaaaatattcgtttatacagaatagacgttgaaaaatgaatatttttctacgatatatgcaaaaaaattcatgctttttacaaaaacagctgaaatttgcttgacggaacggatttcgggtagtataataaagcgcgataaataaaacggagccgcattggataagacaatcgcggacatccgaaaaacaggagcattcatcatggaacaaaaagaaaacttcaaaaaaatcgtgcttgcgtattcgggcggacttgatacgtccatcatcattccctggctgaaagaaaattacggaaaccccgagattgtcgccgtttccgccgacgtaggacaggaatcggagctggagggtttggaggaaaaggctctgaaaacaggtgcgtccaagctctacatagaagatctgaaaaaagaatttatcgaggattatatttatcccaccgtacaggcgggggcgaaatacgaggacaaatatctgctgggaacgtcctttgcccgtcccgtcatcgccaagcgtctcgtggaaatcgcaaagaaagagggcgctgacgccatttgtcacggctgtacgggcaaaggaaacgatcaggtgcgtttcgagctgacgatcaaagcgtttgcgcccgaaatgaagattatcgcgccttggcgcgtgtgggatatcaagagccgcgaagaggaaatcgagtatgcggaagcgcatcacattcctctgaagattacgcgcgaaaccaattattccaaagataaaaacctttggcacctctctcacgaggggctcgatctcgaggaccccgcaaacgagcccgattacgataagatatgcgaactcggcgtatcgccttgggcggcgcccgataagcagacgtatatcaccgttcatttcgaaaagggaattcccacggcgatcgacggcgtggagatggacagtatttccctcctcgaaaagctgaataaagtgggcggagaaaatggcgtggggctttgcgacatggttgaaaaccgtttggtcggtatgaagtcccgcggcgtatatgaaaccccgggcggaaccattctctataccgcgcacgagcttttggaatccatttgtctcgataaggcgaccatgcattataagcagatgatcgcgcttaaattcggcgaaatggtatatgacggacagtggtttactcccttgcgcgaagcgttgaccgctttcgtggacgaaactcaaaagacggtgacgggcgacgtaaagctcaagatttacaaagggaacgtcatgaatgcggggattacgtctccctattcgctctacagcgaggacatcgccacgttcgacgacgacggcggcgcatatcatcaaaacgacgcggaaggctttatcaacctgttcggccttcccattaaggtcaaagcgcttctcgatgccaagaagctgaaataaagtctgccgacggacgcactcgggcgcgtttttgcgcccgaacgctttgtctataaggaaacggaataattcgaatatgtataaagtatttatagacggccgcgagggtacgacggggcttcagattttcgatcggctcgccgcgcgcagagacatcgagcttctttccattcccgaagacttgcgcaaagatactgcagagcggaaaaagcggatcgatgaagcggacattgtctttttatgtctgcctgacgcggcggcaaaagaggccgttttattgtgcgaaaatcccgaaacgaaaattatcgacgcctcgacggctcatcgtacggcggacggctgggcgtacggattccccgagctttcccccgattttcgaaaatcgatagcgacgggcaggttcatcgccaatcccggctgtcacgctggcggatttatttctttggtttatcctctcgtcagcgaagggctcgtgccttccgattatcctttcgtcgctcattccgtgacgggttacagcgggggcggcaaaaaaatgatcgcgcagtacgaggctgtggatcgggcgaaagagctcgacagcccgcggcagtacggtttgacgctgaaacataagcatctgcccgaaatgacgaaagtgtgcgggctttcccgtgcgccgattttcaatcccatcgtcgcggattactactgcggcatgtgcgttacggtgccgctgtacgcggacaaaatcaaggggacgcctgcgcccgccgcgatcagggagttttaccgcgacttttacgcgggagcgaaattcatttccgttgacggggaggaacgttcctttttggacgccgcccgtttagcgggtaccaaccgcatggaaatttttgtcggaggcaacgaggagcaaattttgctttgctcgaggttcgacaatttgggcaagggagcctcgggcgcggccgtgcagaatatgaatatcgcgctcggattggaagaggacgcttttttgaaataacggagagcgattgaggaaggattgaaatgagaaagaacggaattgataaagaaatgaaacaaatcgaaggcggcgtctgcgctccgaaaggattttccgcaaacggaatccattgcggtatccgcaaaaataaaaaaaagaaggatctggcgctgatcgtctgcgaccgaagagcggcgacggcgtgcgtctatacgaaaaatcttgtcaagggagcgccgattctcgttacgcagaagcatgtggccgacggctattcccgcgccgtaatcgtcaacagcggcaacgccaatacctgcaacgccgacggcattgaaattgcggaagggatgtgcgctctcgtagagaagcactgcggcatccctgcgggcgacgtagtcgtggcttcgacgggggtcatcgggcaaaagctatccctcgagcccatcgcggcgggcatggaaaatctggtcggggggctgggaaacgcatccgaaaacaacgtctttgcggcggaagcgatcatgaccacggacaccgtttccaaacagctcgcttacgaattccgcctcggggacgtgacgtgcaaaatcggcgctatctgtaagggggtgggcatgctctgccccaatatggccaccatgcttatgtttattacgaccgacgtgaatattacccccgaaatgctgcaaaaagccctctcgtcggacgtaaaggattcgctgaatatggtcagcgttgaccgcgatacctcgacgaacgacacgctctgtatcatggcgagcggcgaagcggggaacgcgctcatcgacagaacggatacggagtataaaaagttctgccgcgcgcttcacgaagtgacgacggcgatgtgtaaaaagattgccgcagacggcgaaggcgccacgaagctgatcgaatgtacggtgaggggcgcaaaatcaaaacaggtggcgaggaccgtcgccaaatcggtggtatgttccaatcttttgaaggcggcgattttcggcgcggacgccaattgggggcgcgtgctttgcgcgatcggttattcgggcgttgcggtggacgtaaataaaatcggcgtcgccttcgtttcggccgcgggaaagatagaagtctgcgaggacggacggggaatagatttttccgaagccgcggcgaaaaagatactttccgaaaaggagatcggcatagagatcgaactgcacgacggaaattattcgtcggtgggctgggggtgcgatctcacttatgaatacgtacatatcaacggcgattacagaagctgatttttcccttttcacgacgcgaaaattatcgggaaaggttgacaaacggccgacagtgtggtataatagaaaaaataaaatggtggtaagatgatttccaaacaggaacaggcagagtttttggcggaggcgatgccttatatcaagaagtataacgataaaattctcgtgatcaagtacggcggaaacgccatgatcaacgaagaattaaaggcttccgtcatgcgcgatctggttcttttgcagcttgtggggatcaaggtggtgctcgttcacggcggcggtcccgatatttccgaaatgcttaaacgactggggatcgagagcaaatttgtaaacggattgcgttatacggatgcggaaacggcggaggtcgtccgcatggtcctcgcgggaaaaatcaataaagccctcgtcaaccagctggaagcctgcggcggcaaagcggtgggaatcagcgggatagacggccatatgctcggctgtgaaaaggaaagcgagcagctcggctatgtgggaaagatcaccgatatcgatatcggtatcatagaagactgcctgaaaacgggatatattcccgtaatcgctacggtaggctacgacaatcggggaaacgtctataatatcaatgccgacacggccgcttccgtaatcgcgggggcgttgcaggcggaaagtatgattttgatgacggatatccgcggattgctggaggataaaaataacgaggagtcgttaataaaaaaagtgttcgtatccgatattccttctctcgtgaagcagggaattatctcgggagggatgattccgaaaatagaatgctgcaaggaagccattcgccgcggtgtgaaaaaagtgtttatcaccgacggtcgggttaatcattctattttgatggagcttctttcggatgaaggaatgggaacaatgtttgtaaacggtgactgattttcttaaaatcagtcttattttttgaaaaaacggtgaaggacgtctgtcatggattttgaaaaaatagaaaaaaaggataaaaaatacatcgcgcctacatataaccgctttgcattggcgatagagagcggcgaaggtgcgacggtcaccgacgcctcgggcaggaaatacgtcgatttcaccagcgggataggcgtcaatattttcggcatgaacgacgaggcctggaaagaagccgtaaccgaacagcttggaaaagtacagcatgcctgcaatctgtattatacgcagccgcagaccgagcttgccgaacatctctgcaaaaaatccggggcgaagaaggtctttttcggcaattcgggggcggaagccaacgaatgtgcgataaaggcggcgcgaaaatattccgcactgaaatacagcgataataaacgctatgaaatcgttacgctgacggatagctttcacggcagaacgctggcgacgctggcggctacggggcaggacgccttccataaatatttcggacccttccccgcgggattttcttatgcaaagcccgatttcgaaagcttaaaatcaaaagttacagaaaaaacctgcgccataatgctggaattgattcagggcgaaagcggcgttcacgtactggataaaagctttgtcagacaaactattgaattttgtcagtcaaatgatattcttgtcattatcgacgaagtgcagacggggaacggccgtacgggatatatgtattcttatcagtcttatggtattatgccggacatagtaacaacggcgaagggattgggcggtgggttgcccatcggcgcctgtctgttgtttgaaaaggctgcggcggttttttcctgtggcgatcacgggacgacgttcgggggaaatcctgcgatatgcgcgggggcgctcaacgtcgtcaagcggctgacggaggagctctttctcgaagtgcgggcgaagggcgaatatttaaggacgtttatttcaaagatgaaaggcgtggaagccgtcacggggatggggctgatgctcggcgtggcggtgcgttcggaaaagtcggcgagaaagctggcggaggagtgtctcgaaaaggggctgatgattttgacggcgcacgacaggcttaggcttttgccgcccttaaacattaccaaagcggaaatgaacgagggcttggaaatcttgaacggcgtgctggaaaacgcggaaaaataaagataatttataaatataggcgaggagaacgcgcaatgaaacatttattgaagctgggcgatctgacgcgggaggagattctgggtattctcaatctggcggatcagctcaagtacgagaggaaaaacaacattcacaaggattatctcaagggcaaaaagctgggcatgatttttcagaaatcctcgacgcgcacgcgtgtttcgtttgaggtggggatgtacgagctgggcggttacgcgctctttttatcggacagagatctccagctgggccgcggcgagcccgtaaaggatactgcgcgcgtgctttcgagatatctcgacggactgatgatccgcacattcgcccaaagcgaagtggaggatttcgcaaaatacggctcgatccccgtcatcaacgctttgacggactattgccatccctgccaggtgcttgcggatctcatgacgatccgcgaatataagggcagcttcagcggacttaaaatgtgttttatcggagacggaaacaacatggcgaattccttaatggtgggcgcgctgaagatgggcatgaacttttccatcgcctgtcccgaaggatatcgtcccgacgcggagcttacgaaatgggcggaggaattcggagataaattcgaaatcacctcggacgtgaaaaaagcggcgaaggacgcggacgttctttatacggacgtctgggcctctatggggcaggaaggagaaaaggcgcttcgggaaaagtcgtttgcgggcttccggatcgacgcggaggtcatggagtgcgccaaaaaggacgcgatggtgctgcattgtctgcccgcgcaccgcggcgaggagatttcagaggacgtgctcgaagcgcacgcggacgatatcttcgacgaggcggaaaacaggctccacgcccagaaagcggtcatgtgcaagctgatgcgcgattgaccgagggaaacgcggacggaaaacaaaactcgatatagaaaagaattattatagagaaggaagcatatgaagaaaaacaaagtttatctgacgttgcaaaacggaaaagtgtttcagggcttccgtttcggtgcggagggcgacaccgtcggggaactcgttttcacgacgggaatgacgggctacatcgaaacgctgacggatcccagctattatggccagatcgtcacgcagacctttccgctgatcggaaattacggaattattcccgaggatttcgaaagcgaaaagccgtgggtttcggcttacgtcgtgcgcgaggaatgcgagattccctcaaacttccgttgtcgggaaacgctggacgaatatctcaagaaagcaggcgtcatcggcgtctgcgggatagacacgcgcgagctgacgaaaatcgtgcgcgaaacgggcgttatgaacgcctgcatttcctcgaagccgctcaaggatacggaggaacttaaaaaataccgcataaagaacgccgtcccgacggtcacctgccaatcggtaaaggaatacggggataaggcgtccgcccgtttcaaggtggcggtttgggatttcggctgtaaaaataatattatccgcgagctgttaaagcgggactgttatgtgcttcaggtgcccgctttctacacggcggaacagatcctcgcgctcgatcccgacgggatcatgctgaccaacggccccggcgaccccgaagacaatccggaaatcatcgcggagcttaaaaagctggcgggcaagaagcctattttcggtatttgtctcggacaccagctgttcgcgctggccatgggcggcaaaaccgctaaaatgaaatacggacacagaggggccaaccagcccgtgaagcggctggcgacgggcagggtgtatatctccagtcagaaccacggctacgaggtgctttcttctacggtgaaaaacggaaggatcagctttatcaacgtcaacgacaatacctgcgaaggcgtaagctacgacgagatagacgcttttaccgtacaatttcaccccgaggcgtgcagcggtccgcacgacgtgaacctgctgtttgacaagtttatgacgaatatgcaaaaggagaagagccatgcctaagagaagcgatataaagaaagtattggttatcggttcgggacctatcgtcatcggacaagccgcggaatttgactatgcaggcgcgcaggcctgccgcgttctgaaaaatgaaggcatcaatgtcgtgctttgcaattccaatcccgcgacgatcatgaccgaccgcgcgctggccgacgagatctatctcgaaccccttacggaggaaagtctcaagcgcatcattctcaaggaaaagcccgacagtctgctggcttctctcggcggtcagacggggcttacgatgggctgtaagcttgcaaagtcgggcttccttgcccgtcacggcgtcaaactgatcggcacgaagctggacgcgatagaccgcagcgaggacagggaattgttcaaggagacgatggaaaagatccatcagccctgcgttccgtccgatatcgcctatactgtggacgaatgcgtcgcgatcgcaaaccgtctcggctatcccgtaatcgtgcggcccgcttatacgctgggcggcgcgggagggggcgtagcctacgacgaggaggaacttcgcagcatttcccataacggactaatgctttcgcccattacgcaggtactgatagaaaaatacatcggcggctggaaggaaatcgaattcgaagtgctgcgcgacggcgcgggcaacgtgctcaccgtctgctccatggaaaatttcgaccccgtcggtatccatacgggcgattcgatcgtcatcgcgcccgccgtcacgcttgcggataaagaatatcagatgcttcgcagcgcgtcgcttgcgatcatcaccgagctgggcatagagggcggctgcaacgtgcagtttgcgctcgatcccgattccttcgaatattccgtcatagaagtcaaccccagagtcagccgttcgtccgcgctcgcgtccaaggcgacgggatattccattgccaaagtggcgacgaagatcgcgctcggttatacgctcgacgaaatcagaaacgacgtcacgggtaaaacgtttgcctgcttcgagccgacgatcgattatgtggtcgtaaagcttccgaaatggccgttcgataaatttctttacgccaagcgcgaactgggcacccgtatgaaggcgacgggcgaggtcatggcgatcggcacttccttcgaaatggcaatcatgaaagcggtgcgcggcgcggaaatttcactcactacgctcaaccataaaaagcagatcgggctgtctaaggaggagcttcttgccaggcttcccgaaaagacggacgaaagattgtttgtcgtctatcaggcgctttgccgcggaatttccgtggacgaaatcttcgcgctcaccaagatcgacagatggtttttgaacaagctgaaaaatcttgtcgagtacgaaagcgaactcgcggattgcggaaaaaataccgcttcggacaagctgccccgcgaaatctacgaaaggggtaaaaagctgggatatctcgataaggatatcgaaaaattcagcggcaaaaaagtgccgtatcataaaaaagcggtattcaaaatggtcgatacctgcggtgcggaattctccgcgcgcacgccgtatttctactcgacctacgacgaagccgaccacgacgaggcgaaaccctttgtcgccaaaagcgagaaaaagagaattatcgttatcggttcgggtcccatccgtatcggacagggaatcgaatttgactattcctccgttcattgcgtatggacgctgaaggagctgggttacgaagtcgtcatcatcaacaacaatcccgaaacggtttccaccgacttcgatacggccgacaggctgtatttcgaatcgctgaccgcggaggacgtccagcacgtcatcgacgtggagaaaccgtacggcgtcatcattacgttcggcggtcagacggcaatcaatctttgccgctatttctcgacgcacagaatccgtatcctcgggacgtcggccgacagtgtggatgtggcggaggatagagagcgtttcgaagcactgctcgaaaaatacgccattccgcgcccgaagggaattaccgtcatgaccaaagacgaggctttgaaggcggctgagcggctggaatatcccgtgctgctccgtccctcttacgtaatcggcggacagaacatgacgatcgccttcaccgaggaggacgtgagccgctacatggacgtcattctcgcgcagggaatagaaaatcccgttttgtgcgataaatatctcatgggtaccgaattggaagtggacgccatttccgacggcacggacgtgctcattcccggtatcatgcagcatatcgagcgcacgggcatccattcgggcgattcgatcgccgtatatccgccctataacctcgaggataccatgctcgaacgcattatcgaggtttccacgcagctgacgctggagcttaagacaaaaggactcatcaacattcagtacctcatttatcgcggtcagctttacgtgatagaggtcaatccgcgcgcgtcgaggacggtgccttatatctccaaggtgacgggcgtgccgatggtggagctggcgacgaagattatcgtgggcgcgaagctgaaaaaactgggatacggaacgggattgtatcccgcgtcgccctatgtggcggtcaaggtgcccgtgttcagctttgaaaagctcaacgacgtcaattcccagctggggccgcagatgaaatccacgggcgaggtgctcgggatcggcaagacgattgaggaagcgatgttcaaggggcttgtctccgcggggttcaaaatgtgtcacccctccgaacagcggcccgtcggcgtctatatgacggtcaacgatcaggataagttcgatatcgtttcgatcgccaaaaagtttgccgacctcggctgtacgatatatgccaccaaaggcacggcggaagtcatttccgaactcggcgtggacgttacggtggtggatcggctttccgctaccgatacggtcgtcaagctgatgaatgaggggaaaatcgactatatcgtctatacgggcaaaaccgacctcgaatcgatcaacgactttatccgcctgcatcatcacgcgattctgctcgggattacggtgcttacggcgctcgatacggccaatgcactcgcggacattatcgccagcaaatttaccgaggacaacaccgagctggtcgatatcaatcatttgagaaaggaaaagcttcagctttccttcacgaaaatgcaatcctgcggcaacgattatatctatttcgacaaccgcgacggcaagattacctgtcccgaatccattgcgatcaattatgtcaatatccattacggaattggcggcgacggaattgtgctgatcgaaaattcggccgtggccgacgcgaaaatgcgtattttcaataaggatggaacggaaggcagggtgggcggaaacgccattcgctgcgtcggaaaatatctctatgaaaagggtatcgttccccgtcgggaaatgaagatcgagactgcgaacggcatcaatgaggtgacggtatattctttcaacggaaaggtgaattccgcgagcgtcaatctcggtaaggcggagctcgcgggcgaaaatatcccctgcatctggaaggaggacaaaattgtcaataagcccgcgacgatcggcggaaaggaatataaggtcacgctggtcaatctcggcaatccccactgcgtggtattcagtgagaaagtcgatgccgtagatgtcgaaacggtaggcccgctctttgaaaactgcgaatatttccccgaacgcatcaacgccgagtttatccgcgtcgtcaacagagtgacgattaaaatgcgcgtttgggaacgcggaaacggggaaacctggtcgtgcggtacgggtgcggccgcggcagtcgtggcggcggttcttaacggctattgcgacagagatacaaatatcacggtcaagctccgcggcggtgacctggtggtaaattatcattcggacggcgaagtggagctgatgggcagcgtcaaaaccgtttacgaaggccgattggaaatctgacgcaggacgttaaaaccgattgaggtaaggcgttacaaccgagcgaatacggcgcgttttacgggcgagcttcgcaaacgcgccgtcgcttgattttttggaggatatttttatggacgttttatacgaggaaagcgcggtcaacgcaaaggccgtgaaggatgcgaagaaatataaggtggtcaacgtcatctcgtggatttccttattcatcggcctgctttttgctctgatcctggtgccaaatctgattgcgtcgttttccaaggcgcagccgacggaggacatcacggcagagcagattcaggaggctattatggccgcgcgcagcctggcattgttttcgggaatgcaggtcgtatttttcgggcttctgtggttttttcttttttccttaaaaaaacgtataaacgtcagttatgattatacgtttgtctcgggggaattgaggattgcaaaagtattcaatatcaataagcgcaaatttctctataaaattcaatcggaagagatattacagctgggcgacgtcgaaaacgacagctacgatcgtttgacgaacgaccccgcgacgaaaaggattttgcttacccccaacggagagcctgcggaagggaaatttttcatgtatattctgacaggcgaaagctcgggaaagaagctgtacattttggaatgcagagaagagctcctcgtcaatatgttgcgctttgtcaagcgcggaacgctggagtccgattacgtgagccaggaaaagaaaaaggcacagggaaaataaacaaagagcggaatatgatatatttggacaatgccgccacgacgaagcccgacgaacgggcgctttgtcgcgcgcaggaatatttaacgacgaattattttaatccttccgcgctgtacagcgaaggatttgctttgcagagcgagctgaaaaaggcgcgctccgctttgctttctccgattgcggacgccgaaagcttcgagcttgtgtttacctcctgcgggacggaagcggataatcaggcggttttcaatttcggaaagcgcggaaacgtcgtgaccaccgcaggagaacattccgccgtcgcggcgtccgtcgcggagctgaaaaaccggggcgccgcgcagccgcgcttcgcgtccctcaaacgcgacggcagcgttgatgttgaagagcttttgaagctggtggacgataaaacgtccttggtttccgtaatccacgtaaacaacgagacgggcgcaatcaacgatataaacgcaattgcccgcgcggtaaaggagaaaaatccgcaggcggtctttcacagcgatggcgttcaggcctacggaaaaattccttttcgtttaagtaaggatatcgatttgtattcggtcagcgcccataaaataggcggacttaaaggaacgggcgcgctgattaaaaagaagccgctggctctgcggccgtttattttcggcggcggacaggagagcggccgcaggagcgggacggaaaatactttcggaattaaaatgttcgaatatgccgcctcggaaaagttcaaaacgctccgcgccgacttcgaacggctgaagctttgccgcgaacggttttgggcggcgctcgataaagatattttcatgcggctgtcgggcgaaacttcttcgccgtatattttaagtgtttccgcgatcgggcttcggggagagattctcctgcatatggcggacgataaaggattgattatagggacgggctccgcctgctcgtcgaatgcgaaaaaccgttacagccgcgtaatccttgcctgcggttatgacgaaaagacggcggacggagtattgcgtttgagcttttcgaacaagactacggaagaagagatgctccgggcggcggaaatcctcaatgcgatcgcacgcgaattgaaagaaagaatgagttaaatcgggatatcgaaatgaaaaaggtaattatcatccgttatgcggaattatttttgaaaggaaaaaacagaggttttttcgagcgtgttttttcgatgaatatcgagaaggcgttgaggggaatccgccatgagctgcaccgttacagcggccgttatctcgtggagggcttcgacgaagaagaaacggaaacgatcgtctcgcggcttaaaaaggttttcggaatccattccatgagcgtcgctttcgagacggggagcgatctcgacagtattttcgaggccgcaaagaaggtttcgggaaaggacggcagctttaaggtggaaacgcacaggggggacaaaaagtatccgctgacatccatcgagatcagccgcgagatcggcgggcggctgttggcgcatttcaaaactttgacggtggacgtccgcaatccttccttttacgtctatgtagatatccgcgaaaacggtacggcgctcgtattcggtgagtttttcgagggagcgaacggtatgcccgtgggtacggcgggaaaaggattactcctcatttcgggcggtatcgacagtcctgttgcaggtcacatgatggcaaagcggggaatgacggtagagtgtctgcattttcacagttatccctataccaatatgcaggcgaaagaaaaggtagtggagcttgtgcagattttgtccgcttatacgggagtagctacgctgaataccgtcagcgtcacgcacattcaggaggccatccacgaaaagtgcgcgcccgaactgatgattacgctgctgcggcgctttatgttccgtatcgccgagcgccaggcggagcggataaacgccaaatgtctgatcacgggggaaagtctgggacaggtcgccagccaaaccatcgagggaatgacttcctccaatgccgtggtggaaaagctgcccgttctccgtccgctcgtcgggttcgataaaaacgagattatcgaccgttcggtgaagatcggcacgtacgacgtttccattcgtccctatgaggattgctgtacggtatttctgcccgactatcccgctatacgccccaagctgaaggatgtcatgcgggaggaaagcaaattggacgtggagggattgatcgcggaagcgtttgaaagtttagaaagtatagaagtataaagaaaaaagccttcggaaaaattccgggggctttttgtttaatctcttcgccgactttccgacgtcgcttttcaggctcaataattccaccaatccttttcgacgatatcgggcggagtatcgggtacgacgggacgcaagcttccgtccgccttcgtagtaacggcggggagggagatcggttgtccctttttatttttatagacgggggttacggtataaacgtacgttttccccgcctttaatttttcgtccgcaaagctttcgatatattttcccgaatatacggtagtatgcgtgacagagtcgaagcggtcgatgaggtattcgtaataatcgggcgtaccctctttgaaacggatcaccacgcggccgttttcgtaagacagagagggcgcggaaatggacgggtgggaaaatctttccgatttaacggaagggagggcgctttttttgaatatttcggaaaaccgtttttcgacgggcgtatcgtcgtcggcgagcattatattatgcgtggcataatattccgctttatcgagagtaacgctttcgattccgtcgggcttgacaaagtccgacggcgcgtgagtcgaataaagatattcgtttatttttaaggcgatattgcacggaagccctcctcccgtgatatccataggagaattgtcggcgtttcccagccatacgccaacgcaatcctcggtggtataagagagtgcataagcgtcggtgtttccgctttttgttccgctcgtgccggtttttgccgcgatgggaagggcgaggggcctcagttttttcgccgtgcccgattgcgcggccgtctttaacatatcgtttatcagataggcggtgtcgtcggaaaagacgcgcatcgcgcggtcgtttttatgataggccgagcgaccgtcgataacgattttacggataaagcccgagctgaaatattcgccgctgttcggaaaggcggaataggcgtttatcagctcgtttaagctgaagccttccttcatgccgccgagcgctaaagccaaggaatagtcgtccgcaggaatctccagcccgagttttttcatatattccgccgctttcgaaacgcccgtagaattgagtatcttaaccgcggggatattgacgctctttgcaaggctttcgcgtacgctgatatagccgctgtaagtgccgctgaaattcttcggctcgtagcccccgaaatccgtcttttcgtccagaacgggcgtagcgggggagatgagatcttcctcgagcgcgggcgcatagacgagcaggggctttatcagagaaccgggaagccgcctgatcgggccgacggtagaataatatgccttgaacccgtgcgtacggttgtccaaaacgctgtagctcttatccgtttcgctcgcgtcggcgagcgtttcgagataattttgcagctcggggtcgaggtaggtataaatgcgaatgtttccgccgagggaaaaatcgtacttttccgacagctcctccagctcgtcgaacacccgatcgaaataacttttgtcgagcgaactcgccgacgggccgagcggaagcggctttgcgacggctgcggccttttcctcctcggtgatatgtccctgcgcaagcatggcggacagcacgattttttttcgctggatgcagttttcggggtgtttgaagggggaataattgttcggcgacttgatgagtcccgccaaaatcgccgcgtccgcgaggtcgagctcttgaggcgttttgccgaagtaaaattccgccgccgactggagcccgaaacagctgtggccgaaataaatggtattgagatatttttcgagtatctcgtccttggaatattttttttccagctgatacgttagctttacttctttcagcttgcgttcgatcgtcttttcctgcgaaaggtgagtgtttttaatcagctgctgggagatggtagatgctccctccttgaatgaacgggtgcgcacgtttttaagcgtggctttcaccatgcgtttgtagtcgaagccgccgtggtcgtaaaagcgtttgtcctcggtatcgacaaatgcgaatttcgctttgtcgggaagggtttccagccgaaaagtttcgcgcggggaaaaggcggaagcgtttttcacgattccgtcgtcggcgtcgaatatttccaccttatcgtccgacaataccagcttcttcggatcgagcgccgcgtccttggtgacgacggcgaagtatgtcgctccgcttgcgagaagcgcggagaagcagccgagagtaatcaacaaaattttccatgttttcttcatcaagactattatctgccgattttgatattttatgatgaaaccgcgtcaaaaagccttgaaagacttgataaaatttgcgaaaaagagtataatggaagaaaaacttaaacacaggaaatttatggaaaaaaagtaccatatcgtcacgtacggctgccagatgaacgtccacgagtcggagaagatcgcgggtattctggcaaagctgggctatcgggagacgaaggagacggaggaagcggatattatcgtattcaacacctgctgtatccgtgaaaatgcggaaaatcacgcattcgggaatatcggagccttgaaaaagctcaagaagaggaagcccgggctgatcattgccgtcggcggatgtatgactcaggaaaagggcaagacagagatactcaaaaagaaattcccgtttatcgatatcatgttcggaactttgaatctcgaggagctgggcgagctgatcgagcttaaacaaaaggaaaaaaagcgcgtgataaaaatccgtgaaaaggaaggggaaatcgtcgaaggagacgagcctctgcgcaccagctatcccaacgcctgggtgaatatcatgtacgggtgcgacaacttttgttcctattgcatcgtgccgtacgtccgcggccgcgaacgttcccgaaagcccgaaaatatcgtcgccgaggtcgaaaggctggtggcggaaggctatcgggaaatcactctgttgggacaaaacgtcaattcctacggttccgacggcaggacgggcaggacgtttgccgagctgttggacgccgtggcgtccgtcgagggggattttcggctccgtttcatgaccagccatcccaaggacttcaacgaagacgtcgttaaggtcatggagaagcaccgcaaaatctgccgcctcgtccacctgcccgtacagtccggttcggactcggttttgaaagccatgaaccgccgctatacttcggctcaatatctcgaagagataaaaatgcttcgttcccgactgcccgaagcggaggtcacgacggacgtcatcgtcgggttcccgggggaaacggaggaagattatctcgcgacggaggagcttgtaaaaaaggccgattttgcctcggcgttcacctttgtctattcgccgcgaacggggacgaaagccgcggcgatggaaaatcaggtgcccgaggaagtacagagggacaggatcatgcgcctcgtcgagctggtcaattcgctcacccgaaaaaaatcggaaaaatacgtcgggacgacggcggaaattctctgcgaggactacgacgagaaaaaagggctgtatctcggccgcgacgaattcggccgcatgggatatttcaagagcgaagaaaatctcgtcgggcggtttgtaaatttgaaaataacgcaggcgaacggtatttctctctacggagagatcgcggacaaaaatcataaggaaatctgaaaaggcgggtttgaaaaaaatatatggctctttcacagatgatgcggcactacctggatatgaaggaaaaatacaaggggtgcattctgttttaccgtctcggggacttttacgagatgtttttcgaggacgcggaaaaggtgtccaagctgctcgatcttactttgacgggcaaggactgcgggctggaggaacgcgcgccgatgtgcgggattccctatcacgcggcggacgtgtatatctccaagctggtggctctgggagaaaaagtggcgatctgcgagcagctttccgatcccaaggaaagcaaagggcttgtcgagcgggacgtcgtgcgcgtagtctccgcgggcacgctcatcgacgacgcgatgctggacgagacgaaaaacaattatatcgcctgcctgttcaaagcgggcgaaagcatcgcggcggcctggacggatatcacgacgggcgagttttccgtcgcggaattttccggcgtttcggcgctggaagatacgatcactcaaatcgtcaagctttcggtcgcggaagtgatctgcaatgaggaaatgctgctggcaagcaaagacgtaaaggaaatccggcataatcttctgcctgcgttctcctgctacgttccctgggcgtttaacgtgaaacacgccgaaaaaaatcttctggagcagtttcagactctttctctggcggcctacggaattgcaggaaaagaaaacgcgatcgccgcggcgggtgcgctcgtcgagtatctgcgcgaaacgcagaagcattccttaagtaacatcaattccgtcaaggtggtcgatcacgaacagtatatggtgctcgacagtatagcggtgagaaatctcgagctggtgagaagcaacgcggagggtaaaaaatacggctccctgctgtggctgatcgacaagacccgcacgggaatgggcgcgcgcctgctcaatcagatggtgctttcgccgctgaaggatatcgaaaaaatcaattatcggcaggagggcgtggcggagctttttaacgcctccgtcgtgagaatggggctttccgatacgctgcgcgaggtgaaggacgtagagcggctttcgggaaagatctccaacggcaatttttccccgcgcgactgcgtggcgctcgccgcgtctttgaacgccgtcccttcagtcaaatttcagctgacgggtttttcctcaaagattttggcggacatagacgccgaccttttggatatgaagccgctggccgacctgctttccgccgcgatctgcgattcgccgcccgccttgatgaaggacggggaatatatccgcgaaggcttcaacaaggagctagacgaactccgcatgatcggcaaaaacggcaaggaattgattttggggatagaggcccgcgaaaaggaacggacaggcatcaaaaatctcaaggtcggttataatcgggtgttcggatactttatcgagatatccaattccttcaaggataaagttcccgacgactatatccgaaagcagacgctgacgacgggcgagcgttttatcacgcaggagcttaaagaactggaggagaaaatcctcaccgccggcgagaaggctttgaagctggaagcgcggctgtacgccgaccttttggacgtcttattgcaaaacatttccaagttgaaaaagatttcttcggcgatcgctctgctcgactgcctcgtggcgtttgctacggtcgccaaggaacgccgttactgtcgtccgcagatgattgcaagcggcggcaggctgatgatttcggagggacgtcatcccgtcgtggaggcgatctccaaggaacgcttcgtccccaacgatacccttctcgacaacgaagacaatcgaagcgccgtcatcacggggccgaacatggcgggtaaaagcacgtatatgcggcaggtggcgctgatcgtcctcatggcgcatatcgggtgctttgtgcccgcgcgcgcggcggaaatccccgtgaccgaccgcattttcacgcgcgtcggtgccagcgacaacctcattttcgatcagagcacctttatggtggaaatgacggaggtagcgtctatccttttgcacgcgacgaaggacagcctcctcattctcgacgaggtcgggcggggaacgagcacttacgacggcctctctatcgcctgggcggtgatcgagtttctcaccgaacggatacgagccaagacgctgttcgccacccattaccacgagctgaccgagctggaaaatcggatagagggcgttaaaaattataaagtgaccgtacgggagttaaacggcgccgtggttttcctgcggaagatcgcgcggggcggggcaaaccgcagcttcgggatagaggtcgcggcgttggcgggcgttcccaaggaagtgacgctgcgcgccaaagggatacttaagacgctcgaaaagaacgatatcgctaaaaagcgtattttatccgcggacgaggaagaaacgggggaggaggaaagcgaagcgagggcgctttccgaggtcgaaaaaatactttcggagacggacgtgaacacgctgtcgcccatgcaggcgctgctccttttgagcgacctcaaagaaaaagtaaagtcggagagctgatatgtcgaaaatcaatattttatccgcgcaggtctataatcggattgctgcgggcgaggtcgtggacaggccgtattcggtcgtcaaggagctcgtcgaaaacgccatagacgcgggcgcgacggaaatcgagatttacgtcgaagggggcggaaaacagctgatccgcgtcgtggacaacggcggcggtatctcccgcgacgatcttcacgcggcgtttcttccgcacgccacaagtaaaatcgcaaaagcggacgatctcgaacggattatgacgctcgggtttcgcggcgaagccgtggcttccatcgcggcggtgtccaagatgaccattacttccaaagtcagcggcgaaaattgctatcggctgacttcggacggcggaaaactcggcgaaattgtcgaagcggcgggcggagacagcacggacgtcagcgtggaaatgctgtttttcaatacgcccgtaaggctgggcttcctgaagtcggataaatcggaggaaacggatatcaccaatttcgtgtcccgctttattctcaaccgccccgatatttccttccgttattatgtcggcggcaagcgtattttgcagtccttcggcggcggggaggaggaagccgtcgtcggcgtttacggagcgtctattctcaaggactgttataaaatcgacgcttcgaagcacgggattcgtctccgcggctatatcggaaaccaaaatttttccaagccgaacaaaacctatcagagcgtttttctcaacgggcgctacattataaattccacgatttcggccgcggtgtcaaacgcttacgcgagctatctcatgaagcggcagtatcccttttacgtattatatatcgatatgccgacggaaatcgttgacgtcaacgttcatccgaacaaggcggacgtccgttttgccgacaaccaaaccgtttacggttgcatttattcggtgatctccgcggtgctggacggtcagcccaaggcgctggaatatcttgtttccgacaaaacggcggttgcttccgagatagaagccgaggcagaaaaagttatgtctcccaaagcggcgcccgcttcggccgttccgttttccgcgcctaaaaaggaaaagccccgaaatgcgcccttaaacaacttggcgaagggggttgtatctttttcatacgaagacgccaggcgcgagctggaaaaggtccgtccctcgaaaacgacttctatggagctgcctttcgagctggaatcgaacgccgaagaaaacgccgtacccgtgcagagcgttcccgcggaaaagaaaagccttcgggaaacctacgccgacctgcaggtcgaaaaaaatattctcgaagtaaattctcccgaagccgcgcttgcggtaaaaacccaagggaactcggaggactttttcgcggaaaataagcgttttctcgaagagctggaaacgaaggcgaagcagaacaagatagacgtttcttcctgcgcttatgcgggaaaactgttcaatacctatctgctgtacgagcgcggagacgaggtatatatcatcgaccagcacgccgcacacgaacggctgattttcgatcgcctgaaagaacaaatgcgcacacgaaaggtgttgcagcagccgatgctgctgccgtatgtactcaatctgaacgcttttgaaagcgcgtttatacgggaaaagatggaaaatatacgggaaatagggttcgatatagacgaattcggaaacaatgcttttaaggtatcggccgtgccgctcgatttgcaaagcatcgacctcgcactgtttttcaacgaaattttgggcgacataagcggttatcgctcgattaagctcgaagatttattaaaggataagctggcgacggcggcctgcaaagcggccgtgaagggcggaatggatctgacgcgcgaagaaacggacaggctttttcggcttatggacggcaatatgggattgaaatgtccgcacggcaggcccgtcgtcgtaaagatgacgaaaacggaattggaaaaaatgttcaagaggattgtctgatgccgaaattgcttgtcatctgcggcccgacggcctcgggaaagacgtctcttgcggtaaagtgcgcgaaagcgctggacacggagattatttcagccgattcgatgttggtctataaagggttggatatcggcaccgcaaagcctagggaagaagaaaaagaggggataaaacatcatctgatcgacgtagcgtcgccgttggaaagcttttccgtcagcgattacgaaaaacttgctctacccatcgtggaaagattgctgaaagaaggaaaaacgcccgtggtctgcggcggtacgggcttttacgtccgcgcgttgttatataaaagccaatttggcaatgcgggagcggacgaggccgtgcggaagaaatacgaagccgtgttaagcgatcgcggcgccgtctatctgcacaaacttcttgaagatcgagaccccgaaagcgcgaagatattgcatttcaacgatacgaaacgggtcattcgcgctttggagattttcgaggttacggggaaaaagaaatcggagcaaaaggacgaagaaattccccgcttcgattttgtcagcgtttctgtggattttccgcgcgcggcgctttacgaacgcatcgaacggcgggtcgataagatgtttgaggacggtttgaaagaagaggtaaaaggccttttggcgcgcggcatcgacgaaaagagacagtgtatgcaggggatcggttataaagaggtcgcggaaggacttcgtctcggcttgtccgacgaagaaatcgccgaggccgtaaaaaagaatacccgcaattacgccaaacggcagattaccttctttaagcgtatgcaaaatcatatgctcctttctccgcaggaggctgcggcggaaaacgtattaagcttattataactatgtcagacatatatactgtgtctgacgtaataattgtaaaattaaaattcggagacaaaaatgactgcggaagaattgatcaaagagagcgaaaaggaattggaagaagcgttccgttttgcagacgaaatcagcgaatacaatcaggagaaggtgttgaaggcgtt

SEQ ID NO: 1504 - DNA, 3605 bp, Unknown
  16S sequences of unknown bacteria
cccgtttggaggactgccgggaccggatggacgaatgtcccctgggcagcggcgcgctggctgggacgacctatcccatcgaccggatgcagacggcccaggccctgggcttccgccagccaatgtccaacagtctcgacggcgtttcggaccgggattatgtcattgagcttttgagtgggctttcgatcctgatgatgcatctttcccgctttgccgaggagacgatcctctggtgcagctgggaattccgctatattgagctggacgacgcctattccaccggctcgtccatcatgccgcagaagaagaaccccgatgtggcagagctggtccggggcaagacgggccgggtctatggcgcgctcgtcagcctgctgacgacgatgaagtccctgcccctggcctataataaggacatgcaggaggacaaggagccggtcttcgacgcggtcgataccgtcaagctgtgcctgccggtgtttgccgccatgatcgacaccatgaaggttcatacggagaacatgcgtcaggcggccaaccgaggctttatcaacgccaccgactgcgccgactatctgacgaaaaagggcatgcccttccgggatgcttacacaacggtcggcaagctggtctattactgcacacagcagggcaagacgctggagcagctctctcttgcggagctgcaggacctctcgcccctgtttggcgaggacgtatacacggcgctggatatgcaaaactgtatggagcagcgcaagagctacggcggcccggccattcaggagacgacccgccagatcgaggccatcgcggcctttattgaggaaagaacatgaagcctatcgtatatattgacggaaaagagggcaccaccggcctgcagatctacgaccggatcggcgcccgggacgatattaccctgctgctcattgacgaagacaagcggaaggacccggtggagcggcagaagctgatgaacgcggcggacctggtctttctttgcctgccggacgcagctgcccgggaggcagtgacgctggtgacaaatcctgccacccgcatcatcgatgcctcgacggcccaccgcaccagccccggctgggactatggctttgccgagctctcgccccggcaccgggcggccatccaggcctcccgccgggtcgcaaacccgggctgtcacgcctcgggctttatcgccattgtctaccccttggtggcctgcggccttctgccgccggatgcactgctgtcctgccactccatcaccggttactccggtgggggcaagaagatgatcgcccagtatgaagcgccggaccgcccggcggagctggacagcccccggcagtacggcctgagccagacccacaagcacctgccggagatgcagaagctctgcgggcttgcttacgcgccgatctttaaccccatcgtggcggatttttataagggtatggccgtctccgtcccgctgcacagcgcttgggtcggcggaagaagcgccgaggaggtgcgtcaggccctggcggcacattacgaggggcaggcgctggtgcacgttgccccggaggtcgtctgcgacggcatgcttgccagcaatccgctggcagggacgaatgagatggagctgtgtgtctgcggtaacgcggagcggatgaccgttgtcgcccggttcgataatctgggcaagggcgcctccggcgcggcggtgcaaaatatgaatctgatgctgggctttgcggaaaaggccgggctttgataaaggagaaaacgtatgatgaaggaaatcaccggcggcgtgtgcgccgccaccggctttacggcgtcgggcctgcgctgcggcgtcaaagccaatgcccggccggaccggaaggacctggccctgatctattcggaaaagccctgcagcgcggcgggcatgtttacgacgaaccaggtcaaggcgtcctgtgtgcagctttccatgcgccatgtggaaaacggccgggcccaggccgtcgtggccaatagctgcaatgccaacgcctgcgccccccaggggatggaaaacgccatgcgcatgtgccaggcggcggccaagcttctcaaggttgacccggcggatatgatcgttgcctccaccggtgtcatcggacagcggctgaatattgaggccatcgaggccggtctgccggaggcctacagccagctgcgccgggacgggtccgacgacgcggcccacgccattatgacgacggacaccgtcaaaaaggaatacgcctttgaggccgtcatcggcggcaagaccgtccgcctgggcggtatctccaaaggctccggcatgatccacccgaatatggggacgatgctctgcttcctgacaacggactgcgccatttcccccgcaatgctgcgccaggccctgcatgaggccgtccgcgtctcgttccatcgcatcagcgttgacggcgatacgtcgacgaatgacacctgcgtcatcctggccaacgggatggctggcaatgcagaaattcaggagccgggtgctgactatgacgcttttttgcaggtcctgacggcgctgtgtgtccgcctggcccgggatatggccgccgacggtgagggggcaaagcacctcattacctgctgtgtccagcatgctgcaacagaagcccaggccgagtgcatcggcaagagcgtcatcgcttcgaccctgacgaaggccgcaatcttcggctgcgatgccaactggggccgcgtcctgtgcgccatgggctactctggcgagcagtttgacccggaggcggtcgatgtcgcctttgccagctgcgccgggcgcatcctggtctgcgatcatggcaagggcctggactttgacgaagacctggccaagaagatcctgacggagaaagaagtcatcatcgagatcgatctgcgggcaggcgacgcaacggccacctgctggggctgcgacctgacgtatgattatgtccgcatcaacggcgactaccggacctgaggaggcggcgcgtatgcagttatctcatatggatcgggcgcaggtgctggccgaggccctgccgtatatccagaagtattataaaaagaccatcgtcgtcaagtacggcggcaacgcgatggtctcggaggacttgcgaaaatccgtcatttcggatattattctattgaagctggtcggcatcaatactgtcgtcgtccacggcggcgggccggagatcaaccacatgctcgataaggtcggcaaggagagcaaatttgtcgacggcctgcgctatacggaccaggagacgatggatattgtccagatggtcctgtgcggcaaggtcaataaggacctggttgcaacgcttaccgccgctggaggcagcgccgttggtctgtgcgggctggacggcaatatgctccaggcccagcgccgggtcgtcaacggcaaggagtacggtctggtgggcgatgtcataaaagtcgatccgacggtcattcacaacgccattgccaacgagtatatccctgtgatctccaccgttgcccggggcgtagacggcgagagcagctataatatcaacgccgataccgccgccgcccagatcgctgtg

SEQ ID NO: 1505 - DNA, 3289 bp, Unknown
  16S sequences of unknown bacteria
cgactgccttgaggttttttaagctatgataaacctcatattaaaagaccttgtgctatggcttttcggactgttccttgatttaatgaattattgcgccgacgcgctgttggggcttatgaatacggatctatcgtactttgaaagcaatgtgccgattatagtaaagctgtacggcgtatttgtcgcaataggctgggggtttttaataggcaactgcgcttttcagtgcctgaaagctatgtttgcaggactcgggtttgaaaccgaatcgccggctatactgcttgtgcgcactttctttttcggttttctccttataatgtccaaacaggtctgcgaaatagggctgtcaatcggcaaaaccttaatggagctgatcggtttacccgaaaaggcaagcataacctttcccgacgacagtatgttccccgaccttacaagctcttggcttttaattgttattattggggttttgataggggcgcagctgattaaattattttttgagataggcgaacgttatgttgttgtagcaatattaactcttttcagcccggttgcttttgcaatgggcggcagccgctcaacaaaggatatttgctcgggctttgtgcgtacctatgcctcaatgatactgctgcttgtttcaaatgtattatttttaaagcttatatattccgcgttatcctcaatgccggacggcgtgatgatactcccctggacggtgcttatagtgggtattgcgcgtgtggcgcgtaaggcagataatctgcttgcgaaaatagggcttaacccgtcctttacgggcgatccgttaggaaacggaatgggcaaggcggttgcgtttatggcggcacgaagtattttaagctcggcgacacattcagctgataggcatagtaatatagcaggaaaaaacaggtctgaatttaaggctgacaatactgggaatacgcataaccgcagcaatgcaagcagcagaaacacggcgcaaaacagcagcagagcgaatatgggattcaacggcggcagtgtaaataattcaagtaacgcagggtttaacagctctgtccgcaacagctcgtcggtgaattcggcagacttcgggaaagcaaccgttacaggcacaaattcaaaccgtttcggggcaagcaagacaccgggacagaaaggagacgcgagggttgataataaaaacacggcaggcggcagaaatgcggcgaatactgcccgaaatacggcggtcagcggcggaaagaagaataatacgggcgctcagaaatacagcggtaaatacacgggtaaccaaaaattcggcacgcaaaaaagaggtaaaaatacagcatggaagccggataagagctttagtcataatcctgtcggaccacggttcggacagacagataccccgccggagacgaagccggaaaaggcggtagaaaatgagccgaagcagtaattttttagtatccgccctgcagaacgcgcaggcaataaggaaaatattgcaggcgtttttgaggggcggctggaaagcggcggcgcttgaagccgtaaaacgttattggccgtatatattgggcgctgcagtagctttaattctgctcccgacagtaataatggcgtcactgccgtcggttatgcagagcaaagcgccggaaacagtaacagacgaggatatatccgaaatgtatatatcccgaatggatgaaatactctgcgattcggaggtagggtctgctaatgagataagggttgtcggtcagccgcttacatacaacgagttatatgcagtaagccttgcgctgaccggcaacaatacagaaaaaataacgagggaatttctgcttgggtgcgtaaacgattcgcttacctatacagtagagcgggagggaaataatacaggaataacaaccgccgttattcactatctgaatttagaggagttttcaagacttaaaggaatttcggacgcggatattgagtggatagggcttgtgtttaaagacttagaagacaataaaaaatcctcaccgggcggtgaggaatgaggtcaaataggtttactttcaacatagcaatattccgggcttatatctaccttgttggtccagaccttttcactgtcgatatccgggtcaatatcccagcataaggcgtttgcgtcatctatatatacgcgcctgaaattgcttatgtcattgaagctttcaaaaacgccgccttgcttaagggtgggtttcatatccagcctgcggcgttcgccgttatcaaattcgagcgtgaccgaaaaatcatcgtttgccgtagcctttacaatgctctttctgccgtttgcaaaatactccgcatacggcagagcgaagcctttttcaaggtaatattctactgtacgcatagcttaaatctccgttattttatgagaaataagctcggctatattgctgcagtatttaagaatatgacgaagaacatctatatccgcattaggacagtttctcataaatcagcttttcatcctttcgcatattccgtattaaattccgcgtcataatatcgcttttattctggcgcagcgtgtcggtggtaacaaggtcgagggattttttaagcgcttcttcaagatcggcataaaatccgccgagagcaaacaggttaccgagctgtccgccgtctacgcgcagatctatgtcgcttttttcatctgcgtcgccgcgggcatacgagccgaataaatatagccttgaaacatcatattttgccgctattggcgccacaatatccgctatttgctctaccgtataaaccgggttgctcataatacataccacctttcattttcagtatatcacaaacgaaaaaaatcttcaagtataagtataggaggaaaaccgatggaagaaataaccgttgtaatacccgtaaattttaccgacgccgggcggctgttcgggctttttgaaatacgcaacgctgtagaggcagtgcttatctgcgtgcctttggcagcgcttttaatgcgcatattgccgttcagtcttttagtgcgtataggaattgtaagcgccgtcaccgttattacaggcgggtttgcgctaataggcatcggggatatgagccttatagagtttttaaagcaatatatccgctttaaacggcaggctaaaattttaacatataagggggtgtaaaaaatgaatcttaaaaatattctgttcggaagcggagataaaaatgcagaggacggcacggaaaggttagtgcccgtaaaagaaatatacggcga

SEQ ID NO: 1506 - DNA, 32759 bp, Unknown
  16S sequences of unknown bacteria
ccgccgatttaaggagagaaaaagagatggcgaaaacaccgcagttgtctccgatgatgcaacagtatgttgagatgaagaaacagtacaaggattatattctgatgtaccgtctcggagatttctatgaaatgttttttgacgacgccgtcattgcaagcaaagaactcgatatagttctgacgggcaaggattgcgggcttgacgagcgtgccccgatgtgcggaataccgtatcacagcgttgacggttatatttcccgacttgtacagcacggttacaaggtctctgtctgcgaacagataaaagaccccgttacaaacgacgtaacgcaccgtgaagttgttcgaatgataactccgggaacggtcaccgaccccgaaatgctggatgaaagcaagaataactatatcgtcggcgcgttctgcgaaaaaggcagactgtgcctttgctttgtcgatatttcaacaggcgatatgtttttgtcgggctcttataaactttctgacccgacgataataaacgaactcggcaaatattctccgcgcgagatatatgcttcgccggaagcctgcgaaaccgagccgataaagaactatatcgcatcttctgcgggttgtatgctcacgtgcggagaaacgtgcccgaatgcaaaagaacttcttgaaaagcagatggggcagactgtcggcaaactcggacttgccgataatgcgcttgccgcagaaaccgccggctcgcttttgaagtatctgttcgacacgcagctttgctctcttgaccatatcaaaaaacttacgcttacaggcgaatatgcctatatgcagatagatctttcgacgtggcgcaatcttgaaatagttgagacaatgcgtttcaaggaaaagaaaggctcgttgctcggcgttcttgataaaacacagaccgccatgggcgcgcgtctgctgcgcaatttccttgaaaagccgttgacgaatgttgatgagataaacggcagacagggtgccgttcgcgatttttatgagaacaacattgaacgttccgaacttcgtgacctgctttcgggaataagagatatagaccgtcttttgacaaaagtcgtttatggttcagtcaatcccaaggacgtgaaaaaccttgcaacgtcgttttcttcacttccgcgcatttttgaaatcctacgcggcggcaagttcggctctgcgtatctgaaaaatctgcttcgcggggcggatgaactgtccgatataacagaacacatcgaagcggcgataaacgatgaccctcccgttgcgatgaaagacggcggcataatccgcgagggatacaactcggaagttgacgaactgcgagttcttttgaccgacgcaaaacgtataatggtcgggcttgaaacgtcagaaaaagaaaaaacaggtatcaaaactcttaaagtcggttataacaaggtcttcggctactacatcgaagttccgaacggcagcaaggacattgtgcccgatacatacataagaaaacagactcttgtcggcggcgaacgctttataactcccgaactcaaagagatagaggaaaaactgctgacggcgcgcgacgacctcgttgcgcttgaatacaaattgttttcggaacttgttctcggaataaaagagtgcatcgatcgcataaaagcgtcttcccgcgcggttgcgtacattgatgttcttacaacgcttgcggaagttgccgtaaagaacgggtatacttgcccgacggtcaattcagacagcgttattgacatcaaaaacggcagacaccccgttgttgaaaaaatgctgaaaaacgaagtgtttgtgccgaatgacacacaccttgacacttccgattgccgtatggcgataataacgggtcccaatatggcgggtaaatccacatatatgcgctctgttgctctgataactctgcttgcgcagataggttcatttgtgcccgcttcaagcgcaacagtcggcgttgcggacaagatatttacccgtgtgggcgccgcagacgaccttgcgtcgggacaatcgacctttatggttgaaatgaacgaagtggcgtacatactcaaaaatgcgacaaagaagagtttgcttatttttgatgaaataggacgcggaacttccacatacgacggcatgagcattgcccgcgccgtgcttgaatatgttgcgaaaaagataaaagcgaaatcgcttttcgcaacgcattatcacgaacttgttgcgcttgaaagcaccgttgagggcgttaaaaacttcaatgtcgcggcaaagaaacgcggaaacgcgataacgtttctccgaaagatcgttcccggcggaacggacgacagttacggcattgatgttgcgcgtcttgcgggcgttccagaggtcgttatagaccgcgcacaggaagtattgaaagaaatagagtccgaacagccgaaagttgttatcaaacgtgaagaaaagaacgaagaacccgatcttttcaataccgttgcttctgatgaaataacagaaagacttaaaaacatagacccgacggttctgacaccgatagaagcgatgaacgaactttatgcgcttgtacagaaagccaaaaaccaataatttcggagaatactgatgaaaatacacgttcttgacagttctgttgccaaccttattgccgcgggcgaagtggtggaaagacccgcatccgttgtaaaggaacttgtcgaaaactccgtcgatgcgggcgccgataaaatctccgttgagattttgaaaggcggcattgaccttataaaagtgacagataacggttgcggaatgacggaagaagatgcccgtgtggcgttccgcaaacacgcaacgtcgaagataaccacaaaggaagacctttataacataggcactctcggtttccgcggcgaagcgcttgccgcaataagcgcggtatcccgcgttgaactgacaaccaagacaaaagattccgtcggtggtgtccgtctgtctctcgaagcgggtgagctgtgcggagatatcgtgtcttccgaggaagtcgggtgcgcggacggttcggttttttgtatcagagacctcttttataacgttcccgcaagaaagaaatttcttaaaagcgaacaggcggaagcgggagcgataagttcggttgtacataaacttgcgctgtcgcaccccgaaatatcgttccgactgaccgtcggcggcaaagaaacgctgttcacttcgggcaacggaaaactcgaagataccattttttccgtatacggaaagagcgtgacacagaatcttgttcccgtcagaatgaaaaatgacgatttccgtctgtcgggctttatcggcacgccgcttttttcaaaaccgaacagaaatatgcaactgttctatgtaaacggacgtatcgtccgctcacggctgcttcaaacctgtctcgaaaatgcatacagaaattcgatgcttatcggcagatacccggtttgtgttctctttttgcaggttgacaattcgagcatagatataaacgtacacccgtcaaaactcgaaatcaaattcggcgacgaaaaaagcgtttccgtatttatgaacgacgctttgcgaaccgcgctttcttttgacaatgcggtcaaacatattgacgtaacgcctgcaacgaatgatgttttcaggcttccttttgaaaactccgctccgcagaaaactcccgaacctccgaaaaagaccgtggaaaaggtgaagaattacggggagtggcaggtcataacaaaagttcccgtatcggaaaattccatacccgagcaaaagcccgaagttttaccgaaaaacgagaccgaagtgaagaagtcttcctcgacggaagaaacttccgaatttgaaaaactgaaaaaaatgcttctcaaaagggcggttgccgccgaaaagcctgcggaaacgcttagggacgattcgtcgcttcttgccccagatttgggcttttctgcaaaaagagagcctgaacctgagaagtatgcaccgtccgtgacagcacctgttcccgacgtttccgagcctccgaaaaaggagtccgtcaatgctccggttcctactgcaaaagacaatgccgatgaaccgactcttgttgaaaaaacggttgaatttcgtattgtcggagaagttttcgattcgtttataattgttgaaaaggacggcgatgttctgtttattgacaaacacgcattgcatgagcgtatgaattttgagaaactgaaaagaggaactgtcggttctcaatatctgctcagcccgatagttgtcgagctcggcgcggctgaaaatctgataataaccgaaaatgcggaagaactgaaaaaagcgggctttgaagttgaggacttcggcggaagcgtaattgtgcgtatgataccgcaaattctcgaaaattccgacgttgaatatgtgcttgcgaagtttgcggataactatgaaaatctcaaactcggcaagaatgatcttctcgatgaatttctgcatgactgtgcttgcaaggcttccataaaggcgggtatgcacacgtcggcatttgagacagagaagttgataagaaattattttgaacacgaaaacgacttgaaatactgtccgcacggtcgtccgataacgtttgcgctgtcaaaaacgaccatcgaaaaacaatttaagaggatagtctgatgaacaatcgtgttattgccgttgtcggtcctaccgcaagcggaaaaaccaaacttgcggtcgagatagccaagcggtacaacggagagatcgtctccgccgattccatgcagatatataaatatatggatatcggtacggcaaaacccaccgatgaagaaatgcagggcataccgcatcatttgataagcattgtcgaaccgacggaaacgttcactttgcaggattatcttgaacgtgcgaaggtttgcgtcgatgatattctttctcgcggcaaaatacctgttattgcaggcggaacgggactttatgtgacttcgtttattgaaaatataagtctttccgaagccgaaacagaccccgaatacagggaacatcttgcaatacgcgccgaaaaagagggcagtgaagcgcttctttcggaacttgcggagatagaccctcagacggcggaaaaactgcacccgaacaatattaaacgcataattcgtgcgcttgaactttaccatacttcgggaaaaaccgtgacggagcaaaatgagatatcgaaaaaaatcccgtcgccgtataagttccttgaaatcggattgcggttttcggacagaagcgtgctttattcaagaatagacagaagagttgacgaaatgttctcggcgggtctggaaaacgaggtctctacgcttcttcaaagcggaaaactgacacgcgaatgcaatgcttttcaggcaataggttacaagcagttcgcaccgtattttgacggagagatcggaatttccgaagtttcggagaatatcaagagagaaagccgtcattacgcaaaacgtcagttgacatggcttcgacgtgacgaaaatatacgttgggttgaagccgacggacttgatattgaacatttttttaacaatttatcggaatgtatagaagatttcctgtatgtatgatataatcggcatatatatttattttatagcacaataaatgtgtaaacggagcggttatggagaaaaaagtattcagagtgatactcgtgcttgtcgtcgtgcttttgtgcggctattttctcttcggcgttgttccgtccgctttgttcgatacggattatacggttgaagccgttgaagactgtgtttataacgacaccgtttctgttgagggcgtcgctctgcggacagaaaccgttcttgtggcaggctctgactgtgcaacgatggttcacaacgtttcggacggcgaaagagttgccgtgggtacttccgttgcaaccgtcagcaacaaggccttttccgatgaagacgaacagcgattgctgtttttgaatcggaatatcaaaatccttacaaaaacggtcagcagcgttgtgacttcggacgcaacatctcttgacgccgacagcagggaagcgctttacgattatctcgattcgtgtgcttcttccgatatgggagaaatactagcttacgaagcaaccttgcaaaccgctttcaacaaaaagaacgtgaacctgaacggagacgaaagttattcgaaaaaactcgatgagtatctgaacgaacgtaactccataatcggaaaatatacctctgtcgaacaaaacgttcagtcaactgttgcggggtatttttacagcggatatgacggctttgaatacctttcagccgccgatgcggacaatatgacggtttcgagtctggaaaagattctcgtcgctgacggaacttcgtgtccgagcgattatgtgggaaaagttcagaccacgccgtactggatatttgctgcaaagatgaagtcttcggacgccgcttctcttaaacaggggtcttcagaaaaaatagagttcagattttccgacggttcaagaaaaactcttcaaacaagcgtgctgttcgtctcatcagaagaaaacggatatgtctgcgtatgcttccgctgcggcgttatgaccgaaaaagaactttcgttaagaaaagcgaattgcaaactgataaattccacatattcgggattgaaagtcagcaacaaggcgctgcgcgtcgtagacggcgcagacggcgtatatgttctgatagggcaaaaagttgttttcaaaccggttgaaatactgttttcgaccgatgaattttcgatagtaaaagcaaaaagcgattataatgcacgccgactgaccgtaaacgacgaagtcatctgcggcggcaaagatatgtttgacgggaagatagtaaatgcgaaatagaattttgagcaataaagccgaaatcgaaaacaggattgcagaagcgaaaacacgcggcggattcagtcacgatgtcataatcgttgcggttacgaaatatcagacgattgaagataccaacgccgcaatcgaagtcgggctttcgaatataggcgaaaattatgttcagcacttaaaagaaaaagacgcgttgctgctcccgtgcaaaagacactttatcgggcatctgcagacaaacaaagtcaaagcgcttctttcgatgaaagatattgcgcttattcagtccgttgattccgtcaaacttgcgacggaaatagacaaatattcggaaaaactcggaagaacgaccgaaattcttttgcaggtcaatatcggtgacgaagaacaaaaattcggcgttgagcctgccgataccgtggctcttgtccgtgatgtttcggattttgaacatataaaagtcaaagggcttatggcaacaatgcccatagaaaaagatatacgttattacaaagagttcaaagaactttttgagaaagtaaaagcctgcaatatttcgggcgtagatatggatattctttcaatgggtatgtcaaacgattttgaagaggctgtcgaatgcggctcaaacatggtacgcataggtacggcgctctttaaataaattaactttcggaaaggaagattttgttatggcaaatatcaagcagatcctcggtttcggctcggataccgacgattacgaagatgatgttgaatatgaagaagaggcaacagaagaaaaagcggctccgaagcgcgcatcaagggcttctcgcaattccgcgcccgcgccttccggaaaaagaccgaattttattctttgcaaacccgacgataaaagcgcaatgcaggctgttgcggatgatgtaatatcgggcaaatccgttatactcaatcttgaaaatatacagaaagatacaaaacgcatagtggacttcctttacggtgttgtttatgcccttgacggaaccgttaaaaaagttgcggagcatacatatcttattgctcccggcggtgttgatataaccggcgaaatggataacgacttggaggagaccgtcttttgacggacgctgaactcttctctcggaggattgccgaccatgcggaatcggcaatgcgcaattccgttgaatatacgggatttctttccgaggacgagcaggatgactgttcgcagatactgaaaaaactcggtgtcggctattcgtttgacggcggcattgaaaatgcggagcgcagaatgtgcgcgatatattcagactctttttcggcggaatggctgtcttttcccatatctgtggtcgagataactccgcacgataaaactgcacaaatacgccaccccgactgtctcggaagcattctcgggctcggtctgaaaagaagcgtcataggcgatatagtcttttctgacggaaaaatatatgttgcggcagaagaaaacattgcaaaacacatatgttcgcaactttgtcgggtaggcaaatatgtttgctctgcaaaaatcgctgacggttcggacacaatcagaaacgaacgaaaatttgagaccgtcggacttatcgtgacttcaaacagacttgactgttatgttgccgcgataagcaaaacttcgcgtgaaaaagccgtatccgcaataaaagcgggcgatgttcgtctgaacggcacgcagatatacgatgttacaaaacgtctttctttcggcgacaggctgtctgttcgcggcgcgggaaaatatatagttgattccgatcccgaagattgtcacaaaacgcagaaagacagactaaaaataaatatgcaaaaatatgaacgttccaaatgacggaggtattatatgttaagcgtcagagatattgaaacaaaaacgttttcgagaagcaagaccggctacaaagaagaagaggtcgaagcgtttctcgacgagataatcgttgactataccgctcttctcgaagaaaaagaaagtctgggcaagaaagttatcgttttgagcgaaaaactcgaaaccataagagacgaacaggaagcgcgcatgcagtcgctcctcagcactcagaagagttatgatgaggttatgcgtaccgcaaaaatgaatgcggaatctcttataaacgatgcaaagaaaaaggctgacgaacttctgaaggccgcaaaagagcaggctgacggtctgacttccgaagcaactgcaaaggctgcggagatagaaaaagacggcgaggagaaaaaggcggaatacaatgcgcttgtttccgagatcgaaaccgttaaaaaggcggttcacgttctttgcgacaaattcacttccgacgttgaaaatcttcccgaacttgcaaaaaaggaacttgcggcagttacagtaaccgttcctgcgcctcaacccgcacccgcggtcgaggaaacaaaggctgttcccgaggaaaatgcggctgttgaagctgacgacaccatcatggcgggcgaaacaaaagttattcccgttgtgaaagaaacgaaaattgcggatgttcccagagacgttacaagggaaaaaataaaccgcgcgcttgaaattgccgatgaggaagacgaagatatggtcggcgatgacgacgatgaagactacgaaaacagtttttatacgagaaaacacggcggcaagaaagatgacggcagagccgcaaaaataagaaatctgttcggttcggacgatgattattcggacgaagacgaagatgatgataaagacgattttgacgacgagtatgaagaaaaaccgaaaaagaaaaagcgttctttcttcggcttcggcaaaaagaaaaagagtcgtgacgacgattatgatgattacgatgattatgacgacgacgattacgacgaagatgatgacgactattacgacgacgaagactgatcaggagactttcagcgatggattataatcagacattgaacttgccgaagaccgatttcccgatgagagcgggacttccgcaacgcgagccggcttttctcgaagaatggcagactcagcagacttacaaaaaacttcaagagaaaaacgcgggcagaccgcaatacgttcttcatgacggtcctccgttctcgaacggaaacattcacatggggacggcgatgaacaaggttctgaaagactttataatccgttataagtctatcagcggctttcaggctccgtatatccccggttgggataaccacggtatgcctatcgaaagcgcaataatcaaaaaaaataaactgaacagaaaagagatgtctattcccgagttcagaaacgcttgtcataagtttgcggacgatttcgttcacattcagatggaacagttcaagcgtctcggcgttctcggcgattgggaacatccttatacgacgatggatcccgcttttgagtccgttgaagtcaaagtgttcggcgagatgtataaaaaaggctacatctacaagggacttaagcccgtttattggtgtcccgtcgatgagaccgcacttgcagaggcagaaatcgaatatgcggacgacgactgcacgtcgatatatgttaaattcgcggtaaaagacgataagggcaaactttcctcttacggcgacctctccaaaatgtacttcgttatttggacgaccaccacatggacacttcccggaaaccgtgcgatagcgctcaatccgtatgagagttatgtccttgttaaagcgggcgaagaaatgtatattgtcgctgaagcgcttatggacaagaccatggcggcgggcggtattaccgattacagcgttgtagaacatttcaaaggttctgattttgaatatatgacggcacagcacccgttcctcgacatagacagcctgcttgtaaccgcggattatgtcaccatggacagcggtacaggttgcgttcacactgcaccgagttttggtgttgacgactatcaaacgggcagacgttacaaccttgatatgaccgttcccgttgatgacagaggatatcagaccgcagacgccggcaaatatgcggggctgcgctatgatgaatccaacaaagtcattcttgcggatttgaaagaaagcggcgcgctctttgcttccgaagacatcaagcaccaatatccgcattgttggagatgtaaaaatcctataatcttccgtgcaactccgcagtggttctgctctgttgacgcattcaaggataagaccgttgaagcaataaaggacgttgaatggattccctcttggggcggagacagaataacccaaatggttgttgaccgtgccgattggtgtatttccagacagcgccattggggacttcccatacccgtattctattgtgaggagtgcggaaaacccatttgcaacgacgaaacgattgaaaaagtttccgcgctgttcaaggaaaaaggttcgaacgcatggtatgaaatgactcccgcagagatactcggagactttaagtgtccgcattgcggcggaacgcatttcacccgtgaaaacgatacccttgacggctggtttgacagcggctcttcccacttcgtcgttctccgcgaaaatcccgataacaagtggcccgaaatgaaatggcccgcagattgctatcttgaaggcgccgaccagtacagaggttggttccagtcttcgctgctgacggcggtaggtgttctcggagattccgctccttataaaaccgttcttactcacggttgggtagttgacggacagggcagggcgatgcacaaatcgctcggcaacagcgtcgctcccgaagaagttatcaagaagtacggtgcagacttgctccgtctttgggttgcctcttccgattatcatgcggatgtccgtgtatcagacgatatattcaagcaactttctcaggcatatcttaaaatcagaaatacggcaagatacattctcggaaacctgaacggtttcgatcccgacaatcttgttcccgcttcggaaatgaacgaacttgacaagtgggcggtatcgcgtcttaatgacttgatgaagaaggtccgcgacggttacgagaactacgcatatcatatcgtataccatgctatccgcaatttctgcgtagtcgatatgtcgaacttctatcttgatattgtaaaagacgttttgtattgtgacagcgcaaacggcaaggcaagaagaagcgcacaaacagcgatgttccttgtccttgattctcttgtaagaatgctttccccgatacttgcgttcactgctgatgaaatctggaaagcaatgccgcacagaagttctgataatacagaaaacgttatcttcaacgacctcaactctccgtttgaagagtatgcgctttctgaagaaaagattgcagatttcaacagactttccgagataagagacagtgttaaccttgcgcttgaagcggcaagaaacgaaaaacttatcggcaaaccgcttgaagcaaaggtctgcataaccgcacctgccgaggacgccgcacttttgaataagtatgagaatctgctcaaaaccatattcatcgtttcgggtgtcgatgttcacgagggtgacgaactctttgtgaaagttgataaagcgggcggcgaaaaatgcgagcgttgctggacatacagcgaaaccgtgggcaaggacagcgaacatcccacgctttgcgcgagatgtgcggcagtcgttaaaggtctgtaatgaaaagatttgtttccaaaattccgtatctggcgatatttattgtcggaataatccttgattacatcgtcaaacatatcgtcagaacgaatatgaaaataggtgatacgattccgcttatcaggggcgtatttcatatcacatatacggaaaataccggcgcggcgttcagcatgctttcagataaaacgacattgctttccgttgtgaccgttgcggttgtgggacttcttctgtttcttttgttatcggacaaaatcagaggtaagtttgcctgcgtgcttgttgcgcttatcgcttcgggtggcaccggcaacctgatagaccgcattttccgaggctccgttaccgatatgttcgattttaggttgataaactttgcaattttcaacgtggcggatatattcgtgacctgcggagcattactcttcatcattgttttctttgtcagcaagggagaagttttacaatggaactcatcgcaagaaaagaagatgaaggaaaaagattagataagtttctttccgacgcggacgcgtgtttaacgcgttccgcggcggttattcttatttcagagaaagccgtcaccgtaggcggaaaatccgaggggaagaactaccgtatcaaagacggagacgttgttcgttatgaaaagcccgaaccgaggcctcttgaagttgttgctcaggatattccgctcgatatagtttacgaagacgaatatcttctcgttgtcaataaaccgcagggaatggtcgttcatcccgcggcgggaaacgacgacggaacacttgtgaatgcgcttcttaaacattgcggctcgagcctttccggtataaacggcgttatccgacccggaatcgttcaccgtatagataaagacacttctggtcttctgatagttgcaaaaacaaatgaggcgcatctcggacttgccgagcagataaaggaacattcatttctccgcgtgtataacggcatttgcaggggacatttcaaagaacccgagggtacggtgtctctaccgataggcagagacccgaaagacagaaaaaaaatggcggtgacgctgaaaaattccaaacctgcggtaacgcattaccgtgtgctttcggaatttgacggctattccctggtcgaattcagacttgaaaccggcagaactcatcaaattcgcgttcacatggcaagtctcgggcattctattgagggtgatccgctttacagcccacgcaacactgacaaaaagtcgttgaccgggcagtatctgcacgcaaaacagattgggtttgttcacccgataacaaatgaaaaactgtttttcgattcggaattacctccgagattttatgattttatccgcaaacacggcggcacggtgtgatatgaaaagactgatttccgttattgttttgatagccgtttcagtcggagttttttgctccgcctgttcttccgacgcgaacaaaaataacggagattatattttcagccccgaaaatttcttcggaaatgcggttcattccctgtttccgaacaaaattttcgatacgcttttttcgacagataaagattcttttaacggcgaaatatctgtgaccgatatgtatttttccgatgccgaaacgggcgaaaaacattcgtatcaaaatgtgttgcagagcagttttgacgcaaaaaaagatgattctgggttcgtggttcacggaaacgcaaatctcgggtcaaaagattttgagttttcgtcattgttaaaagcaggagcggcaaaaggctgtgcttacgggcttcttgatgaagatttaaccgtagactttttcaacctgtatggggtttcggaattgtctgccgtatattccgatctgaaaaacgggtattcggattttgtttccgttgttaccgacggtatgaacagcgcagaagcgactgacgaggaaatctctctcgattccgaaaatgacggccgcaaaatgactaaaacgacgtatacgctcggaaaagaatcgtccgtcaacgtagccgaaaaagttattgatactgtttattccgacaaaaacacgctcggttcgatttttggcagatattttttaaatctgtataatattgattccgacaactacgcaagatacggtgaaaacctgaaaaatgcggttgtcgctgccgacgattttgccgttacgatagaaaaatatctgtataagggaaatatagcgcggatagttattacgtcttcatcttctgattcttccgtttgcagaagactgacatattcgtgttcttcggaagataaggcatcacttgtgtatgaaaatccgtcaagcggtatgccgctgttttccgctgaactttcggacggaacatatacgttttctttcaacaacgcatatactgtttcatttgcatatcagaccccgtcggaaaaaatgaacattgaactgactgttcatactctgtctttgtccgaagcggttttcttcaatatttcatttgatacatcttccgacaaaattaccgttaatgcggatttacacgatgaaaacggttcattcggaggaaaactttcgatttctgcggtcaaatcagagcccgcaaactatgaaataggcgtccctgacggtggttatatcattgaaaactctatggcgggagcactggggtatgataaatttgcggaagttcttgtttcggagttccccggtattgaaaaaatcattccgacggatattgctgtttcttccgatttcggaaacgtttatgccgcgacgataggggaagaccgatattcgcttgccgcatatctttattatttgcaacagagccgtgatgcctgcgaatacgttgccgcagaaattctcggtgatgaagatttttcatcggacgatatgtggaaaatagttctctcgggcggcaaaacgcttgaagagtacggatattcgcttacggaagaaaattatatttcttcttattatatcataaaatattttaacgaaaacgggctttctctttctcttaaagagttttccgcaatcaaaaatacgatagattcactcggaaaagataccgtttcacagttttgtgcaaggctcggctgcacggaaaaagaacttcgctatctttattccgtttcctatatgcaatcaaaggtgtttgccgatatttacggagaggcgggaaaaactcccgttactgtaaatgatgtcaaagccttgtttgacgcgtcgtatgcaggagtgcgttttgttacgcttttcaattttgacccgtctgacagttcgtcgcttgattctgcttctcttgaaaaggtgaaagaacgcgcgaaggagtgcttcaaaaaacttacgacaggcgaaatcagcatggacgatgctattcgcgaatacagcgacgcatataagtatgtgcagaccgacggcgacagggattcttccgaatactttgtcggaacgcttgtcggtaaagacggaaaatccgacgcctttacgtttccgaccgatatgacgtccgcgttgtttgacctaaaagcgggagaattcggttattttgaagattccgaaagcggattttgggtttttgaaagaatcggtacagatgataaattttctgattacaaagatactttacgcgattctcttctgtcggaactgcaaacacaggcgctttcgacttggcgtgcttctcaaaaatacagccttgacaaatccgtaatttcggagtataatattaaaagtctcccgtctgtttttgttcagcgaacatccgacgatgactgatgattcggatgtttaaccgaatgtgatgaaataaaaggggaaactttgtttccctttcatatctgcccgtagctcatttggatagagtgtcagactccgactctgaaggtggtgggttcgaatcccatcgggcagaccaaacaaataccccgtacgcatcgcgtacggggtatttgtttggtctgtatggtgataatcgaacccgtagtgcatagcactacgggttcgccgaagcgaagtttttgcgaggcaaaaacgagcgtagtctcgagcgaacaaaaatttcgggaaccgtgacaacggtcgaaattttgagaagcgcagagtaccccatcgggcacaagtttaagaatcattataccccgtacgcatcgcgtacggggtatttgtttggtctgtatggtgataatcgaacccgtagtgcatagcactacgggttcgccgaagcgaagtttttgcgaggcaaaaacgagcgtagtctcgagcgaacaaaaatttcgggaaccgtgacaacggtcgatacaacaaatgttgacatcctgaatttcttgtgttatacttgatatacaaaaagaaaagagggaattatatgaatattaacgcgatgggaacattgaacgttgagtctgtaaaaacactgtgccgaacatctatgtatcggaagagtaatccaaaaatcggttttcctgtttttctttcactatgtgcggttgttcttgcttggtcggtttttaaaaccataacaacagaagatcccatatatcgttggagttctttgtgtttggggctgatacttctgtttatgacttatagatattttatttttccgtacattcaatacctttcattgagcaaactcaaagatgcggtaaacgcatacacatttttcgatgataattttaaggtcgtcggaaaaactctcggtaatttcggtgaatccgaaattgcatatactatggttgaacaggttatagagtccacaaaatacttttttatctttcatactaaaaatcaggcgtttgtagtggaaaaatccactttctccggagggactcccgaggaactcagagacaaactttctgagttgttagggaaaaagtattatatcaacaaatattgatttttgctgcttgtgcgaaatgttcatggctcgaaaataagatagtagaaattaatatgcatcccaattcattaagtcttgggatgcatctttttgtacaagatttttaggcgaacaactttttgaacctcttcattgcttcttgtgtgttctcgtggtttgaaaacgacgttaaacggaagaatccctcaccgttttctccgaagcctgccccgggagttcctacaacacccgcattcttcaacaggtaatcaaagaatgtccacgaatccattccgttcgggcatttcatccatatgtagggggagtttttacctccgaaatatgttattccgagttcgtcgaatgcagttgtaattatcttcgcgttttcgcggtagtaatcaatattcgctcttatttgcttttgtccctcgtcggtgaaaaccgcctcggcggcacgttgaacgatgtacgaaactccgttgaatttggtcgtctgacggcggagccaaaacttgttcaggctgtgtccgtcaaaaacaagttcgtctggaactacggtgtaaccgcagcgtgttcctgtaaatcccgcagtttttgaaagagaacagaattctatggcgcattcttttgcaccgtctatttcataaatacttctcggcagagtcgggtctgcaacaaatgattcgtatgctgcgtcaaaaagtattaccgctttgtgttcttttgcgtaagcgatccattttttcagcccgtctttgtcgtataccgcgcctgtcgggttattaggagaacaaatgtaaacgatgtctgcatcggtattttcgtcagacagcggaagaaagccgttctgttcgtttgcatccgcaaaaacaatgtttctgccgtccatgacgtttgtatcgacataaacagggtagacgggatcgggtataagaaccttattgtcttttgaaaagatatcgagaatgttgccgagatcgctttttgctccgtcggaaataaatatcgaatcgggcgcaagttcaacgcctatttttgcatagtaggtgcgtattttttctttcagaaaatcatagccctgttcgggaccgtagccgcggaaagtctcggcttttcccatttcgtcagccgccgttttcatagcctgtacaaccgcgtcgcaaagtggaagagttacgtctccgatgcccatttttatcagttttttatcgggatttgccgcagaatatgcgtttactctgtgcgcgatttccgagaaaagataactttctttcagttttgcgtaattttcgtttatcttcaacattgttctcacctcacacatttacggttccgtcgaacgctattacggcgggtcccgtcatatagaccgttccgtctttgcaatatcttattgaaagttctcctccgacaagttttacggtcacaggagagtcatattcgcaaaaaccgttcagaacagcagcaacaacagccgcgcaagaacctgttccgcaggcaagcgtttcaccgcttccgcgttcccaaacacgcattttcagggtattcttatcaattacctgaataaactccgtgttgacacgctcggggaaaagtttgtcaaactcaaatttcggtccgacagtcggcaagtcaaggttttcgggatcgtctccgaatactatgcaatgcgggttgcccattgatacgcacgttatatcgtgttcaccacccgcaacggaaacttttctgtttataacggaatcactgtcaagtgcaacgggaatctgtttaggcacaagcacggctttgcccatattgacttccgccgttttcatctcaccgttttcaaccgtcagtttgagcgttttaattccgctcaaagtctcgaccgttatcgttgtttttccgatgtttcgtctgtcatacatatatttgccgacacagcgtatcgcattgccgcacattttgccctcgctgccgtcaatattgaacattctcatttttacatcggcaacatcggatgggcagattaaaactattccgtcgccgcctattccgaaatgtctgtcggaaagttttacggcaagtgcttcgggctcttcaatcgtttgctcaaaacagtcaaaataaatataatcgtttccgcaaccctgcatttttacgaaccgcagagttgttttctcttcttggctcattttcattcactcctgaatatactctttcgcttcggaaagcgtctccaaccgctttccgaagcgtttgttttgatttattctttatcttcgggataggtgagcggcattcttcttttatgctcgcttgctttgtgatagcggtcaatgatttttttgtccgtttcactcgcttcacccgtgaaaagaaatttgtcgatggcggcataagtcacgcccatctcgtcctcgtccgtctgcccctcgaacagcgccgcagagggggctttttcgataacgcacttgggcgcgttcaggtattcgagaaattcgtatatttccgtcacggtgaggtctgcgatcgggtttatgtcatatgctccgtcgccccatttggtgaagtagcccatgtagccctcgcttctgtttcccgttcccgcaacaagccgtccttcgcttgcggcaactgcataaagcgtcatcattcgcagtctcggtccgatgtttgcgctcgcagttgcggaaacttccgttacgcccgaatatatttcaagcgcaagttttttcagttccgtcagatctgctgttctcgtttctataccaaacttctccgcaacttccgcaccgtcttttgcgtcttggtcaaagttgcgttttgatgcgcacggcatgattatgccgacggtgttgtcgcacgccgctttgcaaagtgccccgacaagcgcggaatccttgccgccgctgttgccgtagacaatgccttttgcgccgatttcgcgtaatgccttttgaataaatgcaattcttttttcaaactcttctttataatctctcactttatttcgcctctccaaagcaaaattttaattttatctttcgatgtattcgtctctgcccgcacctactgaaacatattttatcggacagccgacggctttttcaatcatttcaacgtacttctgcgcattgacgggaagatcctcgaacttgcggcagcccgaaatgtcttcgttccaaccgtcaacatattcgtaaacaggctttgcctttgcaagcgcatcgcctacggggaagttgtctacctgtttgccgtcaacatcgtatttgacgcatacgggtatctttttcagataggaaagaacatcaagtttcgtcagcgcgattgccgtggcaccctgcatcattgctccgtagcgtgatgcaacgacgtcaaaacctccgacacgtctgggcctgcccgttgccgcgccgtattcgccgcccgcttcgcgcaacgcgtcgccctcttctccgaaaagttcgcaggtgaaaggaccttctccgacgcaacttgaatatgctttcataatgcctacgacttcatcgagtttctgtgcaggaatgcctgcacctataggtgcgtaagccgctatcgtggacgacgaagaggtgtaggggtatataccgaagtcgatgtctcggagtgcgccgagctgcgcttcaaacataaccgatttgccctcttttatcgcctcggtcaaatatgtggtcgtgtctttgatgtaatccgcaaacgggaaaccgtatttttcaagccatgcgtacatttcgtcagcggatacgggttcatgtccgtaacccttttcaaccgtgaggtttttccattcaacaaggtcgtttaagtgttcacgaagcgtttcggggtgaagaagatcgcccattttgacggtctttttcatgtatttatccgcataaacgggtgctataccgcgtcttgtcgaaccgaatttcttgtccgcaagtctttcttcttcaagtatgtccatcatcttgtggtagggcatacatattgttgctctgtcgctgataacaaggtgcttgggtgtaatgtctatgcccttgtcgcgaagagtctgaatctcttttgtaagatgttcgatgtcaataaccattccgggacccataacgttgacggtctcatctctgagaatgcctgacggaagcaggttgagaatgaattttcctttttcgttgacaacggtatgacctgcgttgtttcctccctgataacgggcaacgatgtcatatcttgcgctgagcagatcgaccatacggccttttccctcatctccccagtttgttcctacgattgcggttaacatataaaaacactccttatacgtttatctcggcgcgaagaccgagaagatctttgtttttctctataatgggttttgcaaacttatttataaattcttccgtctggtgcggcgcacagccgacgaaacggcgaacgtcaagaatatctttcagactttcttttgtcagtccgaaacgtttgtcttcaagcaacatatcaagcaagtcattgtccttgccttcaagcttgacgtgtgccgctgccttttgcgaatactgtcttatcgcttcgtgcagatcctgtctgtccccgccgcggcttacggcgtccatcagaatattctctgttgctataaacggaagttcttcattcaaatgcttttccataactttcggatatataactccgcccgaaacgacgtttattataagcgtcagaacggcgtccgttgcaaggaacgcttcgggtatggaaagtctgcggtttgcggaatcgtcaagcgttctttcaagccattgcgtagatgctatgtccgcagggttttttgcatcgttcaaaatatatctcgaaagggaaacgatgcgctcgcatctcatcgggttgcgcttatatgccattgcggaagaacctatctgatttgtttcaaacggctcgtcaaattctttcagatgtgcaagcagtctgatgtccgtcgccgttttgcaggcgctttgcgcaatgcccgcaagcacattaaggacataagaatctatctttcttgaatatgtctgccccgaaaccggcatacaggattcaaagcccattttttcggctataagtttttcgagttcgacaactttgttttcgtcgccgccgaacagttcgagaaaacttgcgcccgttcctgtcgttcctttgcagccgagcaatctcaggtgcgaaagttcaaaatcaagtctttcaatatccatgatgaaatcttgaagccacagcgttgcgcgtttgcccacggtggtcggttgtgccgcctgaaaatgcgtatacgcaagcgtcggaacgtctttgtttttctcagcaaaatcagtcagaacagaaattgcgttgacaagaagtctcttgatttggagcagtccctctttcatctgaatgatgtcggtgttgtctcccacatagcagcttgttgcgccgagatggattatcggttttgctttcgggcaaagttccgcaaacgtgtgaagatgtgccatgacgtcgtgacggagttttttctcgtattccgcttctctgtcatagtcgatgtcttccgtgtgctctttcatttccgatatctgctcgtcggttatcgccagcccgagttctttttcgctttccgcaagtgcgacccagagttttctccaagtcgaaaatttgaaatcgggggagaatacaaattgcattttatccgaagcatagcgactgcaaagcggactttcgtacctgtttttcattatttatttctcctcgtgttgtttcagcgccgaacctacaagaccgaggaaaaggggatgagccctgttcggacggcttttgaattcggggtgatattgaacaccgatataaaaatcgttttcgggaatttcaacggtttccacaatatagttgtcgggcgaagttccgcttatgcaaagccccgcatcggcaagttgctgtctgaaatcgttgttgaactcatatctgtggcggtgccgttcggaaatctcttccttgccgtaacagcgatacatctgcgtgtcgggctttattttgcacggatatgcgccgagacgaagcgttccgccctttgcgacttcttcgctttggtcgggcaggaagtctatcactttatgttttgattcgggtgcaaattctcccgaatccgcgtccgcgatgtttgccacataacgagcgaacgcaattaccgcgacttgcattccgagacaaatgccgaggtagggaagattatgtattctgcaataatttgcggttattatcttgccctcgatacctctgtttccgaatccgccaggaacaactatgccgtcaacgtcggaaagaatgtccgaaacggtttcgaccgttacggtctccgagtctatccattttatcttgatgtgcgttccgtgaacatagcctgcatggcgaagtgcctcggcaaccgaaaggtaagcgtcgtgaagttggacatatttgccgacgatgcctatcgttatcgtcttaggtctgtttcttatgctttcgagcatcttgttccaatcttcaaggtcgatgtccggcgcataaatgccgagttcgcggcaaacaagagacgaaaaatgctgcttttcaagcataatcggagcttcataaagaacgggaagagttctgttttctataacgcagtcaggcttgacgttgcagaacatcgagatctttttgaagattgaatcttcaagcggttcatcgcagcgcaaaattataatgtcgggtttaacgcccatgccttgcagttcttttacggagtgctgtgtcggctttgatttatgctcgtccgacccgcgcaggaacggcaccagagtaacgtgtatgaacagactgttttctttgccgacttcaagcgaaatctgtctgaccgcttcaataaacggctggctttcgatatcgccgattgtgccgcctatttcggttattacaatatccgcatcggtctttttggcaaccgagtatacgaatgattttatctcatttgttatatggggaattacctgaaccgtagaaccgaggtattcgcccttgcgctccttattcagaacgttccaataaaccttacctgtcgtaagattggaaaatttgttaaggtcttcgtctataaagcgttcgtaatgtccgaggtcaaggtctgtctccgcgccgtcctccgtaacatatacttcgccgtgctgataggggctcatcgttcccgggtcaacgtttatgtacgggtcgagtttttgtgccgcgactttaagtccgcgcgctttcaaaagtcgtccgagcgatgccgccgttatgcctttgccgagaccggaaacaactccgcccgtgacaaaaatgtactttgtctgtttcatatatatactcctttgcgcttccgttcggcgtgagttccgacgcggcgcgataaattttctttcgtcatctccaaatgaagagcgttcgaccgagacggggagatcaagcctcctcgtcctgtcgaacgcctttgttcgtgtatttagttatcgtaagtgcggataatgttttccgcaacttcttttcttgaaagtctggtgtccattgcttgcttctcaatgtagtaatgcgcatccttttccgtcattttcagattttcgataagaagccattttgctcggttgactgcgcgtatgtcttccatcttttcttgcagcgttctgttccgcttttccatttttccgagtttggaactcattgccgtcaaaagtttaattgccccgtatatcatctgtttcgaccccggttttgccacggtcaatatgccgtcgttttcgactttataacatacctggtcaaaatagtcgttttttacaagcaacagtatacccgccgttccctgtgaaaggtcaagcgcaagttccgtgccgaactcatcggacaggggagagttgataataataatgtcaacgggatcggcaacgagcattcgttttgcttcgcctgcggaagttgctctgaaaacagggaagaaatcgtcggacggcaaaagttcgacaaggtgctgatatgccgcgtcggtcgaagagacgataagcacgcggtgcagcggtcttccggtcatcataggcggttacctccgtcaaagaccgagaatgtcgttaagactttcaccgagaatctctttcatgaacggacttgccgccgccaacgtctttgcctcttcgagagtatcggggagtttttgcaacgtgtctgtcaggctcttttccgctttgtagagattgacattgaccgcttcgggactttgaagtcccttttctatgccgtcaagacccgcataaatcagaagagcataagcgatgtagggatttaccgtcgggtcgggggaacggagttctatacgtttgtattcgccctttgccgcaggaacgcgtatgagctgcgaacggttctctggcgaccatgttatatatttgggcgcttttttctctccgaggcgtttgtaagactgttctgtcggattcaagacggcggtcatctccttgatatgcgcgagtattcccgccataaaagcgtttgttctgtcttcgccgtcattgcatttgacggacatatttatatgaagtccgtttccgctttcgccgtcgagcggtttcggagaaaagtccgcataaagaccgtttctctgtgccgcggcttttactaccgttaaaaagttcatcgcatcgtccgccgcagtcatggcgtcgctgtaacggaaatctatttcgttttgtcccggtccttcttcgtggtgcgaactttcgggcgtgattcccatatcgagaagtgtcagacatatctcacgtctgacgttttcgcctttgtcctcgggcgcaacatccatatatcccgctctgtcaaaaggttcggtggtcgggaatcctttgtcgtcggtgttgaagagataaaactcaaattctgcgccgaaacggaccgttaagcctctttttgcggcagtctcgaccgcctttttgagtattctgcgcgaatctgtctcaaacggcgttccgtcggggtgtctgatgtcgcagaacattctgattacttttccgtgagacgtgcgccatgggagcacgttcatcgttgacggcacagggaagagcagaagatcggacttgccctcgtctccgaatcccttgatcgcggatgcgtcaaaagaaattccgtccgaaaacgctctttcgagttcgttcggcagaatggaaatattcttttgcttgcccgaaacatcgcagaatgcaagtcgtataaactttacgtcttcctggttgacgaagtcgaaaacttcatttgccgtgcaaatcataaaaagactccctacatatttaatagtgttgtcggaaaaatcaaacaaaaacaggacgtctgccgaagcgggtactgctcccttgtcggcaaacatccttgtttacagaggtattatactcataatgaagatagatgtcaacagttttcgataaaaaaacagaaaaagttttaaaaagggtattgacaaatcgtttgcagggtggtacaatacaaagcataaagcgacaaggaagccgcagacaagagaggacttgtctgcggtttttcgttttaaaatatgaagacttttcaacgacaagggcgtcgtgccggacttctccgaaaatacccttgccgttttcgtatttatgtaaaaggagttttattatgagcaaagtgacggaaatcttcggatctatggtattcgacgacgacaccatggaagcacgccttccgaaagacacttacaaagcgctgcagagaaccatcaagataggcaaacatcttgatttgagccttgcaaacatcgtggcaaacgccatgaaagattgggctatcgaaaagggcgcaacgcattacactcactggttccaaccgatgacgggaatcacggctgaaaagcacgacagtttcatttctcccaaatcgggtaaggttatcatggagttctcgggcaaagaactcattcagggcgaacccgacgcatcttctttcccctcgggcggtcttcgtgcaacgtttgaagcaagaggttataccgcttgggacgcaacgtcttacgcgtttataaaggacggtgtcctttgcattcccaccgttttctgttcttacggcggcgaagcacttgaccagaaaaccgcgcttctgcgttcaatggaagcgataaacagacaggctatgcgtgtgctgaaacttttcggcaacacgaatgttcagaccgtaaaaaccaccgtcggtcccgaacaggaatatttccttatcgacaaatctcttttcgataaaagaaaagatcttatatatacgggcagaactcttttcggcgcaagagcaccgaaaggacaggaacttgacgaccactatttcggcaccatcaagccccgtgttgcggcgtttatgaaagacctgaacgaggaactttggaaactcggcgttcttgcaaaaacagagcataacgaagtcgctccttcacagcatgaaatggcgcctatatttacaacgacaaacatcgccgcagaccataaccagttgacgatggaacttatgcagaaagttgcaaagaatcacgatatggtttgtcttcttgcggaaaagccttttgccggcgtaaacggcagcggcaaacataacaactggtcaatttccaccgatacgggcgtaaacctgctcgaacccggcgaaacaccctatgaaaacgcacagttcctgcttttcctctgcgccgttatcaaggcggttgacgaatatcaggatcttttgagaatctccgtcgcttctgcgggcaacgaccaccgtctcggtgcgaacgaagcgcctccggcgatagtttcgatgttcctcggctccgacctttccgaaattcttgaagcgatagaaaaagattcaaaatacgacgcaaagcaaaaagaacttatgagaataggcgttcatacgcttcccaagttccccagagacacgacggacagaaacagaacaagcccgttcgcgtttacaggcaacaagtttgagttccgtatgctcggttctgcggcttccatatcctgcgcaaacaccgttcttaacacttccgttgcggaagagttgaaacagtttgcggacgctctcgaaggcacggagaattttgaagaggctcttcacgaccttataatgaagaccataaaagaacataagcgcataatcttcaacggcgacggatatgacgagtcctgggtaaaagaggctgaaaagcgtgggctttacaacttgaagacaacgcccgacgcacttgcccacatgcttgaccaaaagaatatcgacctgttcgtatcccacaaggttcttactgaaacagagttgaaagcacgtcacgaggttcgtcttgaaaattactgcaaggtgatcaacatcgaagcactgaccatgcttgacatggttcacaaagacattttgcctgcgatgagtgcctactcttccgaacttgcggacgccgcgcttaaaaaactttctctttccgttgacgttgattgctcttacgaaagagataatacaaagatgctcagcgcgcttctcggagcggcttacagagcaacaaagaaacttgaaaaagatcttctcgactcaaaatccgtcgacggtctcgaagccctcgccgaattttacaagtccactatcctcgacgatatgcgtatgcttcgcgtttccgttgacgagatggagatgatagcatccgccgataagtggccgtatccctcttacggagaacttcttttcggcgttagataaaataaaatcagcatatatacaggagaaaagatcagatgacgaaccgagaaaaagtgctcgttttggatttcggaggacagtataatcaacttattgcccgaagagtccgcgagtgcaacgtttattgcgaagtaaaatcctacaaaatgacgcttgacgaaatacgggcgttcaacccgataggtatcattttcacaggtggtccgaacagcgtttacgaagagtcgtccccgaaagtcgatccgaaagtattcgaactcggcgttcccgttctcggaatttgctacgggtgtcaacttattgcgcatacgctcggcggcaaggtttccgcagcggcaagcgattctgccagagaatacggaaaaacggagactttctttgatacggattgcagacttttcaaggggcttccgaaagaaagcgtgacgtggatgagccacggagactatatgtccgacttaccgtctgcgttcaaacttgttgcacacagcgacgcttgccccaatgttgcaattgcggatgaagaaaatggattttacggcgttcagttccatccggaagtaaatcacacgcaatacggttttcagatgatacgaaacttcctttacgaagtttgccacgcaacgggcagttggacgatgggcgatttctgcaagacgaccatcgcgcatttgcgtgaggagataggcgaggacggacgagtgctgctggctctttcgggcggtgttgactcttcggttcttgcggcgcttctcggtcaggcgataggcaaaagattgacttgcgtttttgttgaccacggtcttatgagaaagaacgagggcgacgagatagaagcggcattcaaaaaatgggacatcaattttgtccgcgtcgatgccgaaaaacgctttcttgacaaacttgcgggagtcacggacccgcagacaaaacgtcatataatcggagcggagttcggttatgttttccgcgacgaggcggacagattcggcataacgaacagagacttccttgcgcagggaacgatatatcccgacgttatcgagtcgggagagggcgatgcagaagttataaagagccatcacaacaggctgttgccacccgaagtcgttgcaagattcaagggagttcttgaaccgttgagtcttctttttaaagacgaggttcgtgctctcggacgtgaactcggacttgccgaaagcgtggttatgcgtcagccgttccccggacctggacttgcgatacgcataatcggcgatataacaaaggcaaaagccgatacgcttcgcgaagcggacttcatcatgagagatgaaatagcgaaaagcggagaagataaaaacatcaatcagtatttcgccgttctgacggacctgcattcggtcggcgtcatgggcgacggaagaacatacgataacgtgctggctttgagagccgtcacgaccaatgactttatgaccgcagagtgggcgagaattccttacgagttgcttgaccgcatctcgacaaggatagtcaatgaggtcaaaggtatcaacagaatagtttacgacataacatcaaaaccgcccgcgacggtggagtgggaataaaaatatttccacggaaaagttttaaggcggtaaaacaggaacacagaacgcattggagttgtgttttgtgttgaaagtgttcgacggaaaaagagtgagacttccgacgatcatttcaaaggcattgacggagacgagtaacgcggaaaaatcggaaacagcgagtatgggacggtgtgagccatgctccgatcccgcgtgaaaaaccctcccgagccgcaatccgaaccccgttcggcgggtcagtaggtgcgccgtgatcacgcgttaagtgaataggtttgacagaaccgaacagagtgatcttcataagaaggtaaattaggtggtaccgcgggctgcacacgctcgtcctaaaaaactcaaacgtgcgaaaacggaggacgattatgtgttcgattatggggtactgcggtaccgttatgacaatcaaagattttaagacgggctttgacaagaccgtctccagaggccccgatatgtcccgtatcattgatacgggcaaggggcttttgggctttcacagacttgctatcatgggacttgacgaaagcggtatgcagccgtttgcgtttgggggtaactatgttgtctgcaacggcgagatatacggattcagaaaactgaaaaaggaactcgaagaaaaagggtataaatttgtcagcgattccgactgcgaactgctgctgccgctgtataaggaatacggcacggatatgttcggaatgcttgacgccgaatatgcgctgattatttacgatgcaaaagccgataaatatatcgccgcacgcgacccgttcggtatacgtccgctgttttatggctatgccgatgacggaaacattatgtttgcgagcgaagccaaaaaccttgtcggtctttgcgaaaaggttatgccgttccctccggggcatttttataaggacggcaagttcgtttgctatcgcgacataggaaaagttgacaaagtatgtcacgacgatgttgagactgcctgcaaaaaaatacatgaaaaactcattgcgggtattgaaaaaagacttgacgccgatgctcccgtaggctttcttctttcgggcgggcttgattcttctcttgtatgttccgtggcggcaaaactctcgaaaaagccgataaaaacgttcgcgataggtatgagtaccgatgcgatagatttgaaatacgcccgcgaagttgcggattatatcggttcagaacatacggaagtcattatgacggaagacgatgttataaaggctctgcccgatgttgtcgctcttctcggaacgtatgacataacgacgattcgcgcttcaatgggtatgtatcttgtctgcaaatatattcacgaaaacacggacataagagttttgcttacgggcgagatttctgatgaacttttcggatataaatatacagatttcgccccgtccgcggaagagtttcagaaagaggcacagaagagggtaagagaactttatatgtacgacgttctccgcgccgacagatgtatttccgtcaactcccttgaagctcgtgtgccgttcggagacctcgatttcgcttcatacgtcatgagtctcgaccccgaaatcaaaattaaccgttacggaaaaggcaagtatctgctccgtcacgcttttgagggcgactggttgcccgaagacattttgatgcgcgaaaaagccgcgttcagcgatgccgtaggacactcgatggtcgatgacttgaaagcgtatgccgagaaaaaatattcggacgaagagtttgagacaaaaataaagaaatatacctacgccgctccgttcacaaaggaatctctcctttacagagaactttttgaaaagttttatcccggacaggcggaaa

SEQ ID NO: 1507 - DNA, 10227 bp, Unknown
  16S sequences of unknown bacteria
gtcgccttcggctcctccaaacatccaaagtcttactcaatgtagttttcatcatatttttttgagaaaagtgtaacctatcattgacgactgtacattgtttttgtttaaaaataaaaataagctcttgacaaagggacattatacggatataatatacttcgtgacgatagaggtggaagtatgattattgatttaaaatgtatttttgtcaatgaaaattcttccttaccgattgagtatgctttggatatgagcggcgttgaattttcgggcacttatccgctcaaaaagcccgttaagatcagcggtacggttactaacaaagcaagtcttaccgttcttgatgccgagatcacctatgaatacagcgcaccgtgcgatcgctgcggagccgaaacggcaaaggaatacaccgttaaggtgaacaagcctttagccccttctatcgagggggaggagagcgacagtatcctgcccgttcccgatatgaagcttgatcttgacgagcttgtgtattccgaggtggttgttagcgtccctatgaagcacttatgcaaagaggattgcaaaggcatttgtgaaaagtgcggtaaaaacctcaatgagggcgaatgcggatgccctaaaagagagatagatccgaggctttcggtgcttgccgatttgctgaaggactaatacttatttttttaaggaggtgctcgaaaatggcagtacccaagagaaaaacatcgaaggcgagacgcgataagagaagaaataatgtctggaagataagcgcaccgacattggtaagatgctctaactgcggtaattataaacgcccgcacagactttgctctgcctgcggtcagtatgacggacgcgaggtagtaaaggtcggcgaataattcgtctgtctatcttgtaacggggcagagggggagtgtatcctcctctgctttaatcttatatgcatatgtaaaggaggcggcggaatgtctgtagtaatatcgtctgttactccgggcagcccggctgaaaaagcgggactgcacggcggcgatacgcttatttcaataaacgataatgaaatagtcgatgtcttggactatagattctatcaagacgtgacccgccccgttttaaaatatattgacgaaaacggcaagcttaaaaaagcgaagataaaaaagcgggaatatgaggagcttgggcttgaatttgaaacttatcttatggataagcagcattcctgccgcaataagtgcgttttttgttttatagatcagctgccgcccgggctgcgcgaaagcctttattttaaggatgacgactcgcgcctttcctttcttttcggcaattatataaccctcaccaatatttccgagcatgaaatcgagcgcattataaaaatgcatataagcccgataaatgtatcggtgcatacaaccaaccccgagctgcgcgtcaaaatgatgaaaaataaaaatgcgggcaaggtgctttctatcatagaccgctttaatgccgccggaataaagcttaattgccagctggtgctttgccccggctataacgacggcgcggagcttgaaagaagccttactgacctttgcgcccttgaaaatgccgaatgcatagcggcggtgcccgtgggcgttaccgcttacagagaagggcttgaaaagcttgaaacctttaataaggaaactgcgggcgcggttattgatataatagaccgtttcggaaatttctgcgaggaaaaatacggtgacaggcgcgtttacgcggcggatgaattttatattttggcagagcgcgaaatgccgggcgccgaatactacggcgattttttacagcttgaaaacggcgtgggaatgtgggcgcttatgaaaaaagaggtagaggacgcgctggcggatacggaagaaacaagcggcttgccgcgcaaggtatcgcttgcaacgggcgaagcggcgtacccgcttatagcctcggttgcaaagctgtgcgaagaaaagcgtgcggggctcaaatgcaatgtgtacgctattaaaaacgaatttttcggcggtaaaataaccgtttcggggcttgttaccgctaccgatattataaagcagataggcgataaggatctgggcgacgaactgctcatccccgcctcaatgctcagaagcgagggcgatatgtttcttgacagcataacgcttaaagagctgtccgaacggctcaatattaaaataactcccgttgcgaatgacggatatgagcttaccgaggcaataataggaacataataaaagagaggtgctttaaaaatggcaaagcctgttgtagcggttgtgggcagaccgaatgtgggaaaatccactctgtttaacaagataataggtaaacgtctttcaattgtggacgataccccgggtgttacaagagaccgtatatacggcgacggcgagtggctcggcaaaaggtttatgctggttgataccggcggaatagagcctgacggcggcgacgttatactggcaggtatgcgcgcgcaggcgcagctcgctattgataccgcatcggctataatattcgttaccgatataaagtcgggcgttaccgcggcggatgcggaggttgccgcaatgctgcaaaaaagcggcaagcccgtggtgctttgcgttaataagtgcgacggaataggcgaggttccgccggatttttacgagttttataacctcggaataggcgacccgattgcggtatcctcggttcacggtcacggtacgggagatttacttgacgcggttatagaacatataccggcggaagaatttgaggatgaggatgaggatataatcagcgtggccgttataggcaagccgaacgcgggtaaatcgtcactcataaatcagattgcgggcgaggagcgttcacttgtatcggatgttgcgggaaccacgcgcgacgcgattgatacccgcatagagcgcgacggaataaagtataattttatagacacggcaggactcagaagaaaaagccgcgttgaagaaaaaattgaaaaatacagtgttttgcgcgctaaaatggcggtagaacgcgccgatgtgtgcgttattatgatagacggcaccgagggctttaccgagcaggactcaaaggttgcggggcttgcggtagagcagggcaaggcgtgcattatagccgtaaacaagtgggacgccgtttcaaaggacggcagaacaatggacagcacgagaaaatccttaatgaaggacttttcctttatgccatacgcgcccataattttcatatccgccaaaacggggcagcgggtcgacaggctttttgagcttataaaatatgtatacgagcagaacaatatgcgtatttcaacgggtatgctcaacgatattttagccgacgccactgcgcgcgttcagccccctacagacaagggcaaacggcttaaaatttattatatgacccaagcgtccacaaaaccgccaacatttgtttgcttttgtaataaggcggagcttttccatttttcgtatcagcgctatttggaaaatcagatacgctcaaccttcggacttgagggtactccggtgcgctttgtaattcgtgaaaggggcgaaaaataatggtatttgcggcaatagctgttgtcatagcggcatattttataggcagtgtaaatttcgcagtgatatttgcaaaggcttttttgaaaaaggatgtgcgtaacctcggcagcggcaacgcgggagctacaaatgttatgcgcacggcgggctttctccccggcatacttacctttgtttgcgatgcgttaaagggctttgtagcctcatacctcggcaagcttgttttcgggcttgttatgtcctccggtattgactggttagatccgatttacggcgcgtacctttgcggcattgcctgtatgttagggcatgttttcccgatatttttccagtttaagggcggcaagggcgcagccataagtgtaggtatatacgcagtatgctgcccgcttgcaatcatactggggctctgcgcctttgcacttgtactgcttacaaccaaaattgtatcgctcggctcacttgccgcagcgcttacggtggttgtgctttcaatcgttttttttgcgggcgagggcaatatatttgttgtggcggctttgagcataacaatgggcattattgtttttgcgaagcataaggataatataaaacgccttgttcacggcgaggaaaaaaagcttactctcggaggaaaaaagaatggctgatattgcggttttgggcgcaggcggctggggcatggctctggcaatctccgcaacgggcgcgggaaacagcgttaccatatggtcgccttttgaggaagaagttaaaatgctttcggaaaagcggacgaacgaacgtctgctttcgggcgttactctgccagaaagcataaaaatcacgaccgatatgtcctgcgtagagggcgcggtgcttacaattatcgcaaccccctctaccgctgtgcgcagcgtggcggcgcagctgtcggggtataaaaattacggaatagtcgtaaacgtcgcaaagggacttgaaaagggaactctgctgcggctttcgcaggtgataagcgacgagcttaaaaaccccaagggagtggcggtattatcgggtccctcgcatgccgaggaggtggcgcgcggaatacccacgtcaatagtagctgcgtccgaatcgcacacaacggcggaaatagtgcagagcattatgtctgccgagaatttgagaatttacacatccaatgaccttataggcgtagaactgggcggcgcgcttaaaaacataatcgccatagccgcgggcttttgcgacggcttggggctgggagataactcaaaggcggcacttataacgcgcggacttgccgaaatggcgcgcctcggcgtttgtatgggcgctaaggagtacacctttgcagggcttacgggaatcggcgatctggtagtaacctgcacctcacgccacagccgaaacaaccgcttcggtcacaaggtgggcgagggtatgcctattgatgaggctttaaaagaggtcggcacggttgagggctattacgcggcggatatggcacacacattagcacaaaaatataaaatcgaaatgcctataatagaggaatgctacgcggttttatacggcgggaaggatgtaagaaatgttacaaacgatcttatgcgccgtccgaaccgcagcgagcattaaagggggaattttatgaaaaacaacctttttatgccgactgatatactcttaccggcagagaagcccgagaaatgggcggtaatcgcctgcgaccaatacacttcagagcccgaatactgggagaatgtgcgcaaaacggcgggggacgctccctcggcgttcaatattatttttcccgaagcgtttttgagcaaaaacaacgccgaaaaaatttcaaaaataaactccgttatgaagagctaccttgagggcggcgttttcaaggaatataaaaacacctttgtttatacagagcgcacccttaaaaacggcaaaacacggcgcggtattgtaggtcttatagaccttgataattacagctacgaaaagggcagtaaagcgcttatacgcgctaccgaggcgacggtaaaggaaagaatacccgcaagggttgaaatacggcgcggcgcatatcttgaaatgccgcatgttatgctgctttgcgatgaccccgaaaatctacttataggcgggcttgcaagcaatatcggtaattttgagtgtctttatgattttgagcttatgtgcggcggcggacatatacgcggctttgcacccgataaggcggcgacagaggcactccggaggcataccgaggagcttttgcggaaaaacggcggagacatgcttttcgttgtgggagacggcaatcactcgcttgctgccgcaaaggaatgcgcagcgctcggcggctcacattacgcgcttgttgaggttgtgaacattcacgattcttctcttgaatttgagcctatttaccgcgtgcttttcggggtggagcccgaaaaggttattgaggattttacagaaaaatgcggcggagaatatcggggtgccgacgcacagcgattcacctgcgtttacggcagtaccgaaaaggaaatatccgtgcggccggcatcaaagcttgctgtgggaactctgcaggcctatctggatgattacttaaaggcacataagggcgctgaaatcgactacatacacggtgagaattcccttaaaaaactggcggagacaagaaacgcgctcggctttttatttgacggaatgaaaaaggaagagctttttgacgcggtacggcaggacggctcgctgccgcgcaagaccttttcgatgggcgaagcggacgataaacgcttttaccttgaatgcagaaaattgtgacaataccgtaaaaggactgttttttacttaaaacagtccttttatttttatgtttattctgatatactaaagaaaagaggtgcgattatgaaaatactgaatttcggttcctgcaatatcgactatgtgtatcggcttgaccatattgtaaacggcggcgaaacagagcacggagatagccttgatattttccccggcggcaagggtcttaaccaatcggtggccttagcgcgggcaggagtgaaagtatttcatgcggcgattttcggaaaggacggcgcttttctttcggatattttgaaaagcaacggagcggacgtatccctttccaaaaccgtggacgagaaaaacggacacgcaataatacaggtgaataacgacggggaaaacgcaattatagtttaccccggcaccaatcatttaataaataaggaatatgcggactgtgttctctcgcatttcgaaaagggcgattttctcattttgcaaaacgagataaacgagcttgaatatataataaatacagccttcacacgcggaatgaaaataatactcaatccgtctcccatacgcgaaaatcttaaaaagatcgaccttaataagctttattgcttagttatgaatgagcatgaggcacaggaaatactcgggggagaaaccgcagagcaatgccttgaaaaagccgaaagggagttgcccgaaacggctgttgtaataacgctcggaaagcgcggcgccgtttactcggacagtggaaaaaaggtatatcaggcggcatatgaagtaaaagcagcggataccaccgcggcgggggatacgtttaccggctatttcgcggcaggattatacaggcaggagccgattgataaaatattaaagcaggctgccgcagcggcggcaatttccgtatcgcggaacggggctgctacctctataccgctgcttgccgaggtatgcggacttttgccctcaatgaccgagcgcaaaaccgataaaaatgccgccgagcagcttaaaataactgaaaattatattgagaaaaatttaaaacaggcgtcgctgaagggccttgcgaaagagcttaattattcctataattcggtgggcaaacttgtgagaagcttgacgggtatgccgtttacggaatatttacaggcaaaaaggttaaacgaggctatgcggcttttagaggaaacctcactttcggtgctagaaatttcaaacgccgtaggctatgagaacgacagctttttccgcagaaaattcaaggaaagattttctgtattgcccaagcaatgcagaatgaataaaggagttttaaaaaatgacaaaagagcaatttattaaaaatttatcggttcccgaaggaaaggttgatgtggtaatagataccgacgcgtttaatgaaatagacgatcaatttgcaatagcctatttaattcgctcggtcgaaaagctgaacacaagggctgtttatgccgcgcctttccataattcaaaatcaacaggtcctgccgacggcatggaaaaaagctatatggaaattgaaaagctgcttaaatttcttaatgccgatattccgacttttaaaggctcaaaaagctatttgaaggatgaaaaaacacccgtcatatcacctgcggcagaggatcttgcggagcgcgcaaacggttattcgcccgaaaatccgctttatgttgtggcaattggcgcaatcacgaatgttgcgtcagccgttttgcttaaccccgcagttgcggaaaataccgtagtggtatggctgggcggtcatgcccaccacttttcccataccaaggaatttaatatgtttcaggatattgccgccgcgcgggtagtaatggggtgcggagtgccttttgtacagttgccctgctgcggggttgtaagctcgttcaaattttcacgacccgagcttgagtattggctgctcggaaaaaatgacttggccgactaccttgtgaaaaatacagtagctgaggcggagtcgtatgccgcgggaaagccatggacgcgcactatatgggatgttgccgcggtggcgtggctgctgaatgacggagagcgctttatgagctcgcggcttataaatacacgcctgccggattatgacggatactacggttcgaccgagccgaccctgttttgtaattatgtttactttatcaatgacgatgctctaaaagaggatcttataaataaactgatcgggaaaatttgattcaaaggcattgaaaaaatgaaaaagcctccgattcaggaggcttttctgttatatgaaatctttatatcttaaatctttttatcgcttgtaagcacggttttaccgcccatgtagggtcttaacgcttcggggatgagaacgctgtaatgctcgccgtcaaagcggagattgttttcaagaaaggcaatcagcatacgcggaggagcaacaacggtattgttaagggtgtgggcaaggtattttttaccgtccgtgccctttactcttatgccgagtcttcttgcctgtgcgtcaccgaggttagagcaggagcagacctcgaaatatttctgctgcttcggcgaccatgcctcaacatcgtaggacttgaccttcaaatcagccaaatcgcccgtgcagcattcaagcgttcttaccggtatatccatgctgcggaacagctctaccgagtagctccacattttgttgaaccattccatgctttcctcgggcctgcagataactatcatttcctgcttttcaaactggtgaatgcggtaaatgccgcgttcctctattccgtgagcgcccttttccttacggaagcagggagagtagctggttaaggtgaggggcagcttttcctcgggagtgatgctgtcgataaacttacctatcatggaatgctccgatgtgcctataaggtagagatcctcaccctcaatcttatacatcatggcgtccatttcctcaaagctcataacgccggttacaaccttacttctgatcatgtaaggcggaatgcagtaggtgaagcccttgtcaatcataaaatcgcgtgcataggcaagaactgcggaatgcaggcgtgcaatatcgcccataaggtaataaaagccctcgcccgcaaccctgccggcggcatccttatcaattccgtcgaaaagctgcataatgtcggtatggtagggaatttcaaaatcggggtgagattgctctccgaactgctgtacctcaacattttcgctgtcgtccttgccgacgggaacgcttgaatctacaatgttcggaatcttcatttgaatttcggtgacccttttctgaagctccgcctctttttcttcaagggctttcagctcctctgcctgctcgtttacaaggcgtttcatttcctcggcttcatcacgctttccctgcgccataagcatacctatctgcttgctcaccttgttgcggtttgcacgcagatcgttcgcgcggttgtttgcggcgcatttttcgccgtaaagcgagatgacctcgtctacaagcggaagctttttatcttcaaatttctttttgatgttttctttaacaatttccggattttcgcaaataaatttaatgtccagcattttatactcctccgtcagaccgtaatctctttacagtataacacaacagttctttcctgtcaaatttaattgaaagagaacagcgcataaatttgtacagtcgtcaatgataggttacacttttctcaaaaaaatatgatgaaaacta

SEQ ID NO: 1508 - DNA, 15874 bp, Unknown
  16S sequences of unknown bacteria
ccaagccgcatgtcccccgagcaccctgcgcgccataggcgcgcagaggcgggtgcagggcgaagccctgcttagcggccgaactgaggatcgttgttgccggaagtggtggtgaacatttcgatcatgttgatcgggtcgttgaagtccgcgatccagccttcacgagcgaagtcgtagttgccgttcttgcggtcctgcaggaacacgttccagtcgcaggtgcggatggtcagggtgatgcccaccgcagccagatcctgctggatgcactcggcgatggcgatgtggctggaggactcgttgaccaggtattcgagggtgatgggagtggaagcggacagcataccgttgtcgtcgaactcatagccggcggacttcagcagctcgatagcaccttccacgtccacatcctcggcataatagccgtcgcccacgggataggtgtaatcgtcgtcgctctgcttgaacacgccgccgtggccgtccatcatgccggcggggatgtagctggtggcgaccttctgctcggtctggcccacggtgtcgatgatgtactgacggtcgatcagcttggagaacgcttcgcgcatggcgttggcctgctccacggtcttgccgtcgaagagcttgctcgtgacgttgaaggcggcgtagtaggtgcccagagcgtcgatgacgtggaactcggggtcttccttcagagaggcgatcatgtcggtgggaacgctgtcggcaaagtccaggtcgccggcctgataggcggcgtagatggcggtatcgtcagcggagagcatgaactcgatcttgtcgatggtgaccttgtcagcatcgtaccagttggggttcttggtgtaggtcatggattcgttgtgcttccactcggtcagagtgaaggcgccgttggacacgaagcccgcttcggtgcaccaggcgccgggcttgtcggcggtggagttggcttccacataggcctgctgcacaggcaggaaggtggggaaggcagccagatccaggaagtaagcgcagggagcgctcagaaccacggtgaagaccttgccgtcttcagaggcggaaacctgcagattatcgggatagccggcgatgccgttgagcatgtaagcgtagtcggcagcggtctcagggttggcggcgcgcttccagctgtagacgaagtcgttggcgtccagcttggagccgtcggaccacttcaggtcgtccttcagggtgaaggagtaggtcaggccgtcctcggacatctcgtagctttccgccagagcgggaaccagagagccggtggagtcataggtgtacagaccggagaagctcagcgcggccagacaggcgccgtccacggagctgttcagagcaggatccaggaagtcaggctcggaggcaatgttcacgcgcagggtatccgcattgtcgccggtcttggtggcgtaggcgaagaacttggtctggaacaggttggcatagatgccatccacgttggacttctgcagatacaggtcgttgtagtagtacagcggcacgacggcgtaggtggccatcagcatatcctcggccttgtgcagcagcgcttcgcgctccacaaagtcggtagtggacttgatttcggctaccagagcgtcatactcggtccagtcaggctcggagccttcgtcagccagagcaggcgcggcacaggccatcagcatgaccatggccaacacgagagaaagcagctttttcatggtgtttttcctcctttaatttatatctaaaagcggttttccgctctcagatcagtagtggggattccagcacgcgatgctgtggccgggcgcggtctcctgcagggaggggcattctttggcgcagcgctcggtagcgtaacggcagcgggtgcggaagggacagccggagggcatgttcatgggactgggcacgtcgccctccagcgggatccggtgccgggtcttggcaatgtccggatcgggaatgggaatggcggagatcagcgactgggtgtagggatgctggggatggttgatgatttcgtccgattcggccgtttccacaatccgtcccagatacatcacggcgatccgcttgctgatatgctgaaccaccagcaggtcgtgggcaatgaaaaggtaggaaatgcccagcttctgctgaagctcctcgaaggtgttgatgacctgcgcctgaatggacacgtccaatgcggagaccggctcgtcgcagacgatgaacttgggctctaccgccagcgcccgggcgatgccgatgcgctgccgctggccgccggaaaattcatgggcgtagcggcgggcatggtcgctgttcagccccaccagattcagcaggtgagcgatcttttcttcccgctctttcttgctggaatacaggtggtggatgtccagcggctccccgacgatgtcgctgaccgtcatgcgggggttcagggaagaatagggatcctgaaagacgatctgcatttcccgacggtactgggaaatgtttttcggcgtaatgcgaacgcccttgtagatcacttcgccgccggtgggcttgtacaggtgcagaaggctccgtccaacggtggtcttgccgcagccgctttcgccgaccagacccagcgtctcgcccgcgtcgatggtgaagctgacgccgtccaccgccttcaggggcgtattctggaaccagccggtgtggatgggaaagtattgcttcagatcccggacttccagcagatgctccggctgagaaacctgcttttcaagctgttcactcatgaagcgttccctccttctgtgcttcgtcgtagacctgcttgacgttcatccagcaggaggcgatatgggaatcgttgacccgaacctcttccggctgttcagtcaggcagatcttcatgcagcggtcgcagcgggaagcgaaggcacagcccttgggcaggttggtcaaatcgacgggggagcccgcgatggggatcagcttgtcgtgaccgccgttcagggtggggatggaacgaagcagtcccttggtgtactcgtgacgggggttgtagaaaatttcgtccaccgtgccccgctcacagacccgaccggcgtacatgacgatgatctcgtcgcacatgtcggcgatcacgcccaggtcgtgggtgatcatgatgatggccatgcccattttcttctgcaggtccttcatcagctccagaatctgggcctgaatggtcacgtccaaagcggtggtgggttcgtcggcaatcaggatgtccggctcgcaggccagcgccatggcgatcatcacccgctggcgcatgccgccggaaagctcgtgggggtactgcttcagccgcttttccggctcgttcacgcccaccagctggagcatttccagcgcccgggcgttggcttcggcccggttgcggtcggtgtgcagcaggatggcctcccgcagctgattgccgatggtgaaggtggggttcagcgaggtcatgggatcctgaaagatgatgctgacccgcttgccgcggaactcccgcatctgctttttggaatatttgacgatgtcctcaccattgaagaggatctcgccaccaacgatcttgccgggctccaccagaatgcgcatgatagagtaggcggtcacgctcttgccggagccgctttcgcccacgatgcccagcaccttgcccttgtccagattgaaggaaatgccgttgacggcccgaacctcgcccgcgtccacgttgaaagaggtgcagagatttttgacttgcagcagtggcgtatccatatcgtttttacctcctcagcttggggtcgaaggcgtcgcgcaggccgtcgcccagcaggttaaagctcaaaacgatcaggcagatcgccagggcggggaaaagcattttccaggggtaggactgcatgccgccgcgggccgcgttagccagcgagcccagcgagggcatgggagcctgtacgcccagaccgatgaagctcaggaagctctcggtaaagatggcggaaggaatctgcagcgccacggaaataatgatgacgctcatgcagttgggcaggatgtgcttgcggatgatccggcggggcttggcgcccatggccttggccgccagcacgtactcgttgttcttgatagaaaggatctgaccgcgcaccagacgggccatgcccacccagtacagcagcccgaatacaatgaacaggctgatcatgttgttgccgatggaagcaagtaccgtgccctgaatcatcggcccgatggtctgccccagcaccacgctgagcaggatgaccatcagggtgtcgggcagggagtagatgatgtccacgatgcgcatcatgatcaggtccacccggccgccgaagtagccggatatggagccgtacagaaggccgatcaccagcacgatcaggctggcgaacagacccaccagcagcgaaactctcgcgccgaacaccacgcggatgaagtaatcgcggcagagttcgtcggtgccgaaaatgtgggggaagatggtttcaccgttttcgatggccttcagctcgtttttggaatattcaaagggagccaggttcttggcggtcttgtcccgcttgccgtccacggtaatcatttgagagtagctgtagggataaacggcgggcacgatgataatcgtcagtgtcaggatgatgagaacgatcagactggccacggccagcgggttcttcatcagcttgcgcatgccgtcccggaaaaaggtggtggattcgcgcatggtctcatgctgctgtttttcttcatccgtggcgggggagaatttctgcaaattgatctgcaggctcagaaagtgctttctgggcagcatatcgtccttgaatgtatggttcacggcgcgttcctccttaatccagtttgatgcgcgggtctaccagcttgtagaccaggtcgctcagcagggtggccactaccatcagaaccgccagaaagatcgtggtcgccatgatcatgggatagtcctgattgttgatggatttgacgaactgggtgccgaggccgccgatggtgaacacggtctccaccaccatggagccagtcaggatgtaggccgtcatggggcccacgtaggtgatgaccgggatcagggcgttgcgcagggcgtgcttgaagatcaccagcgagtccttcacgcccttggcccgggccgtgcggatgtaatcctgccccagcacgtccagcatactggacttggtcagccgggtgatgtaggccattgggtacatggccagcgacagcaccggcagcacgtagttgggattggaggtgctccatacgcccacccacttaagctgcaggcagaacaccagcagcagaatggtggccagcacgaagctgggaacggacacgaacagcgtcgtgatgaaaatgatgattcggtcaggccatttgccccggcacagggcggcgatggagcccagcaccagaccggccaccacggcgatcagcgccgccatcagacccagccgggcggacacgccgaaggattcaccgatcacgtcgctgatttcgcggcccgtcttgagagaaacacccaagtcgccgtgcagcaggttgcgcagatagttgacgaactgctcgcccagcggcttatccagcccgtaacgcgcttccaacgcggccagcgtcgccgggtcgatggctttttcgctggaaaacgggccgcccggaatggcgttcatggcaaaaaaggtgatggccgcaatgatcaaaacggtcaacagcgccagtagaatacgcttaatggagtaccgcagcattcccttccatcctttcctggccggatccccggaatcatcggaagatccgccgcacagggaaaccctgtgatttttcaaattatagagacaacctgccgcagtttcaataaaaatacactgaaagtacaccaattctgtatggaaatacaatcaaaaaacaaaattcggtcatttgagcccttttctgcagttgttacaagtacttctattgacaaaatatggtagacagatgtaacctattctcagaaagcggacgtaccccttatttcccgaagggttcacgccgaggaaaggagcattcaccatgcgtaccgctgttgtctacaattttctgctggaagcaaatctgatggcttccatcgcgatcctgctgatgctgcccattcgccgttttctgagaggacggctgggcagccgggccatttattttgcgtggctgctggtggccgttcgtctgctctgccccctgaccctgcccaacccggctatcaacggcatccgctctccctttgccatggacagcgccattcgtcccatcgccgggcagctgatggtgcgctttcaggacatactttcccgggtggagcagctgatggaggaacatcccgccctgcccggcagcgcggctgtggcaaaagacatgaaccatctattggaaggcatgtataatgggatgctgcccctgacgttgatgaaaatttatctggccggggctgcgctggtgctgatctggttcgcagccgccaatctccgcttccgtctgcggcttcgggctgggcggatcgagcccatttccgggcggctgctggaacagtacgagcttctgtgccgccagcggaacgtgcgccccattcccgtttattttaccgaccctctgcccagtgcctgtctggtaggcgttttccggccctacatcgccctgcccctgagcgcaccgccccaagaagcggtgcaggtgctgactcatgaggtgtgccactacaagggcggcgaccatctgtgggcactgctgcggcttctgtgctgtaccgttcattggtttgatccgctggtctgggcagcggcgtatatgagccgcaccgacggcgagttggcctgcgacgagcgggtgatcgacaagctcaagccccggcagaaactggattacgcccatgtgctggtgttggcggcggcccggcggaacgctccgggtgtgggcgtgctggctaccggcatgaccatgaccgggaaaaagctcaagaagcgggtgaacagcatcctgcacaatggacaggtgcgcaggggcgcggcggtcgcctttgcgctggcggcttccatggcgctggtgggcgctttcgccacaggggagcgggcctatgtcctccgtgtgccggagacccagacggccatcgccgcccattccgtcctgacggagcaggaggccgtggaggcggcgcagcgcttctggcggcgccctgacgtgagctggaacgtccccgggctggtatggtcggccaccgaatggggcggcgaagaatggctggtaatggccgcgccgaaagacgatgcgcgaaccgttcgtatcacgttggaaaaagagacggggtatatcacgtcctttgaaaatcccttctgcatggccgaaacctcctatgctaccatccagcctttgtccactgcggaggtcgatcaggtgggcatgggcgcgcttgcttttgccgacgcggtttacccgggctcgtccaaccggatcgatggcatagacaattatggcgaaggaacgcacggggacgaccggatcatttcgttagccggcgttgcggacacgggcatcttccgcttcgacatccagaccgccccggaatggaaaattgtttattaccgtatgccttctgagaacgccgacggggatgacggcggggaaggcaacggctgaccggcattcaaaaggaggaatatcagatgaaacgacggctttcgatctggctggccctgtgcctgctctgcctgtacgggacggcgctgggagaggaaaccacggcggagtacgcaaaggcgcgcgggatgaatatcatggagctgagtgccgggttgacggaaatctacggctacacgcaggaggaggccgaccaattcctgtgcagcgttaccgaaacggaaagtacgctggaatatgtgctttacccggcagagcatccgaactggcgctatacccacgtattgaaccgaaaaaacggcgcgtgtgaggacgatctgtcgcccttcagcggtactaatccgccgggctatgagggctggctgcgggcgatcctgcagcgggcggcggaagaaagctggtttgaaaactgggatgaagcggccatggcgaacttgcttggtcgtatgactcaattgcagatggaacgttccccacggctggaagcgggtctggcccagaagaacctgacggcggcggagaccgtgcaggagctgttcgtttccaccttcggggatgagttgagctggacggagcccgtccgggaatggcgggacgaggtgctggcgcagcacggcctgaaccgggaaacggtcagtaccgcgccggttcagggcgttcagcgctggcaggcggagggacgcatcaccggcaaaatgacggtcgtggagttcgcaggccaactgccggaagaacttcaaagcctttatgtaaatgaaccccatctggccggttggagctgcctgtcaggcgccatgcgtctgccggagaccgcaggccgtagcgccctgatggcctttggccggggcgaggaacggctgctggtcatggctatggtattagaaggcgaactgcacctgctgcctgtgggggaacggacgcttcttccgggacggtcgttttccattcattatgacccgcaggaaagcctgtattccattgaatatccgctggatgaaaacggcgaggaaacggaatgctttcgggtattgcctgcggcggtgcagcgaagcggagaagaaagacggattctttgtatcatcaaggattaccgccgggtcaatcaaaaaacgctggaaggttttgtgctggaatctctggaatacgagtcggcagcagagggcaactggcgggccacggtctaccggcccggcaagcctacagaaagtcgggacttcgacctgaacctgccccactggctggacgatcagtccgcagcggatttcccccgcagcatggaggagtgcgagcaactggccgaagcaggctccggcatccccgaagggtacgccgtgtgccggggcgttcacctgcggcagaagacatcctcccgctccaaagatctgggagacatgaagaacggaacgctggtgcgtgtgctggaaaccgtgccgggcgacccgtggccgtgggcgcatgtgcaggtcggttcgctggaagggtatatgtgcaatctctatgtcagctatgaaggctcgacgaacgacacgcctgttagtcagatcgttcccctgcccgtagcggagacgctcggcgatactcccctgaaggaaagcacggccctgctggccggaaccgtgaccctgctgcccgccagaactcgaatgcacgtgctctgcgagtatgacggctggctgtacgtgtgcgtcccccggaacgaaccgggctggctcatggacgtggacggtcagtacggctttgtgaaagcggcggatgtcaggacggccgccagctttgttcagctggattggcaaaagaactgaaaacatccggcaaagaagtcttggagggcttacggagaaaacagtccgcttgaagatttcacggatagtgtcgcctattacacctttgcgcatgaccagtttgttgctttgtttcctgaacgagcaaaactactggatgccattttgaaataaggaggctttttcattggcaacttacagacgcgacaacgaagaaacgcccagcggaggcgcgtattccgagatttattactttgatgatgatggaaaccccgccgatgaagaagaagcgacccgatgtgttatcagggaatgcgacaaagacggaaatttgttgaacgagatttggggaaccgtataaccacaagcaccctgcgccgcgcatggtgcttttttgcaaagaaaaagaaaaggaaaccatgaaaccctgttttgtgaaatggctgagagccgctggcatccgcgccattaaggccgtggttcagaccgccgttgctgccatcagcaccgccgccgtgctggcggaagtgggctggctcatggacgtggacggtcagtacggctttgtgaaagcggcggacgtcagaacggccgccagctttgtccagctggattggcggatggaatcatcagatcaataggaacaaacgccccggtcagttcgcccggggcgttcttgattcccggcgccgatttcgctataatgggatgaaaccatcggagaaaggcggacggagagaatggcgggcaaggggctctttcggagaatgctggggctttgcggcatcctgctggcggggatcgccgtaggctttgcgctgctgacggcagtgtttttgctgccggtggacgcgatggaggagcatgtgctggcttcgatccccgctttgagcggcgaatggggcacgggggaggaatcctacgagcaggtgctcaagggctacacctccacccagctggataattccaccgatgcttatatgctgctgagcgccatccaccgttcggacaaaagcgcggtggatcaggctgtgaacgtctatacatggcaggacccggacagcttcggccagtacggcacactgctgcgctatggaaaaagcggctcggagggaatgcaggaaaaagccaccgcccgttactggctgggctatctggtggtgctcaagccgctgcttctgtttctgaactacatggatattcggatgctgaatatgatcgtgcagctggggctggtcatgctgctgtgctgcctgatgcagaaacgggggctgggccggtatgtgctgcccttcggcctgtccctactgtgcattacgcccggcgtgacgtggctgtcgctgcaattctccaccacgctgctggtggcgcttgccgccatggccgcgctgctctggaaaccgcagcggaggaaaacgccgatggcggaggacgtgttcttcctgctgacgggaatggcgaccagctactttgattttttgacctatcccgtcgcgtcgctgggaatgccgctgatcgtgtggctgctgctgcaccgggacgagacggcgcgggcctgcctctggcggatggtgcgctgcggtctgtgctgggctttgggctacgcgggcatgtgggccggaaaatgggcgctggcgcttttgtacggcagcgagggcttctggtctacgttggtgggcagtctggaggtgcgcacgtcccacgaggtgcggggcgtgggggagatcagccggttggacgctctgtggaaggctgcgtccgtgttcttcaagaagccctacttcatggccggggcagcggcgctttttggctatggggccgtatttgtccgccgcagggcccggaaactcccgatggagaaaaacagccgcggactggccgccacgctggtttgcgtggcgctgctgccgctggggtggtatctttttaccgccaatcatacctacaatcatgccttcttcacgtcccgcgccctgtgcgtgacggttttcggactgacgggcgcactgacgtgccgcctcccggcaagaaaaaagaaacaaaattgaattacgttcaaatttcatttggaaaatcggagttctcctattgctaactccgattttttcttgtatgataggcgagcgagacaacccaacgccgcacgccggccgtcccgggatgatcccccgaagcggctgcgcatttaaaatatgacccatatcgttgcttcctgattcgacaagaccaaaggagaatatttgccatgcctcaaacaaagacacaggccggagggaagaaagcccggctgctgtggcattttctcaggggcagcaaacggctttatctggccgctgtgctgtgctctgtgtgcatcacctttctggatatgctgacgccgcagctgatccgcatcacgattgacaatgtgctgggacagctgcccatggccgtgcccgcctttctggagcctgcgtggctgcgtctgggcggcgtggaagccctgcgcacccacctgtggtggatcgcgctggcggtgatcgccattgcactggtgatcgccttcttccgctacggcaacatgacgctgaccaccaaggcttccgagactttcgtgcgcaccatgcgcaacgatctgttcgcccacatccagcgtctgcccttttcgtggcatatgaaaaaccagaccggcgacatcatccagcgctgtacctccgatgtggatatgatccgcaacttcgtcacagagcagctggtgcagcttttccgggtcgcggtgctgctggtgctgggtctgggcttcatgctccgcatgaactggcggctttccatggtggcgctggccagcattcccatcgtcgtgggctattccacctacttccaccgccggatctccaagcgctttaccgagtgcgacgaaagcgagggcgcgctgtccaccatcgcgcaggagaacctgacgggcgttcgggtggttcgcgcctttggccgtgaactgtatgaaaaagaacgcttcgacaaggaaaacgagcatatgaccaacctgtgggtcaagctctgcggttcgctgagccatttctgggccttgggcgactgcgtgagcatgctgcaggtcatgctcatcatcgtgctgggcgccgtgatgtgcgtccagggcgacatgacctccggcgagctggtttcgtttatttcctataattccatgctgatctggcccgtgcgctcgctgggccgcaccatttccgaaatgagcaaggcgggcgtttccatcgaccgtatccagtatattatggattccccggaggagcacgacaagcccaacgcctgcaccccgcccctgaaccgggacatccgcttcgagcacgtgtccttcggctatgaaggggaaaagaaggtgctggaggacgtgaacgcggtcattcccgcgggaagcaccttcgccattctgggctccaccggctcgggcaagtccaccctgatgcacctgctgaaccggctgtacgacctgccgccggaaaacggccgcattaccatcggcggcgtggacatcgccgacatgaaggcggactgggtgcgcgaaaacgtgggcatggtgctgcaggagccgttcttgttctcccgcaccatcggcgagaacatcggcattgccagccgggaactgagcctgacggaaatgcgggaggcggctcacatcgcctgcatcgacgagaccatcgattcgctgaccaagggctacgacaccatcgtgggcgagcggggcgtgaccctgtccggcggtcagaagcagcgggcggccatcgcccgtaccctgacccgcaaaacgcccattctggtctttgacgattccctgtccgccgtggacgcgcagaccgatgtgctgatccgcacccgtctgcgggagcgcatgaaggacagcacggtcattctgatttcccaccgcatcacgaccctgatggaggccgaccagatcatggtgatggacaagggccgggtgacgcagttgggcatccatgaagaactgatgaagcaggaggacggcatgtaccgccgcatttacgacctgcaaatgtctttgaaagaggaggaagacgcgtgagcaaacaggagcagctgagcagcgtgcatcttccctggtttggaattccccgcatcgcgcggtatttcaaaacataccgcggcatgatcgcggtcatgttcgcctgcgtgctgatcaacggcctgatggacatcattctgccgctgtttcagcaatacgccatcgacgtattcgtgctgggaaacaccacccggggcatcgtacccttcaccgttctctacacggcgctgattctgacagaagcgctgctgatccgggcgggcatttaccgggcctgcaagctggaaatggacatcggccgcgacatgaagcgggatgcgttccagcacctgcaaaccctttccttttcctattttaacaccaacagcgtaggctacattcacgcccgggtcatgagcgacacggggcgcatcggttccaccctatgctggggcatgttcgacggcatctggaatgtgacctatgtcatcggctgcgtcatttccatgttctgcctgaacgcccagttggcgctctgggtggtgatcatcgtgccgttcgtggcgctgatttctgcctttttccagcggaagctggtcatcggcaaccgccgcatccgggaggccaactccaagatcaccggcggcttcaacgagggcattaccggcgccaaaaccaccaaaacgctggtggtggagcagcgcatggacgaggatttccacaggctgacggatgaaatgcgtgcggtatccgtgcgcacggcccgctaccgggcgctgttcgtctcgctggtgatttttgcctcggccattgcgctggccatggtgctctggaagggcggagacatcgcccagaacgcgccgctgatcatgcagatcggcacactgagcgtcttcatgacctacgcgacgggcctgatggagccggtgcagtggctggcgcgggtcatttccgacctgatcgccgtgcaggtgaacatcgagcgcgtgacccatctgctggccacggaatccgacgtgaaggactcgcccgaggtaatcgagaaatacggcgactgctttcatcccaaaaaggagaactgggagccgctggcaggccgcgtgaccttcgacgacgtgaccttccgttatccggacggcgacgtgaacgtactggagcacttcaatctggaggtgccggatggctccaacgtggccatcgtgggcgagaccggcgcgggcaagtccaccattgtgaatctggtctgccgctttttcgagcccacctccggccggatcctgatcgatggcgtggacgcgcgggagcgcagccaactctggctgcatcagaacatcggctatgtgctgcaaacgcctcatctgttctccggcacggttttggaaaacctgcgctacggcaagccggacgcgaccatggaggaaatcgacaaggcggtaaagaccgtctgtgccgatcgggtgatcgagaagttggaaaagggctatgacaccgacgtgggcgagggcggcgaccttttgtccaccggcgaaaagcagctgatctcctttgcccgggccattctctgcgacccgcgcatcgccattctggacgaggccacctcctccatcgacaccttgaccgagcactggatccaggaggccatcgaccagctgatggagggccgcacgtcctttgtcatcgcccaccggctttccaccatccgcaaggcggacgtgattctggtggtggacgacggcaagatcgtcgagcggggcagccacgccgagctgatgaaaaaacggggccactactacaacctctacacccgccaattcgaaaaagaatccttgcagcagcagggctaaagccctgcacccgcttctgcgcgccgatggcgcgcaggggtgtagggggacatgccgcttgaccggggttttaccgccgtggcacgaaaggtgccacggctcgccggtctggtgcagcttccttgttggttggatagtacagaccgccattcggcgacgggcctcatggctcgcataaaaaggccagcgtggatttgaaaccacgctggccttttgcgttacgggaatatccatgctgcggcgaaacagtctaaatagcacggttaaagtaggtatattgccaagtataggacaataactcaaacctgcttttctgtgctacaaggccatccaagctacaacgaaatactccaagcaccgcttatttgagtctgcccagcgccagctgcgggggagcagagcggcgataggcagcgaagggaaaaagccttgccctttttgaaagaggaaaagagtgagcacgagcgcgcacgatagta

SEQ ID NO: 1509 - DNA, 32759 bp, Unknown
  16S sequences of unknown bacteria
ccgagcgccgccagtggcggatgcagcgaggcggagcacccgcagcggtcgaaaaaatcgagcaagcgagcagcgcgaagattttttcgggcaccgcaaggcggtgggggcagatgcgcctacggctaccttgggagcgtatctgtgcgcagtacggacgatgctttagcatcgttcgtatccagcactgcaagcgactgaaaggggttcgtcaagggggaatctgtcccccttgaccgtgttttgcctacttttgcacgaacaaaagtaggcccccgccgggcaggcgtacaggttatgcctttgcaaaaggctccgcgacgccgacaggcgagatgaaatttggtataaaggaggtcgcggtgcgcgggtgcgggactgcgatttgccgaggaatattcccgccgaaggcggagctttttgcgcgagttttgtgctctggcgggcggcctgccgaggccgaaatatcccacaaagctgaacaatctgtgaaaaacacccccttttccttgacagcggggggcgataaccgctatactttggaaagactaaaaccggaaaggagggtgcttttccatgcgcaagctgattatcgttgtggcttcgctgctggtggtggtgctgtttatcctgcagggcttccagcagacgcacccgctgccggagccggataataaccgccaatccaccgccaccggcgaagggatcgcggatgccctggatgccatctacttcgatgtttccatcatgggggtacaggacgccaccgccgagcggctggcctcggattttggggtggatacttcctgcctttccgccgtttacggccgctacaccgatggccggttcggcattgccgatgtcatcctggtggtgccaaagccggggcaagaagccttcgcccgcgatctgctggtcaccatacgcaccagccgggccggtctttttgccaattatgatatctacggcgccagcgaactggccgaaaacggggtcatctacaccttgggcgattactatgttctgctgatgataaacgacaccgaccatgtgcgggagctgctggagcagtacatcccgacataagggtacattgaacctcttgcccctgcttcggcgggggcttttcacatcccactcacaccctgcacagggaacaagccctgcacctgcctttgggcggcttaaaaatccgggtcccgcccttggcgcatactttcctttgcattcgacggggaaacctgctataatatgcttggaggattgtatttttcttccgggccggggtttgtgcggcccgccatgctcctaccgaaccccagaaggaggtattctgatgcaaaaactgatcatagccatcgtatccaatgaggacagcaccgcggcttcccgcgctcttaccaagggcgggttttcggtgacgcggctggccaccaccggcggctttctgctctccggcaataccaccatgctggtaggcaccgatgccgaccgggtggatgaggccatccatatcattggggagaacagctgcaagcgcaataaaatggtttccggcaatacttcctttaatgccggtatgtacgccaatgtcccggtgcaggttaccgtgggcggcgctaccatctttgtgatagatgtagaacggtatgaaaagctctgagccgctgcgcggcttttccggcagccggcgctataccctaacggtcattccgccgctgccccaaccggtcaccacggcgctggccgccggccggctgacccacgccctgtgcctggaagcccccagtcccgccctgctgcgggataccgccattgccctggcgggggcgctgctgtgccggagcggggacggcagcctgtgcggaacatgccctgcctgccataaggtgctggtaggggagcatcccgacctgatgctgtatgaccccgatgaggacaaggatatctacaaaaaggaaagcctgcggcggctgcgggcggagctgtaccgcaccccggtggaggccccccgcaaggtagccattcttcagctggcggagcgcatccccgcggagggacagaacctgctgctgaagatcatcgaggagccgccggaggatactttttttgtttttaccgcgcagaaccgctaccggctgctgccgacggtgctctcccgggtgacctgctatgccctgccgcccgcggccccggcggactgcctgcggcggatgagggagctggcgcccggccacaccgaggaggagctgaaccgggcgctgctgcggtgcgggggcagccccgaaaccggcgccgccctgctgaaggaccccgccgcgcaaaagcgctatgctgcggccgaggagatgctggccgggctggccatggcgaacccctaccgggtgatagcggcggcagccccattggaaaaggaccgggcgggctacaccgccctgctggaaacactggcggagctgctggcgaatcccgcgctgcgggagatgtataacctgccgggccgggcggccgccggctgccgggcacagatcgcgccgcttttgcagatgtgcgagcggaacgcccacctgccgctggtgacggcgctgctgacggagcgctgcaggagatagctcggatatcccaaaaggcccggtcccgggaaggggtcgcggtgcgcgggatgcggagccgagcgccgccagtggcggatgcagcgaggcggagcatccgtagcggtcgaaaaaatcgagcaagcgagcagcgcgaagattttttcgggcaccgcaaggcggcaaggactgcgatttgccgaggaagcggttttgcagactgtaaagtatttgcttaacttgccccatagttccccgcctttgaggcggggacaggggcggtggttcgcccttctgcgctccagcgcgggagcgataaaaatgcgtcgcagacaccttataagcaccgtttagcccacgcttcgggacggcgtagcccgttccgagcgggcgttccggtgcgtggggtttttagggcgtagccctaatgacttttgcgtccttttcttcacagaaaaggacaaccccgctggcaagcgtgccaactatgcctttgcaaaaggcttcgcgcagcctttaggcgactgcaaacctggccccaccacaggcggaaacgaatattgaaaattcatgcatcatggatgttggaaataaaggagtaccatttgtatggcagagatcatcggcgtccgatttaaggaagtcggaaaaatttattactttgaccccaatggcggcagctaccgcgtgggggagcccgtggttgtggaaacctcccgcggtaccgaatgcggcacggtggctatctccaaccgggaggtggaccagacccgtgtggtaaagcccctgaaaaaggtgacccgtcccgccacgcaggaggacctgcgccgggtggaggaaaaccgtaaaaaagaggagaaggctttccgcatagcgcaggagaaaatagccctgtgcaagctggaaatgaagctggtggaggtggaatacgcctttgacggcagcaagatcctcttctactttaccgccgatgggcgggtagatttccgcgaactggtaaaggaactggccggggtgttccgtacccgcatcgagctgcggcagatcggcgtacgggacgaggcgaaaatgctgggcggtctgggcatctgcgggcggccgttctgctgcgccagcttcctgggggagttccagcctgtttccatcaagatggcgaaggagcaggggctttctctcaatcccaccaagataagcggggcctgcggccggctgatgtgctgcctgaagtacgagcaggacgcctatgaggatctgctgcggatcaccccgaaggtaggggcgatcgtgcagaccggcgagggccggggcaaggtaactgaggtgaacctgctgaccggcgagctgaaggtgcatctggaccgggccgaggagggggctgtgacctccttccacaaatcgcaggtaaagacactgcgggacggccgcatcacggtggaaaaggcggaagcggacgagctgaagaacctggaggaataaccgaataaaaagactcccctgccgggcaacggtgggggagatttttgtgtaaaagttttcgctccagcctttttcaaaaggctggtcgtccgccacagcggacgaaatattccctgtccgaagggcgctccgaaaggggatgaattgcgtggacgacccagagtggtcgttcacgcaagagggggagccctgcaagagagggctcccccttatttgtgccttttacaggcatacctttcaccgaacaggtgaaaagcacttaattcaaacaaaaatctgttcataactaataccgagcactacgctcagggcttttatctcatcgggatagagatggcgctggccaacctcaatcttggccaatgcgctgcgggttaagtcacagccctgcacctgcaatcgagcagccagttgctcctgcgttaggcctttatcttggcggagtttggccaaatgacgccccatgcgctcactgtactgctgatccatgaacatcacccctcctccgcactaaatcagaacaatcattttcttgattttaggcgaaaaagcggctataattgcactaatatagtgcaattatagaaaagagggaaaattatatggatgataaagtggaggtcgctcgtctaagggggcgctgcctgatgatacaggataaaatcatcgcgatacagcaggaatgtgaggaaatctgcctgcaaagtgacgcaccggattaccgggcactgtactttaagctctttgcccggacggaggaagtgcgaaagctactggagctaagataacatcaaaaaagaaaaccggccatcattgctgacagccggcaggatagtcttgttatcagggggtctgattactgctcttccttcatctttgcaaagcactcgctgcaataaacaggacggtcctcacggggacggaagggaaccttcgcctctttgccgcagttggcgcaaacggcggtgaacatctcacggtcggttctctggttctgcttgcgggcgtcgcggcaggccttgcagcgctggggctcattggcaaaaccgcgctcggcatagaactcctgctcaccggcggtgaacacgaactcattgccacattctttgcatactaaagtcttgtcttcgtacattcttcattacctcgctttggaatctctgccctcacaattgatgttataagggagttttgtatatatcacctgacgaattcaggcagataccgagtgggcggaatagaactttcgcagctttcgtctgactctttgcagggcgttatccacagctttggaatgagaagaaagaagagaggctatttccgaataggggtagccggccaaaaacagccggaacacttggcgctcgtaatcggtaagctcggtttgcatccagcggtgcagttctccgctgaattctgcggcctccaccagcgcctgcggctggatctcctccccggcgggatggtcctccggaatggggtcgtaatcccgcagcggctggtgccgattggaaagggcggcgcgagccgccgagcccatgctgttgcgggcgcaggtaagggcgtagggggtgaattcccccaagccgggatggtaatggcgcacggcgctcatcacccctaaaaagccctcctggacgaggtcatcccggtccagtcccggcaggcggtagctatcggccatggcccgcagggggggcagcagccgggccaccagcaccgtaaaggcacggtcttccgcctgaagagcggccgcggccagcgcttcatcggacatagcttcccagtgtttttgcatatgcacatactccagtcccggcgggtgctcctgccggtacattatccatcttaccccaatgggcggggcttgtcaagcatttcttggtcggtttttacaaaaaagattttcaagatctctaaaattttgtaccatttcggccgggcagtccatttctcttggccaaaatgtcacaagaaaaagcccaaaattggcaggattttgccgctaaggcgggcagataggggaagctgtgtccgcaaggggaaagaaggcttgggcagagtacacaagggaaggccgccgggggcgcggcagcttgctctccgggtggattcttcccgcctttggcgagtctgccggaggggatagcctgtacgcttgcccagcggggccgtccatccaaatctgtttgttcaacccatagccccggtagcttcactattgatttgcaggaagcaaataaactgcacccgcggcactttatcaccgctgtttgatcccgctccggaaatacaccgtgctttcgggtaggagggacatcggggcgttaccggctgcggcgcagtacctcccggacatagcgccagacccggccgaccgattctaccgacatgcgctcgcgggccgtgtggatctccagcagctccgggccgatggaaacgcaatcaaggcccggcagcttttcacacagcaggccgcattccagcccggcgtggatggcctcgatcttgggctcggcgccgtactgctctcggtaaacctcgcacatcaattcccgcagggggctttcggcacggtattcccaggcagggtagtccccaaagacctccacagtgccgcccagttggtgggtcagcaccgtcaggcgctcggtcagcatctccttttggctggccacgctgctgcgcacgccaaagtgcagttccacggcgtcatcctcggtggtgaggataccaagattgagggaggtctgcaccaggccgggcaggctgccgctcatggcctggatgccattgggaacgcagagcagcatgcacagcacccgctcggcgctttcttcagtgaggacggcgcaggcggttttttcatttggggtaacggtaatggtaagatccggctcggccggggcatactcatgacggagctggctctgccaggcggcggccagccgttccagcgcggggaggtcctcgcagaggagctgcgcggtcgcctcattggggatggcgttatccttggaaccgccggtcagcgaaatcaggcggcagggtgcgtcacggcgggcagccatcaccaggcggcccagcagcatatcggcattggcgcgacccttatcaatttccaccccagagtgaccgcccaccagctcggcaatgcgcagggtaacagtctggccggtcacggtctcccgctggatgggcagacggcagtaggtgcggttaccgccggcacagctgacggtaaagacgccctctgcctcagaatccaagttgatcatattgcggccggtgactagggtgggctgcagcacagcggcgcccagcatcccgatctcctcatcgctggtgatgatgcactccagccggggggctggcaggtccttttcatccagcagggccagcatcatggccacagcaatgccgtcatcaccgcccagggtggtaccgcgggcatacacccagccgttttcctccaccaggtccaggccctcggtttccatatccttggtgcagcctggggctttttcgcacaccatatccaggtggccctgcagcaccaccggcgcggcggtctcgtagcctttagcggcgggctttacgataatgacattatcgctggcgtcacgggtatgctgcaggccgcggtctttggcgaactgctcgcagtaatcggcgattttcttggtattgcgggagccgtggggaatagccgcgatctcctcgaaataatggaacactgcctggggctccaggtggccgagaattttactcatggtttcgcttcctttctgggtatttgcagggggccggcccacggcggaaccgcactcggttggcacagccaaccgagcctccggcgcccctgcacctgttacgccgctattatacaccatttccccctgccgtgccagcccccgccttgctttttccttgacaaaatgcccaaaccaggcccccggtttatggcagttctacaaaaagtgtgtcggaaaagcgggctttcatttacaagcccttgttccggtgctacaataggcttagctgctggaatcgtttccgacagcaaaaccaatattccgatcccgccggtcactccacaaactggccgccgcggacgaaacaaaggaggaatcccccgccgggcgctcccggtgcggcagtgtggagacctgccgtaaagcacagagaatcccgctttctctgctgcgagaaaggtcatgcgaaggcagaccgctcagagcgatgataatggctgatgtcgtactgaaaaacattaaaaaggtgtaccccaacatcgaacccaaaaagaagaaaaaaggcgagcccgaaaaggaaaagaagaacaacctgctggtgaccgaagagggcgtactggcggtgcatgacttcaacctggagatcaaggacaatgagttcattgtgctggtcggcccttccggctgcggtaaatccaccaccctgcgcatgatcgccgggctggaggagatctccggcggcgagctgtatattgacggcaagctgatgaacgacattcctcccaaggacagggatatcgcgatggttttccagaactacgccctgtacccccatatgactgtttacgagaacatggccttcggcctgaagctgcgccatgtagaccctcaggagatcgaccgcaaggtaaaggaagccgccgagatcctggatatcacccagtacctggaccgcaagcccaaggcgctttccggcggccagcgtcagcgcgtggccatcggccgtgccattgtgcgcagccccaaggtattcctgatggatgagccgctttccaacctggatgccaagctgcgcaaccagatgcgtgccgagatcatcaagctgcggcagcgcatcgataccaccttcatctatgttacccatgaccagaccgaggccatgacgctgggcgaccgcatcgtcatcatgcgggatggcgagatccagcaggtgggcaccccgcaggaagtcttcgatcaccccgccaatctgtttgtggcaggcttcatcggtatgcctcgcatgaatacctttgacgcccagctgcagcgcgatcccgatggcaagtttgccgttcagctggccaatgcccatgtggtgctcagcgatgaaaagcaggcccgcctggcccagaagaatgtccagcccggccccatcgtgctgggcatccgtccggagcacattatgctggcgggcgagggcgagcagatgatccacggcaccgtggatgtcagcgagatgatgggcagcgcggtgcacctgcacctgcaggcctgcggccgggataccatcatcatcgtgcagaccatgagcatgcagggcgccaccaattcgagctttggcatcggccagtccatcgctttcacctttggcggcaatgtggtgcatgtatttgatcctgaaaccgggaagaatcttgaattctgatggctgcaatcccatagaaaaagcccctgccgcaaggcgggggcttcattttaatgcttaaccggttcgccgctgcggtggcccggggctgtcagccagtcggctttgtagtaataaataagcaggaagatgctgctgagcgcccaggtaatggggtaaacccagttcaccacggcaatgctttggtagatgggggtggcaaccgtaataatggcaacacgcaccacgcaccagaatgacagcatcgaaatcatgggaatgaccgcacggcctgcgccgcgcatgaccgctgccagacagtgcgaaagcgccagcagacagaagaacagcgagcaggtgcgcatcttctgcacgccaaaggcgatggccgccggctcctgggtaaaggccttgatgagaatgggggccagccagtacagcagcgcgccaaccgcctccgcgatgatgaccgagcacagaatgccgaaccgcgcgccctgccgggtgcgcctcagctcgcccgcgcccaggttctgcccgacgaaggtggtaatggccgaggtaaagctggtaatgggcaggaaggcgaagccctccaccttggcataggcgccgcagccgctcatggccatctcgccaaaggaattgatattggactgcaccactacattggccagcgcgatgacggaattctgcaaaccgctgggcagaccataggagaggatcatacgggtcatttccgggtcaaagcggacctcccgccatttcacctggcattcgccggaaacggggttcatcagccgccccatgcacaggaacacgctgacgaactgcgaaatgatggtggccagcgccgcgccgtccacatccatcttaaagacggcgataagcagaatatccagcaccacattggtgatggaggagatgataagataataaagcggatggcggctgtcgcccaccgcctgcatcacgccgcggcactggttatacatcaccagaccgatgctgcccgcgaagtaggtgcggatataggcgactgactgcggcatgacatcctccggggtgcccatccactgcaaaatctgcggggtgaacagcatccccaccacggtaaggaacacccccgccgccatgccaaaagcgatattggtgtggatggcggcacgcatcttttccacttcgcgggaaccaaagaaccgggaaaccactacccccgcgcccatcgaaataccgccgaagaaccccaccagcaaaaagatgagtgtgccagtgccggtaacggctgccagcgcgctgttgcccagcaggttgccgacgatgagggcatcggcggtattatacagctgctggaacaaaaagcccagaaacagcgggatcgcaaaggataccagctgtttggcaatgggaccttctgtcattcttatctcggctttggccacggcgcagggactcccttctttttaccattttcgcccctttggggcaaactcactgtagtatagcagatttttggctttggtgcaaggggcgggagcgttccttggcggggataaggcgaagctgccgggctgccgcccgattccctgccgctgcagaagcccgaaaagcataccgcccgcccctgccgcatatagatgcaccaagaacccgcgtgaaactaactggggggaggtcatctcatcgtgaaggggttgccggaggatcgggcggtgcagttcgcccgttatatcatcgaagcaggcgccaccgtgcgggagaccgcaaaggagttccacatctccaaatccacggtgcataaggatatccaggagcggctgccgctgcttaattacccgctgtaccgggaggtacgggtggtgctggaccgcaataaggaggagcgccacctgcgaggcggggaagccacccgccgcaaatatgccgcccgccgggcgcgtgataaaaagtaaaggcccgccgtctttgccccaagtgggcaggacggcgagctttttgtttttccggcttggagggtcacttgcagaccgcgggacgagggcgcagcccgtttcggctccgccgaaacacacgggcaaagcccgtgtcgcccgcctgctgcgggcggggctgcgccccatccccgcggtccgcggaaactctcccctatatacaataaagcagccacattttcctgcctgccgcccgacaaaataccttcggcaatcgcctttttacacccccgcaaagtgaaacacaatgcccaccacagcggaaaagcccaggaacacaatggggtgccactttttggtctgcttcaggttggtcacaatggccaaaaatgccgccagcgccaccgccggccagcggatgctctgccacagggtaccaaagctccagccatcggccagcagtgccacaatgactaccgagagcgctgccgaggcaatcagcccggaggaagccggccgcagcccgtaaaaggcgctttctacatagcgattgttacggaatttctgcaggaagatggaaacaatgacaatgatgataatggagggtgccacaaaacccagcgtggtagaaatggagccaagaaccccgctcatctcatagcccacataggtggccatgtttaccccaataggccctggggtggattctgaaatagcgatcatatccgccagctgggtgtaggtgaaccacccggtgcggtcgctcaggtcatacaggaacgggatggtggccatgccgccgcccacggcgaacagacctattttgaaaaactcccagaataaacgcagcagcatcatttggccttcacctcccaggtcttcagcaggatgccggccacaccggccgctacaatatagatcatgggactgaccggggtgaataccgccccgccgaatatcgccaggaagatgagtaccgctttccagtccactatggcggccttcgccagcttaatgacggaattgatcatcagtaccgccacccccacacggatcccggcaaaggcgtttttgacggcaggcagctcggaaacattgcccagcaccgccgcgatggcgatgatgatgaccagggaagggaacaccagccccagcgtggcgatcacgccgcccagcaccccggcgatcttatagccgatgaaggtggaaacattgacggcgatggcgccgggggtacactgagccagcgcgtaatagtccatcatttcctgctcggtggcccagccgtggcgttccaccagctcgctctgcatcatgggcagcatggcatacccgccgcctatggtaaatagcccgatccgggcaaaggtaataaacagctgccagtattttttcatgggcagttcctccttgcttgtgggatatcttgtgggatatattaagaatggatttgcgagattttcggtcaagccttttataaaatccaaaggcggagccttggccgctcgccgcaataggggaaacactttttcctctaacatcaaaagcatcgataggtggttttgatgaaagatgcccgcgctatcttgcgctttcgttttccaaagggcgccccgaaaggggtcgaatttgcaaaatgatccggcggatcgttttgcaaaaggggggaaaccccgcaagagagggttcccccttacttgcgatttgttctatctattttcctccgagcgggagaaaaatagaaactaatggtttagttggctgccgcctgacggcatcgcaaagccttgactaaagcatggatgcccgccccaaagacttcattattgtatcaccgccggggacggtatgcaacgggcaaaacagattcctgtacgcttccttggcattatagaaaagcccccaccgccgcggcgggggagctttttgcgtattatatcttgctggggtcgccccaggtaaagcccttggccaccaccccgtcaatgacatccgccagcacattggcgttggtcttgcttaccgcgtgcagcaggtacaccatacccgggcaggcgctgtccacgatctttgtaagggattccgcctcatccggctggtcatcggtcagccagtccttgtaggcaaagctccagaacagcgacttgtaccccagctgctgtacctccgccagcgcccgctcgctaaagttgccggccgggaagcggaaataccgcatggtatagttaaaattctccttgacatagtcgtgcagcttcatcaggtcctgctccgcttcctccaccgaaagcccggagtaattggggtgcttccagctgtggttgcctaccacatgcccctcatctatcatccgctgcaccagctccggctccgccttggcaaaatcgccggtgatgaagaagatggccttgacccccttctccttcagggtatccagtatctgcccggaaagcccgaactcatacccctcgtcaaaggtcaggtacacctcgttgctgtcctccttgaggaagatggcatcatactggccgtaggtcttattgtacagcagcgagccctggctgcggtttttctcgtccttcgggccgccgggaccccagtccttgctctcggtggaaagccccgccagcttttccacatccactcccgccgcggtgggaacattgttattctcgttgcccaggttctcatccccggtcacgccgtaatcgctatcgtactggttgtccttattctcggtatcgccatgggtatcattctgctccggctgggtggtgccggggtagttgggatcattctcattgtaggtgggctggcagccgcccagcagcatggcccccgccattgccaacgccaaaagctgttttttcatggttttctcctccatttttcgtattatccgtttattttatactatttgtaaaacacctgctccgctttctgcctgtattgtaacacatttcgccgcataaatcctccccaaaatctgcaaactatcggtaaacaaaaatttttgcggagggtaggcttggggaacggcatctctatcccggccccagcagggaccgggccgcggccgcaggccgtttcggctccgccgaaaccagcgggcggagcccgctgaaaccgcccggagggcggtttggcctgcggccgccccatcccgcctgccccgcaaaaccaaaaggaggaacccatgtcccataccaccattaccaaagtacagggcttcgaagtcctggatagccgcggcaaccctaccgtccgggtggaggtcaccctgcaaagtggtgccataggcatcgcagccgtccccagcggcgcttccaccggcgggcacgaggcctgtgaaaaacgggaccgcgacccatcccgttacggcggaaaaggggtgcgcgccgccgtccgcgccgttaatgacgaattggcccgggccctcatcgggcgggatgccgccgagcagaaaaccattgaccgcatcctctgcgaaacggatggcaccggagataaatcgaacctcggcgccaatgccattttgggggtcagcctggccgtggcccacgccgccgcggctgcctgccgcctgccgctgtggcagtacctcacccgctttacggggcggaggcccgctctgccccgccccatgatgaatattctgaatggcggccgccacgcccccaataatatcgatatccaggaatttatggtcatcccgctgggctgtcccacctttgccgatgggctggagcgctgtgtgcgggtcacccaccggctgggcgccctgctggaggaagcgggcctggcctgcggcgtaggggatgagggcggctttgcccctcagctgaaaaacgaggaacaggcgctggaattgattctgcgggccatcgaggattgccgcctccgccccggggaggatatggcgctggcgctggatgctgccgccggagagtggcagaccgggaacaatatgtatctcctgcccaaggaaaaccggctgcgcaccccgcacgacctgttggaatactggcgccgtcttaccgccaagtaccccatcatttcgttggaggaccccgccggggaggatgactgggatctgtggcggcagctcaccgaagccatcggcaaaaatgttcagctcgtcggggatgacctttttgtcacccaaaaggcccggctggagcagggccttgcccgccgcgccgccaatgccgtcctcatcaagcccaaccaggtgggcaccctgaccgaaacgctggaaacggtggcgctggcgcagcagtccggttatggggccatcctcagccaccgcagcggcgaaacggaggacaccaccatcgccgacctggcggtagccaccgcctgcggccagatcaaaaccggcgccccctgccgcagcgagcgcaccgccaagtacaaccgcctcctccgcatcgaggccatgctggaggaaatggtctgaccccgcacggacggtcggttttccggcagtctccttcacacatctgtgccggaaccggaagcggcccgcagggcaaaccgcccttcgggcggtttttgggggcggccgcaggccgccccctacggcgccgcgcagcggcgccggccctgcgggccgccctactccctgcaagccacgggatccggccgcagaccgcccgccttcggcgggccggcgggcggaatccgccgaaatcgtctttcggacgatttggcctgcggccgcctttcccctcacaaaaatcccaaaaaggcgcccctcccaccgggaaaggcgccccatttttatttattcggcttacagccactttttccggcggaaataccgtaccaacagcaccaccaccgctaccgccactacgatgatgaccggataaccgtattcccagctcagctccggcatgtcaaaattcatcccgtaccaccccacaataagggaaagcggcaggaagatcgttgtcacaatggtcagcagcttcatcacccggttctgcaagatatccacctgcgcctggtattccccgctgatctgggtagcatattcccgcagcatctgcgtttcgctgcgcagggtgcccacccgccgggcaaaatatcccactcggcgctgggcccgatgccccagcagctcggcggcatcctcctgcatcgtctcggcaaaatcccccagctgagcatagaagcggttttcccggttcagctcccgccgtatggcactcatcttatgaataaatttatcggtatcatcggccagcaccccctgctccagggtggtcagacggctttccagtccctgcagcatcggcaggtcattctgggtcaaggccgccagcagctccgccagcagctcatccgccgtcaaggcatgtcctgttggcagggtcagctgcttcagacactcggcagcatagccgttgtggtccactagcagcaggctctctcccgccagcgcaaaggccagccgtcgcacggactgcgcgccccgttggggcaggcgcacctcccccgccagggccccctgcctgatgtgcagccaacaatactggttttcccgcaggtcctccgggggctgcggcggggtaaggccctgcggcagcagagcgccggacagctcttccgggcacagcaccgccaggatactcttttcctccggcggcaggctctccagcggttccagtgtttctcctattcggtaatactgcatcatttcccctcccgtgccgtttttctcagtatatcacattccgcccggccgggcaaaaagttttatcccagctccttgcggtaatagcacaccccacaccgccggccaaacttgaccgcaatatcgtgcaggtgtccctccttcacaaagccgttcttctcgtgaaaccggcaggaagccgcgttttcatcggtaataatggagataagattggtgattcccattttgcgtccttccgcctcaatggccgccagcagcgccgcccccagtcccacgccccgcaggtcaggtgccgtgtagatggaaagatcggcggtatggcggtaaccgctgcggggattaaagtcgctgagataggcaaagcccgccacatttccggcatcatcccgcgccaccaggaacggaaaccgttccgtcacgcctgctacccgggcctcgtactgatccgccgtcagctccgtctcctccagcgaaaagctggtgttcttcacatagtagttgtagatctcccggcagccgggaatatccctttgctccagcttggtgatgatcatttgggggtccttcctttcctgggatcagtctctgccttgcccggccctcctcggccgtcttctgcaaggtatgggtccgggccgcaggccgtttcggcttcgccgaaacacacgggctccgcccgtgtcggcggctccaccgccgggcctgcggcccgccctctccgcccggcctgcgccgcgcagccgccgcagttccgcgccttttgcccaaaatgaaaaaccaggcagggctgcggccttccttgccgcgctctctgcctgttttccgtctgccgtgtggtctttgggaatcacctaataataaaaaaagcgcctcgccggcgtctttttttatctggtgacccggacgggaatcgaacccgtgttacagccgtgaaagggccgtgtcttagccgcttgaccaccgggccattatggtagcggtaggtggacttgaaccgccgacacttcgggtatgaaccgaatgctctagccaactgagctataccgccatataagcgcgattatcacgcaagggttattatactaaatggaaaaaggcttgtcaaccctctttttcatcattttttcacgccccgtggggcaaaagccccatgaaagccccccgttttatcccacccctttgatgaaaacagagaattgcgccaaagccgagagatttccttgaccttttggggcggatgcactacaataataaaaatatctgcccggcgccaggagcccggcgggcgctctccgctccgcctcgggcgcgccgccctttcggggacggcacccctcgtccgctccgcgcgcccgccgccctacgccgttttccggccgggcacccagaacagtacattcaaaaagcatagcatagaagggggatcttattgatgctgaataccgatcacaattccaaatttctgccggaggcactcaccttcgatgacatcctgatggtgccggcccacagcaatgtgctgcccgccgatatcaatgtccgcacccgcctggccggggatatctacctcaataccccgctcatcagcgccgccatggataccgtcaccgaaagccgcatggccatcgccatggcccgggaaggcggcctcggcgtcatccataagaatatgcccatccgccagcaggccgatcaggtcgaccgggtcaagcgcagcgaaaacggcgtcatcaataatccctttttcctctccccggagcatctcgtcagcgatgccgaccggctgatgggcaagttccacatcagcggcgttcccatctgcgatgccgacggcaagctggtgggcatcatcaccaaccgcgacctcaagttcatgtccagcttcgatgtccccatcggcgaggtgatgaccaaggaacatctcatcaccgctccccagggcatcaccctggaggaagccaaggccctgctgctgcgcagcaaggtggaaaagctgcccatcgtggatgaaaacttccacctcactggcctcgtcaccatcaaggatatcgaaaaggccaagaagtaccccaatgccgcccgcgacagccagaaccgcctgctggtcgccggcgccatcggcgtcagtcacgatatggaggagcgcgccgctgccctggtggaagcccaggtcgatatcctggcgctggatagtgcccacggccacagcgagaatatcctcaaggccgtttcccgcatcaagagtctgtacccccatatccccctcatcgccggcaatgtagccaccgccgccggcaccgaagccctcattaaggcgggtgccgactgcgtcaaggttggcatcgggcccggttccatctgcaccacccgtgtggtagccggcgtgggcgtcccccaggtcacagccgtgtatgaggctgcctgcatcgccgccaagtacgatatccccatcatcgccgatggcggcatcaagtattccggcgatattgtaaaggcgctggccgccggcgccaataccgttatgctgggcagcctgctggccggctgtgaggaagcccccggtgaaagcgagatctaccagggccgccagtttaagagctaccgcggcatgggctccattgccgccatgcagaacggcagcaaggaccgctacttccaggagggcaacaaaaagctggtgccggagggcgtggaaggccgtgtgccctatcggggtgccctggccgataacattttccagctgatgggcggcgtaaagagcggcatgggctataccggctgcgccaccattgccgagctgcacgaaaaggcccagttcgtccgcatcaccggcgccggcctgatcgagagccatccccacgatatttccatcaccaaggaatcccccaactattccagccacagttaaaaacaggctatcctctcccccgcacgccaaagcgggggggattttttgccttctgcgggactattatttaccgaaaaaaatcccccggacgggaacgaggagccattccttccgggggaaaataaagtttagaaaatcagtcgtctacatcaaaggcttccaggccacgcttggcctccaccttcacatcgccatggcgcaccataagcatggtgaagaacgccagcgccacaaaaatggcggaatacaggaacagcaccgagtagctcacatgcttcagcagccagcccgccacaatgggggtgatggtctgggcggccatgctggcagtgtagtagtagccggtaaatttgccgacatcactaccgcggcacatttccaccaccatgggcaggctgtttacattgatggaagcccaggccacgccaactagggcaaacagggcatacagcgccgggtggaaggtattattgaacagggtgtagacatagccggagccgaagcaggcggtaagcagcagtacgccgaacagaatagtgcggcggcggcccacccggctggcggcaatgccgaccgggatgtaggagcagatggcgcctgcggtggcaatggtcaggcacagggtggcatcgcccagggccataccccacattttatcggcaaaggtggtaaaccaggtctcgatggcattgtagccaatgaaccacagcgcaatggaggccagcaaaaagcccagactgcggcggacggcggagggcagcttttcattgccgctctcatctacctcggccaggttccattcggggtgctcggcttccagcgccatattttcctcatgcagctttttctcccggatggcggcaaacagaatgccgaccgaaatggccatgatgcccgccacaatggcaaagagcggcaggtaattgacatgctccaggccggccacgcggctggaggaatacagcacactggtgatgaccaggtacaggatgccgcccacggcgcccatcaggttgatgatggcattggcgcggctgcgcagcggcttgggggtgacatcgggcatgagggcgaccgccggagagcggtaggtgcccatggcaaccagcagcagtcccagcacggcgatgaacagcaccagcttggtgacggaggggctggcagcgtagctgttatccaggatgggcagcagcatcataagcaggacggcgcagccggtaccgcacagaataaagggcatccggcggcccatgcggctgcggcttttatcgctgatggcgccgaagagcggcagcaggaacaaagccagtacattatccgccgccatgatgatgccggaataggtttcatcaaggtggaaggtataggtaaggatcttggggatcacgctgttatacatctgccaaaaggcgcagatggaaaggaacgcaagccccaccaggatggtgcgcttattattgagcttcaggttcatggtcaacatctcctcgtggtcaagatggggtgctgcctttatcatagcgcaaaacggggggatttacaaggcgaaatctctttttgcgcgccattcgtgcccggcagggcctgcttttctcccatgaaaagcagtaaaagaaattttagaccaaatttgtagtcgcctgtcggcgtcgcggagccttttgcaaaggcatagttagcaccgctcgccgcggaggcgttccttttactcgtgtaaaaggaaccaaaacacggtcaagggggacagattcccccttgacaaacccctttgacgcttagctgtgctggatacggatttagatttttctggggcgaaaaatccaaatccgtactgcgcacagatgcgctccaaaggtagcctgcggcgcattttatgtgagttcctgcagaaaccaaattaaaaatcaaccttataagcgtcgtctaatcccgctccgggaagccgtcactttggctttccgggcggggtgtaccgacgcgtcgggggtctcggggcactcccagagtgacttttgcctacttttcttcatggaaaagtagggccacgccggcgaggcgtacaggctgttaccctgtggtgacaatgcgacgccgaaggcgactacaagctggatctaaatatcttttgttgcttttcctgggagaaaagcaggcccgcggcagtgtttacaatttgcgccttgcatgacgggggaatctttgctacaataagcggcatacacggcataaccgagaaggaaaattcccatattatcccgtgagagcgtattttttccaaaggagaacccaaatgtttttacgatatatcttgtgcgcggcggcggcctacctgctggggagcatcagcaccggtgtgctgctgagtcaccggctgttccacgatgatgtacgaaagcacggcagcggcggcaccggcgcaaccaatatgctgcgcacctaccgcctaaaggcggcgcttttgacctttgccggggatgccctgaaagcggccgcggccgttatgctggggcggtacctggcgggctttgagggcggctgcgtggccgcggtttttgcgatagtggggcatatgtggccgctgtattttggctttcggggcggcaagggcattgcctgcacggtgggggccatcgcggtgctgtatcccatcctgctggtgccgctggtaatcctgtggggggtgccggtgctgtgcagccgatgcatttcgcttggttccataatagctgcgctggggctgaccccggcggtagcgctgtggtgccatgggcaggcggtggagccggtatttcccgtagggggcgccgcggtgatgacgctgctgatcctgtgggcgcaccgggagaacatggtgcggctggcccgcggggaagagaacaaaatttaaggggcttgggaaattcgcggggggccaaggcagggggcgcagccccggcggcaaagccgccgaaccggcgcggcgcgccggtaagccccagccgtaggctggggcaggctgcgccctgccccctgcaccgacataaaacagcaaacagacccgccggggagccggcaaggaggcaaaatgaagatcgctgtactgggcagcggcgcgtggggcaccgcgctggccatgctgctgcaaaagaacggacacgaggtaagcctttggtcctactgcgaggaggaaagccacaccctgcgggagcggggtgaaaacaagatgctgccgggggtcccgctgccgaaggggctggcgctgacccaccgggaggatatagtggccgggtgtgagctggtggtttttgcgccgcccagctacgccatgcggcagaccgcccaaagggtgaagccctatttaacgccgggaacagtgctggtgacagtggccaagggcgtggagccggaaagcggtctgcggatgtctgagatcctggcggaggagctgccgggatatgcggtagcggcgctttctggtccctcccacgcggaggaggtagcgcgggagatgcccaccggctgcgtggcggcctgcccggaaaaagccattgccgaatgggtgcagggcatttttatgaacccgagctttcgtgtttacagcagcaccgatattaccggggtggagctgtgcggcgcagccaaaaatattatagcgctggcggccggcatggccgagggcatgggctgcggcgataacgccaaggccctgatgatgagccgggcgctggtggagctttccgcgctgatcaaagcggcgggcgggcaggagaacacctgctttgggctggccggcatgggggatatgatcgtgacctgtacctcgccccattcccgcaaccacatggccggcgttgccatcgggcggggagagcatgtggccggggacctgggcgaacgccacgcggtggtggagggctactacgccgcccaaagcgtaacggcgctggcccaaaagctgggggtccatatgcccatctgccggtgcgtccacgccattctgtttgaggggaaaaacccctccaccgcgctgaccgagctgatgctgcgggataaacgaagtgaattttaatggcaaggcccccggaggggaagcggcaggcttcctttccgggggcggttttttctttgcgtgggctttccgggctcacagcagggtaattaccccgatgcagccggccagcagcaccgcccccaaaaggagcagcatccagaagacccatctattatccacgcagcgcagcacatagctccgctgcggcttttgcgggtcgaaccaaaccggcagcaccgttcccacggggtactgctccgccatggggttgcggctcactccgatgatagaattgcggctgcgctcgatgtgcagaaccccgtttttctcatagcagcggcaggcattccccgcaaggggtgtgcggacggtacggcttacatacccccggtagcggggcccggtcacccggtattcccgcccctctgccgtatagcgcaccaccggcagatgcacggcactgccctctcccccataggaaacggcactgtatcctatgacggtaccgttggtacggcaggtgcagcgctgctccatcactaaataccgataaccgacggtaaaggccagcaggagcagaacgcccccgcccacgcccaaaaatagcccgaacaccagcttgatgatctccgtctccgtcattctctcgtcccctttctccgcagtgccttctccacaaagatagcgaacctctgtgaaaaagtcaagcccggaaaaaatccccgccgtgcagcggggattttggtttattcttgcggcaggtcgaccttgatggcgagctcggcgagggatttctcctccacctcggcggggcagccgctcatcagctcgctggcgttctgcaccttggggaaggcgatgacatccttgatggattccttgcccagcagcagcatgacgagacgatccaggccaaaggccatgccgccatggggcggggcgccgtaccggaaggcctccagcagaaagccgaagcgctcctcggcgctttccggggtgaagcccagggccaccagcatacgctcctgcagctccatagtattgatacggatggagccgccgccgacctcgcagccgttcatgaccatatcgtaggcgcgggcgcggcagtgaccggggtcactctcgatcatatcgagatcctccagcatggggcaggtgaaggggtggtgcttcgccatgtagcggccctcctcctcgctgtactcaaacagcgggaattcggtgacccacaaaagatcgaaggtgccgggctcaatgaggccgagcttctgggcgaggtgattacgcagctggcccagcgcgtcgtagacgacctcattcttggcgtcggccacgatgagcagcaggtcgccctcctcggcctccagtgcctggtgaattcccgcgatctcctcctcggtgaggaatttctcaaagctggaggtgcggccctcgtgggtccagcgggtgtaggccaggcccttggcacggtaggtcttgacgaaatcggtcagcttatcgatctccttgcgggagagcttatcggcagcgcccttggcattgatgccgcgcaccgagccgcccccggcaatggcgccggcgaaaacggaaaattcggtattcttcaggatctcggaaagatcgtgcagcttgagatcgaaacgggtatcgggcttatcgatgccgtagttatccatggcatcctggtacttgatgcggcggaagggtgtttcgaggtccttccccagtacttccttgaagatgcgcttcatgaagccttcgttcatggccatgatgtcctcctcatcaatgaaggacatctccacatcaatctgggtaaattccggctggcggtcggcacgcaggtcctcatcgcggaagcagcgggcgatctgcatatagcggtcgaaaccggagcacatcaaaatctgcttatacagctggggggactggggcagggcatagaacctgccctgctgcacacggctgggtaccaggtagtcgcgggcgccctccggggtggacttgatgaggatgggggtttcgatctcatagaagccgttggtatcgtagtaatcgcgggcgatcttgacgatgcggtggcgcatggcaatggcgttctgcatttcggggcggcgcagatcgagatagcggtacttgaggcgcaggtcttccttgacgccgcggctgtcatcgctgatggcgaaaggcggggtattgctttcggccagcacgcgcagctcggtgacatagacctccacctcgccggtggggatctcgtgattgacggattcccgctgacggaggacgccgcgggccatcagcacatattcggcgcggaccttctgggccttggccaacagggcgggatcggttttatcatcgaaggccagctggacgatgccggtgcggtcgcgcagatcgataaagacgagggttcccatatcgcgtgttttctgtgcccagccgcataccaccacttcccggccgatcatctccggggtgacggtgccgcagtagtgggtgcgtttgagacctttcatggtatctgccataaattttgcactccttttgttttggggaatagcgctttttcggggggattcctcattttgccgagaaagcggaatttgatttattaacaatttattatagcacgaatagggacggtgtcaaagggttttgccgcaggttttgcaaaaagaaaaggcagcgagtgtcattggctgcggcagaaagaaataaaagccgattaagaataatttgcagtcgcctacggcggggcggagccttttgcaagagctgaacaagtatgcctgcccagcgtgggcctacttttccatgaagaaaagtaggcaaaagtcacttggggctgcgccccaagaccccctaacgctaagctgcggctggatacgaacgatgcaaagcatcgcccgtacagcgccgcagatacgctaataaggtgcctgcggcgcattttatgcggggtaactgcaaaccaacaacagaaagtcatgccgccaggtctatcattttttggcgcagcaaagactccatacgagtgaatcggatgctgtacccaggaatagtccaagagaaagccctcgccggcaggcactgtacctgtttggcgagggtagttttcagcaatcgacattttcggcggcttcggccgcggcggcaaaccagccgttctgcatctcggtttcaaattccgggaggaagtgcaggagagagatgggtttagcggtaccggtggccatctgcttcagctgggcggagcctgcttccagctcgctgtcgcccagcaccatgctatacagggcgccgatcttattggcatacttcatctgagccttgacgctgcgccccatcaggtcgcactggacggcatagccctcccgccgcagctgggtggtcagccggaacgcctcctcggtggccgcctctcccatcgaagcgatataaagatcgcactgttggggttcggggaaatcgcagccctgctgctccatcaccatgatgagccgctccagccccatggcaaagccgatgccctccacatccgggccgccgagctgtttgctcagcccgccgtagcggccgccgccgcacagcgcggggaagccgggaatggagatctcaaagacggtacgggtgtagtaatccagcccgcgaacgatgccggcatcgacggtgaaggggatatcggcatccttcagaagggtctgtactttctcaaagtggttccggcagtcatcgcacagataatccagcacacggggcgcgcctttggcgatctctccgcagacgggggatttgcaatccaaaatgcgcatggggtttttctccaggcgctccttgcaggtttcgcacagatcctcccggcggctctcgaaataggcgcgcagggccttgtggtactcggcgcggcaggtggggcagccgatggaattgatggcgagggtgaggtccttgaggccaagggtctgcatgccctcccacgccagggagatcacttcggcatcggtaacgggcccggtggcaccgtagcactccacaccgaactggtggaactggcggaagcggccgcgctgggccttctcgtaccggaagcaattaatgacatagctgaccttgaggggcagggcatcgcccaggagcccattttcgatggcggcgcggcagatgccggcggtgccttccgggcgcagggtgatggagcggtcgcccttatcggtaaaggtatacatctccttattgaccacatcggtggtatcgcctaccccacgctggaacagctcggtgtgctcgaaggtgggggtacggatctcgccgtagccgtacagtgcggcggtggagagcagggtgcgctcgacatactgccagcggggggtttcggcggggagaaaatcattggtgccgcgggggcgggtggtgaggatggccatagggtggatcttccttccttaggtaaagtggcggcaatggcgccggtctgtggtttattttagcacaggtttggggaaaagggaagtcccagttgaaggcaggtgcggggcgcagcccgaaccgccctacgggcggttcctgcggcctttggccgcagcggcggctccgccgccgggggctgcgccccatgaccccgcgaaaagcaaaatcccccattccatagcggaacaggggagcgaaatgccggtttttactttttggggttgacgatatcgcgccaatccaggtcgccgttttccagcgcgtggatcatggcctcggccgaggcgatattggtggcgtaggggatattgtagacatcgcacaggcgcagcaggctggcctcatccggctcggtggccttggctccgatgggattgcggaaatacagcagcaggtcgatctcattgcaggagatgcgggaggagatctgctgatcgccgccctggctgccggccataaagcaggtaatcttgaggccggtggcttccgagaccagcttgccggtggtgccggttgcacacagattgtggcggctgaggatgccgcaataggcgatgcagaactggaccatcagttcctttttggcgtcatgggcgatgagagcgatattcatacttcaagtgcctcctttggcaatgttgagatcaagatgtattttacggccggtaaacggccagcagcgggcggctttctccgcacaggcgggcggcaatattaccggtggcggcgctgtacggcaggtcggccccttcggggatcatccccagcagccgggcaccgatggcatccagtacagcatccaggtggggatagcccaggtccctcggcaggcggcggcccacccggttaaagaccgtgcgcagattccgggcaccctgcccggcccaccaatcggcggtcttagcggcggcttctatgctctgcggggtcacctcggtaaggagcaccagcgtttcggcggcgggcagcaggcccttttgcagcgcgccggcgccgggcgggcagtaccacagcagcgcatcgtactgctcggtgccgctcagctcctcccgcagcagctgcacatcggcggcctccggcacccaatcgatggcggacggcccctgtaaaagggtcagcccggcaatacgggtgggcagcagtgcgttctccagcgcgcaccgcccttccagcaggtcagaaaaatcgaacaggccttcctcccggatctccagcaggcggttcatccgccgcaggccagcggtggcttccaccagcagcacttttttgccctgcagggccagttgccgggccaccgctgcggtgacggcggccgtaccgcagccgctgcagccggctgtcataacaatactacgcacaacggccggcctccttttggttttcccatggcgtgcagaacaaaataagctgcataacagctttaccacaaatatcttatcatatcatccgccaaaatgcaaagggtagctggcccagccgctaaattttgtgcaggttccagtacaaagggcctttcccttgcatcagcctgtcaaattgcgccgcctggcagcgagacagagacacgctgccgcgggtgcaaagggataaaattgcgcaaggggcgggggccgcaggcccggcggcaaagccgccgacacgggcgccgcccgtgtgcccgccttcggcgggcggcctgcggcccccaagcctgccccctgcacagaccagaaaagaagctccccggcgcgcctgccggggccggggaacaaaacctcatttattcagcctcactctggctggcgctttgccgggccaggtagtccagcttattctggtgataaatgccgtcctcgccgaagaaatactcctccagcaccgccttggcaacgggtgcggcacggtcgccctcgtagcccttttcgatgatgaccgccacggcaatctggggatcatcggcaggggcgtagcagataaagcaggaattaaccaggccatcgccgcgctgcggggagccggtcttgcccgccaccacgatatccaccccgtacatactccaggtcttaccgcgggcgctgccccatgtgccgtagctggtaccccgcccgtaggcgtcgttgtagcagctgcgggtcatgccctcccggatggcggcccatgtgccgtcctctgcctctatggtctccaccacggtgggctgcgcctcgtacagcacatttttcatattgtagtcccatattttatccaccaggtgtacctgcatccgctggccacggctggccagggtggcggtgtagctggccatctgcaatatggtgaactggttatccagctggccgatggcggattgcagatcgtagctgtcgtaccagtcctcgccgatggccgcgcgggtctccggggaggaaagctggcccgccagctcggggatctcgatgccggtggcatggcccagccccaatgaatagctgtattcattgatggtctcgatgcccatgcggcggcccatatcgtagaaaaagatattgcaggaaacacgcagcgcgtcaatgacattgatgggaccgtgcaccccctcgcagaccggctgatagtcgcggtagtaggtgtagcgtccggtgcagctgatgcggtcggtggccgttacggtgccggtgtccagcgccgccaatgagacagcgggcttataggtactgcccacggtatacaggccctgtgtcgcacggttcagcagcggggaagggctctgctgcaccatctcggaatagccggtgtagtagtcgttcaggctgtaatcggggtagcttgccatggcgatgaccccgccggtctttacatcgatggccaccacggcgcccgcttcggcttccttaccgcgggtagcgggggcattgttattcaggtagctgatgcggtcggccagccccttctgggcggcggcctgcacactttgcaccagggtaagctgcacagtgtgtccgggcacagcttcctctgtttcttccacccggatgacatttccctcctgatcctgcaccacggtgcgcagaccgttctgcccgcgcagctcatcctccatcacccgctcaatgccgcttttgcccagcgtatcgctgatgcggtagccggagggattggagagggaataggtcttttccgcttccttcagcttgttgtattcctcgctgctgatggacccggtgacccccagcacatgggaagctagactgccggtcaggtaggtgcgcaccgggacggtaacaccatctacgcccggcagacggctgctgctttctttaatggcagccagcagcgcatcgctgatatcggtggcaaaggtatagggattgtagctggaaaattccgattgcgtcatggtatagcggatccccgccagcagccgctgctcctcctgggtgtagcggtacatacggtactgcgtccgcagggaggaaaggagctcctcatcggtggcgtcgggggtcttgcggaagttccgcagccagtccagcgcctcggcatcgcttaggtcctctatcttattgcggctgcgcagccggtccagcacatcggtatcggtgtagtcattcaggttatagagctcccgcagccagtacagggcatcctccggggtggcggcctcgcttaattgcagcttgctgcgcagggcccgcagggcggcttcctccccggtaaaggtgtagggcatctccgtgctgatgggcagctcatcccgccactcacagccgtaatcccggcacaaagcggtgagggtaagcagcaggggattgagctcctgctcggtaaagtagttactatcaatggtgatattgcagatggtggtattgccggtaaaggcctttcctgtggcatccacgatctccccgcgggccgcagaggtctgctgggtgatggaaatgccctgggccgcctggcgggcgtagtcctcgccatcccgcagctgggtcagcatcatcaccaccacaaaaaacagaaaaacggcgccgatggcagcgcccaggatgatatagcgttttctctcggtggggtacatggtcggctcctttcttccttggctttgcgggatagcccgcgcagggtgcgggcccgcacaggctcctcatctcatcgttacaatcgggtatcggtgcgctcctccgccatgcggtgcagcgcccgcaccgggtaatacagcggcaccgccagcaccgccgaataaacggcatggggcagatcgtaccgcagc

SEQ ID NO: 1510 - DNA, 32759 bp, Unknown
  16S sequences of unknown bacteria
ttcgtcggcagcgtcagatgtgtataagagacagatattatatatatattccacattctcaaaagctactttgaggatctcaataataagttctttaaaagtaataagcgcataatataaaggattatcatcatttaataagggtttatatgatctaacgtcaatatacactggaaaacattttgtttcagaattagccatcaatgtttcttgtaaggctcttaacaagtgtgttttaccagtgccgcgacgaccataaataacttggttcttaacgctgctaactttcccaatactatcttttcctgcatagtattctaaaaaattgtgtgtggtattatattctgctcttattaagttgtctaaatcttcaaccgaatgagctacttcagtatttcttattctaagatttgctctattttcattttgttttatcataattattatcctttctcatatcatgtatccatattataccataaaatgaagtgtagtggtataggtgttcacaacattggtgcctttaattcgacaaaaatcattcaaataatatattgaattatgctaaagtaataacaaaggaggggattctcttgtcgaaatacaaatcctacgacgacctgtctttgatgctttcggtgccggagattgctgctgtactgggagtctctcgtgcggcctcctatgagttggcccggagcaaggacttcccctcgctgcgaatcggcactcgtatcgtggtgccgaaagacaagttcattgagtgggtgaatagaaaggtggcggacaagcatgacgagtagaggtggctattatcggatgcctcaccgcatctttcacttcaagctcacacccgtccagtttgttgtctatagttatctagtttcctgcaccggacagaaaggaatctgctggccgagctaccagaccatcgccaaagcttgttgcatctcgcggaacaccgccattcgtaccattgaggcacttcagaaaaaacggttgatcgaaaagagccgtaccactagtcggaacatatatggccaggttcgcacctccaacaacgaataccagatcaacgacctgtccgccattgagtactggtcaactgaggataccaaggcggtcatctgatggcactggatatagaataacaaaactaacagcaacaaggaaagtacttccccacccaagaggaacagagaagctgattccgcgcgcattcgcacatttttggccaccaaaacggaggggcggttaatatactcccccaccggacaaacgaccgtattaaggcaaaagcgcaatcatcagaaccaccgatgaacactgcaaaacaagcgtctgttttacgaagcacatcatgccttgaagacgcagatggcacaccatgatgaagaaacccacccttagaggatcaggctccacaaccccggttcgcaccgcagaaaaagcacgggaacagcaccgtaaacagggtgctgaccaacggcacggggaccgatacaaagcaactcaaaatacacggtgaggcagtaggccccttgcggatagaaccacagattcacggcaacgtcaacggttcacggagcacactcaattaaacgaaaaagtacccccaatggagatttgaagccaatcaaaaatgaagcaggacaaagagtcggtgccgtaaacggccccgactcgacacacagcggcccggcagagccggccgcaacagggttttcacgcttttgtggatatcaaaaacacggtgccggttttaggatttgcgccatgttacggtgccgggagtaccgctaaatgcccagtgcaagccaaaaagtacggtgccaaccagatcgcccaaattttttcgattctcgctggacttccgggaggtcttgtggtagtgtgtgtcgttgccggaaggaggctataaaaatggcgaaacgcagagccaacggtgagggcaacatccgcaagcgtaaagatggacgctgggaagggcggtacaccgccggacatgatccagagacgggcaagcagttattcaagaacgttctcggtaagacgcaggccgaagtcaaggacaaactgaacgccgccctcgaggaattgaagaggatcgacgtggtggtgtccgaccagatgaccaccggcgagtggctggacacatggctggagcattacgccaagcccttgatgagagccaccacctacaacaactatgagacgttgatccgtctctacatcaaaccatatgttggagaggtaaagctgaataagctgaccactctccagatacagaagctatataatcgactcctcactaacggtcgattcgaccgcccggaggctaaagaccagcccaaaggactcagcggcaagacggtgagaaatattcacacagtaattcactcggcctgcgagaaagcgatcatggaacggatactcgcggtcaacccaacaaaaggctgtcggctacccaagaaagatcatacggagatgaaggtgctgccaccagaaaaattggcagacttctttcgggaagcaaaagagacaggcgtgtttgaactctactacctcgacttatccaccggtctgcgccgcggcgagcttctcggtctcaagtggagcgacatcgtcttcgagaaccggacgctggaggttaagcgacagattcagcgcgtgaacggcgtgattcaagaaacagctcccaagacgcgcaacgcctaccggaagatactgctgccggtcgaagccgtcgaaatcctccaacaatacagagaacagcagacactagaaagtgagtatgtcttttcctctcctaccggcggcatcatggaacccgactgcgcgaggaaaatgctcaagcgggtgctggagagggcagggctggacgagatgagattccacgatttgagacacacttttgcgacgctggcgttgcaaaacggcgtagacgtaaaaaccttgtccggcatcctcggccactacagcgccgggttcaccctcgacacctacgcccacgtcacggcacagatgcaagaggacgccgccaacaaggtgggcggattcctgcagcaagcactctagatcaccggacaccaaggggaggagcgtcacgaaagacgctcctcccttttgcctgttaccagataaggtcgcctttcagaatcaccgattcatcaggctccagatcgaccggctcggtcaatccctttatgtaaagggtgtgctttaggtggttgatgaccttaacctgctccacattgcagtcgtaaaatcgaatgctgcaaggataattgtaaaagcgaacgtcgatacaatcgaatgtcagcgggccgatcagcacggtatccacgaacatgccaaggtgatgaaaaatcgaaagggcttgcggctccctaccgtcctgcagccatagtgcctcccgaattttctcgtcttcggaacagatatccaacaccagtgtgccttcaaacgcggggtcgggtttcactgttttcacctccgtttgaaaaatgcttgcttaccagcaacagtatttcatgctcaaagggcgtaggttgtttttctttctgcggtatccccagcaggaaatcggtcgtcacgtcatagagcagggccatcctcatcaccatcgttaaggacggctgcgttgcgcccgtctcataatacgcataggtggaacgctcgatacgcagggctgttgccacctctttctgcttcaccgcattgtattttctgagaaagcgaagctgttccgcgagagtgagcacaatctcccgttccaaattacggggctcaaattgatacggcacatcctattcctccgtccgatccagcaagagccgcagtacggtatggtcggtctgcatatcccgataggttagcgcacagatgaagtcctgaacatatgcctgcgtgaaaagcgccattggctttaccagtaggaatcgctgcgcaaataaggcattgagctgttccatttccgtttccccgccgattaaccgcacaatcgtgttatatagctcattggcccgaagcggatcgcattcgcccagcagtcggttttcctgttcctcggcataccgttccgccgcgtgctcaaagtacagatcggcgagatcggccatatacaattcgacctttgtgtagttctcaagaaaggaatatggatgagtcgccacatatgcctgaaccgtactgccgatccgcgtttcacccactgcggcatccccgcgaactgcctgacggcacagcttgcgaagctgcccgcccgcctcttcgccatcgtccgacaaatccaaataggagaaggagttagccatctccagcagacgaagaagatactggttcagcagatattttcgacagcccagttttccgcgaattgctctcgccagttcaatcaactccacaaaagcgacgcccagttctttcacattcacctccccaagcatttctttggcatccttaaatctgttcacgctatcccgacccttcgttagaggtcgggaatcccccgaaatagaaaaacgcatgcaaaggctgggatagccgcagctacccattgacccttgcacacgttgaaaggcatacttgtttctgtgcggcaaatgcgttatactaatttcgtcgcagtgctgtttacagttgtgcaggggtggctgactcacctttgcgcagggctaatgtgctggaacacgttagcctgctgcggcgttatttttatgccggggaaatccccgccgtgtcgtatcctaactctcgtggcgaagaattgcaagtcatttcttttcagagagggaaaagccctgtggccgcaagaaaagcataaaaagcaagggaggggaataaccccgcccaagccgccaaaacgccaacgtggggcctttgtgggcaagtgtcggggcggtcccgccgcccatatatagagcagagcggaatagaatggtcgctgcataaaaaggggacaaacctagcggccaaaaaccacccgcccaaatcccgtatgggtcacggtatgggtcagcggcaaaaatcatcggaaaccacagataaacaaaagagcccggaaaccgcatgaatacacggtttccgggctcttttactggtcggagtgatgtgacttgaacacacggcctcttggtcccgaaccaagcgctctaccaaactgagctacaccccgaaaaacgacttgaagccgatgttttgggaacatacagacgggattacgcctccgtttccaattactcggttcatccgtttggatagtatagcatatcggtccctaaaatgcaagataaaagtttctttttccatgagctgaaaatgggtatgatttgcgaaataaagctgaaatcgggattcaactccagtgcctttgataaaaagcgttccactgttgcggcgatcatttcgaaatcgcagacaaaactcgtgtggagttcccacaaatcaacttcccccggcgttttccctttatcaaagccattttcaatatcctgcgcctatgcgcgaaaagcgttggcgccaaaggcatacatttctgtttgtgttcagatttctggcatgtttataacagccttgcgatacacaccggaaaaatttttagatgccttttttcgccgatgtcaaggcccggaaataagcaccccctacgaatgttggccgtcccgttgcttaagaaaacggatcggctcccgagccggcgttgagaaattccggaatatcggaaaccagacgtaaaaaatgaaagggtgtccgggtttcatcgtgaaaacccggacacctttatttatagatccctggtgtcaggtggggcggagaaaggatcgtctcccatcagcccgtcgcggcggagcattgtttccagcacccggatttccgcggaaacgtccaatgcctcccccgtgaagagccggtcaagctgtttcttgaacgcttcggcaagcgtgcctgccatctcctccacgccgcgcatcgcctcgtcgatggtttcgccgcgtacccgctgggcttcgagggcggaataggtgtccagcagacgcagtgtagccgggaggtagtactgcataaaggagcggatctgcggctgtttctcgggctgggattccaccacctgaaagatcttttcgcacagcccctcgatctgataaatccggttggaaagctgcggatcacggatggtctcgttgagtgcccggatccggtccagaagctgcgcggcgtcgggatcctccggggtgtctgctgggagccctttgcccgagccggtcggtggcggaggcggtgatgggagccactgacggctgaaaacaaagagccggtgggtgtaatcgagataggcgctgctcaggcagccggcgttgatcaggtattgcagttcccggcaaacccgcaggtaatcgcgggacaatgcctgtgcgaccgcatccaaagaggtggtcacatgccccaggaggaagggggcataccgctgatatacccgccgtttgtgcagcagcatgccgccggccaaaagacagatcagcccaatccccaccgagacgccggtgtaaaacaccgagctgaagaaaaagtcggtttctcccaaggacggcggccaaccggtggtgcgtttgatgatatccagcaccccgaaaacggcgaacactgtgccgacgatcaggagagccacgccgccttgacggctgatgggagggatggaaagcttccggtacagcaaatagaggccgaccggccaaaaaaagatcagcagcagcacgacggccgaccaagcgggttcttttcgattttgcacacgcggcggcatggcgtccggctcctttctatctgaaaagcaaaccaggaacaatggtttttatagtatataccaaccgatacgaaatgtccatatccatcctgcgccgcctttcttttggaacgatcggcgcggatgtaaaaacgggagcagcccttcagaaatgggctgctcccgtttgggtctgtaaccggccatcggtaccggatgcgtaaacggctaactggtttttgccctgcttttttgccagatacagcgcctcgtccgccttttcgatgaaggcctcgatcccgccgtccaccccgggactcccgctgtacagcccggcgctgatggtcacaaaggaggtttccccgtccgcgcagggaaaggtgagagagcggatgacgcacacaagcttttcggcatagacggcaaaatccgggttggtggataccacgaggaactcctccccgccataccgcgccacgatttgccgtccgggacgcagggacttgtcctcagcatagatggttcgggcgattgcccggaggcattcatccccttgaatatgaccataggtatcgttgtagctcttgaaatcgtcgatatccaccatcaggacatgtgcggggcagcccatttcccggcaggccttccagagctgttccgcctgtttgcccagcccccgccggttatagagtccggtgagctcatcccgttcgctgagccgttcgagccgcaaacgggagagaaaaaaggctttgccccgccggtgatgcaggtatgcgccggacaaagccgcgacggtggccgtcaggagcagaacaggagaggccgacccaccaccctgccataccagcaccgccatacacagtggcacgggcagcaaccaatagggagagggaaacggtatacaaaccgttccgacgagcatactgtaatagagatacgtggtagcatgcgcccgggcttcccccaggcagaaacccaaaaagccggcgtaaaaaagcaggagcgcagcggcgaggccccaccgccgtgccggcggataaaggagcaggagaagcaggacgaccgctgaaacagcggctgcgaggcaggcggcagcggcaggcatgtgccctgcggccatgttgtcgaagaagcggagcagagcggcggataaaaaaaccaggccggacggcagagcccctacagggaattcctcccacagggcggcgccaaaggcgcgccgttccgatcccggattctctcccggttgtgtatccttcatgtccccgccccctttatccgtcacgtttttcttaccgtatacaggttcatcttactgcaatttgcggtagctgtcaagactataaaagggcctaccctatactaaaggggaaccgaggtgttggggatgtaccaaaggattcgcgacttacgggaagaccaggacctcacgcaaaaacagctcagtgaaatcctgcactgctcacaacaggtatatagcaattacgagctcgggcagcgggacatacccacccaggtgctgatcgcgctggcggatttctacgataccaccaccgactatatcctgggacgttccagcgagaggcatcctccccgaaagcgcgaataaggcagagaaggcgcggcaaatacactgtatttgccgcgcctttatcaactttgggacgtgcctgcccgataccgcccttacaccgcgtttcccgaaaaaggaccgtgccgggcggcgttgagcagtgtccaattccccaccggttggcgtatactgaaagagcaggaccggcccaaagaaaggggaatatgcaatggatgataggcggctgcgtgagcagatctgtgaggtttgccgccgtttgtggcagcagggctttgccgcagcaagcgacgggaccgtttccgccaaactcggggatggaatgtatctggtgaccccctcaggcaacagcaagaacgacatcaccccggatgggctgctgaccgtggggccggacggggagatcctgcggggcccggagggactccgcccctcttcagagatctggctgcatctcgtctgttaccgggaacggaaggatgtcggcggggtggtacacgcccatcccccggcggccacgggattcgccgtggcccatcagcccctggatctccccggcaagatcgaagcggtgctcatcccctgcgccataccattgaccgaggaggcaccggaaaccgtgcggccgtatctgcaggggtatgacgcatatctgctcgccaaccaaggggcactgacggtggggtcggatgtgctggccgcccatgcgcggatggagaccttggaacactgggcaaggattcgtctcattgcccggatgctgcgaggaggagagggatctccgcccgaacagatggggcggctgtacgccatgtgggagggctacggccttgccggggagcgcccgggctccccgaatcgagactgaggtcgtctgtgggggcggttaaccggcaccacacgggtttggcagcctcgggcaatggcgggaaacgccattgtgggtggccggggaggctgggttggaattacggaaaggctaggccccggccttagggagcctcactgtgaacaccgtcacgccgcctgcgctgctcgcggtgatgtctcccccatgggcgaggacgatttcccgggcaatcgccaagccaaggcccgccccgcccgtgttgctggagcgggcgccgtccagacggtaaaatttctcaaaaatagtggtcaggctctcggatgggatctcccggccgcggttgatgaaggaaaccgtcaccgcatcctcttcgcattccgcccggatgatgatgacactgtccgggaaactgtaggccgcggcgtttttaaggatgttgttgaacacccgggccagcttgtccgggtcggcatagacggtgagggcgtcgtcggcctctacccgggcctccttgccctgaggggagaggatggggaaaaactcgtcggcgatctgccgcagcatgaaagagagatccagcgtttcccggttgaggacgatggtctgcaggttgaaccgggtgatatcgaagaactcatccaccaattgttccagccggtaagccttctgcagcgtaatatccacatatttggcccgctgggccggcggcatgtcgggggcctcgtcgagcaggctgagatacccgaccaccgaggtcagcggggtcttgatgtcgtgggcgagatagacgacgaggtcgtttttccgctgctcggcctccttggcgtccttttcccgtttgcgcagggtttcgcggacggcgttcaaacgcttttccatgaaatctagctcggccgggaggcggatttcctcctccgaatcatccgtcagccggtcaagtccctcactcagcttgtcgaaatatttggtgacgcgggacagggcgaaatagaagatgacgagcaggagcagcacgaagccgatccccagccaaagcggcttgaaccgctggaacagggcataatacgcggttttcgcgctgctggggctcagacggaggatccgctggcacaggctgataaaggtttcggcaaacgggttttgcagcaccccgtcgatgacccagaaaagaaggaaagaccccactgccgcggccacgatgacggtcagcaccacctgcagaaagatcttttttttcaaggcccggaatttacttttcaattttatagcctaccccccacaccgttttgatgtatttcggatgttccgccggatcgtgcattttttcacgcagatgccggatatgcaccatgacggtgttgttgctgcccgtaaagtatttttctccccagacctcgtggaacagctcctccgagctgatgacccggccccggttcgcgcacaggaaccaaaggatcgagaactcggtgggggtcagggagagcggcttttcgtcaagggagcactcgtgggtatcctgattgagcaccaggccggagaacgcgatgacccgctcctcgggttcgccttcggtgcggttgtattgggtggagcggcgcagctgtgccttgacccgcgcgatcatttcgagcgggcggaaaggcttggtgatgtagtcatccgcccccagggtcaggccgaggattttgtcgatctcctgatccctggcggtgagcatgatgaccggataggtgtgggtttcgcggattttgcggcagatagcaaatccgtcggtgtcgggcagcatgacgtcgagcagcgcgaggtcgagacgctccgtctcgatacaggcgagagcggcggccgcgctgtagcaggtgtggacggtaaatccctcgtttttcagatacagctcgatgagatccgcgatttcgggttcatcgtccacgacgagaatttggtaggccatccgcctgtcctccttttgacatcgaatagaagcggagcgggcctcctccgcgcgggagtatggatagccctgacccgggccctgtggtcaccgggtcagggcggtttcagccgatcgggtttctcatatgctgctcagcagcagcaaaaaccagagggccaggccgatgacggtcagcaccgcgagaaacagcaccatccggcggatgcttttgagcagctcgatctgcttaaactgcaggagctgctggagctccgcgggcgacggggtcccgtccttcagacggataaaccgggcggtatccccgatctgccagacatccggcgggaggtccctgccctccttgacctgccgatagaactcctgggattcctcgagtccgcagtcctctgattcgatcagatcgctgtgccacagttcgctgacgatttccggccgcaattccatgtttacccctcctgttgtaatactctttccagcgccgccgccagctcgtaagccgtccggccgctgcgcagaacagatacctcttccatgtccgcccgccgccgggcgtcttcgtcgagggccgcgtcctcgacgagaaggatacaggccacgtcggccagcaccgccacggcgacagcgttgacgttccccatcaccgtcatccaggcatcgccggccttggcccggcccatcacccagctcagcaggtcgccgcagtacccgccggtgacctgccggtccggatccccttcgaccaggatatccaggccgagcacgtccgtgagtgtcctcaccgtcatacttgtccctcccctttgtccttgccggacatccggacgtccggcatgtccccttcgggagggacgaacccctcgattctggaaagctgggtggcgatctgctggatctggcggcgcatcaggaagatgcagtctgtctcctgcgccaggccccgcaccacgtcctccgccagcgcgcggcaggtcggggcgccgcagctcccgcagtccagccccggcagccgttcgccgatccggtcgatttcctgcatgaggcgcatggcctcctccacgttttccgccagcttcatcaccggggcgaattccagccgctcggtccactcgaggcgccaggcggcgcccgcgtcctccaggcggttgcaggagaccggcaggtatttgcgcaggcgctggatccgcgcccgggcgacatagccgttttccgccgtgaaaatcccgcctacgcagccgcctgcgcaggcgttgagctcaatgaaatccagctcctggagtttttcgtcctccagctcctcgagcaccttaatgacgttgtcaatgccgtcggcggcgagatggttttcattgagcaggcccgccgcctccccgccgatagaggaccagctcaccccaatgatcccggaatgggagagggcctcggtatgttccagatggttcatccggccgagcagccggggatagatgtcgctgatggccagcacgccgtccacattcgaccggtcgacgccgatgggaacccggacgtcggtgaccttggccgcgcagggggagaggaaaaatacgccgatctcccctggcggatagccggtctcctggacggcggcctccctggccagcatggcggccacctccatgggggctttgagaggcaggacatgctcacacaaatccggaaaccgcacccggatcagccgcaccaccgttggacaggccgagctgattaccggttttttcagcttgccgtcggccaaaagctgacgggttgcgtccgagacgatttccgccgcccgggagacctcgaacacttgatcgaaccccatttccagcagcccggtcagcacgacatcgatgtcgtcgagatggttgaactggccatagagggccggggcggggattgccaccttccacttgaaattttccagcatggacagggaatcgtgccgtgcctttttggcgtggtgggggcagacccgcacacattcgccgcagtcgatgcaccgttccgagatgatctgggctttgccgccccgcacccggatggcctgggtagggcagcgtttgatgcagttggtgcagccaacgcatttgtctttgtccagcgtgaccgaatgaaagaaccggtccatgaaatctcaccgcctttgaaaccggaatagcccgggactcagccgcccgttttggggacgaggacggtcagcagcatccgggtccccttgccgatttccgttttgatatccatataatcggtgtattttttgatgttgggcaggcccatcccggcgccgaagccgagattgcgcacgttgtcgggggcagtggaccagccctcctgcatggccagctccacgtcggggatgccgggaccgtgatcggtgagaaccatggacacccggtcgggcaggatttccacatccgcctcgccgccgccggcgtggatgaccatgttgatctccccttcatacatggcaatggagacgcggcgaaccacatcggggtggaagccgagctgcttgagcgtccgtttgatcgcgccggaggcctctccggcacgggtgaaatcgtccccgggtacgtcgtaatgcagtttgatgttcatacccttaaccccgcctttacacttggtgatcggccgggagcgcccgcccgtgtccggacggcacgttttgtccgccctccctggttccgttacaggcggggttcgtctccgccgcacaggccgttttggtacaagaggccgcaggccgtgaacatccgcagtggcgtgctcatcagcacgatgccgcggtcgttcgccagctccaccatgtcgggggtgggctccttgccccgtacgaagacgatgcagagcatgtccatcatatccgccgtgcgcaccacctgtgggttgaccagcccggtcagcaggaccgactgatccttgacaaaggcgagcacgtcgctcatcatatcgctgccgcaggcgttgtgcacctcggtatccagcatgctcccggagatcactttggcgcccaggatgcgccccacatcggctactgtcatacatggtccgtcctttcatatcggccggatcaaccggcaaggatgacgggggattctctttctattatagcggcatcggcgaaaagttgcaaggattccttgcccgcccgtgcatctttgtgtaaaacagagaggccctccggatttcccgggttttgtcccgttgatcccctgtcccgatttgcaggcggagccggccttttcttgaaatatggattgacactcttttcacgaaatagtacaatagacagtatatggaagctcaacatcgtacaggaggttcggacaacatggctagagtttataatttttccgccggtccctcggtcttgccggaaagtgtgctgcacaccgcagcggaggagatgctcgattataaggggtcgggtcagtcggtgatggaaatgtcccatcgctccaagacctatgacgccatcatcaaggaatgcgaagccctgctccgggaagtcatgggcgtcccggacaactacaaggtcctgtttctgcaggggggcgcctcctcccagtttgccatggtgcccctcaatctgatgaacggcagcggcaaggcggatttcgtgcttaccggtcagtgggcctccaaagctcagcaggaggcagcccggtacggtgaggcccatgtggtcgccagctccaaggataagacctattcgtacatacccgcgctggatcccgccgccttcacccccgatgcggattacttccacatctgcctgaataataccatctacggcacccgctttaccgccctgcctgagaccggcgatgtgccgctggtggcggatgtctcgtcctgcatcctgtccgagcccatcgacgtctcccgcttcggcctgctctacgccggcgcgcagaaaaatatggggcccgccggcctgaccgttgtcattgtgcgtgaagacctgatcggtcatgcccgggacatcacccccaccatgttcaattatcagatccacgccgacaacggctcgatgtacaatactccgccctgctacgccatctacatctgcaagctggtcctcgagtgggtgaagaacgacatgggcggcctggaaagcatgaaagcctataatgagaaaaaggccggcctgctctacgattttctcgactcctcctccctgttcaagggtacggtcgagaaaaaggaccgcagcctgatgaatatccccttcgtcaccggcaatgaggaactcgatgctaagttcgtgaaggaagcggccgcggctgggtttgtcaacctcaaaggccatcggtcggtgggcggtatgcgggcctccatctacaacgccatgcctatcgagggcgtggagaagctggtcgcctttatgaagcggtttgaagccgacaatacctgatccccagccaactgataaggagtgatgttccatgcagatcaaaaccctgaataaaatcgcagcctgcggcctggagcgtttcggtgccgcttataccgtcggggacgatgtcgccgaaccgaacggcattctggtgaggtccgcctccctgcacgaggcggagctgccggagtccctgctcgccatcgcccgtgctggggccggcgtcaacaatatcccgcttgaccgctgcagcgaagccggcgtcgtggtgttcaacacccccggcgccaacgccaacgccgtcaaggagctgatcctcgccgggatgctcatctcttcccgcaaagttatcgatgccatcgaatgggccaaaaccctgaagggccagggtgccgaagtcaccaagctggtggaaaagggcaaggcgcagtttgccggccctgaaatcaagggcaagaagctgggtgttatcggactgggcgccatcggcggcctggtggccaacgccgcccattccctcgggatggaggtgtacggcttcgacccgttcctgtcggtcgatgcggcctggggcctctcccgcggcgtgaggcacgccgtcagccgggagcagatctttgccgaatgcgattacatcaccgtccacacccctctgacacccgaaacgaaggatatgttctgtgccgcctccttcgcaaccatgaaggacggggtgcggatcctcaacttcgcccgcgccgagctggtaaacgccgccgatatgaaggaggcgctggcctccggcaaggttgcggcctatgtggtggatttccccaccgatgaagttctgggtgtcccgggcgtcatcgccatccctcacctgggagcctccacccccgagagtgaggataactgcgccgtcatggccgtcgatgagctgaaggcgtatctcgaggacggcgtcatccgcaattcggtcaatttcccgtcggtggacgtcccccgttccaccgaccaccgtctgtgtgtgctgcatcggaatatcccgaacatgctcacggggatcagcggggctgtctccgccgaggggatcaacatcgagaccatgaccaaccgttccaaaaaggactatgcctacaccatcctggacgtggtgggcgatccgtccgacgagagcctcgataagatccgggcgatcgacggggttatccggctccggaaaatctgatcatacgggttccgcctgtgaaacgggatggggtgcgccccatcccgttttttggtctcccgtaacgacaaggagggtttgcatgcgtctgatcctgtcttcctgtgattttcacaacgatcagtccagacgccggattttcgacaatctgggtgccgcggcggaggactgccggattcttttcatccccaacgaaaaggccaccccggaaaagctggcgagcggtcgttatgtcggctggctggaacggtggggtttccggcgtccgcacatcctggtgttcgaccatcgcgatccggcggcgtatgccggcctggatatcgacgtcctctatatcggcggcggcaacaccttcagccaattggcccggctgcgggcctgtggattcgaccgggaggtgatccgctatgcccggcggggcgtcacctacatcggcgggtgtgccggtgcccatatcgcgacaaaaaacgtcgagcatgtgctccccttcgattccaatacggcgggaatcaccgacttcgatgccctcggcctgttcgatgggatcctgttctgccattactccgaggcacggcggccatactatgaaaaggccgtcgccgaggggcggtatgccgtccatgctttgacggacgacgacacgatcgtgatacgcggctgagagccgactcccacagatgggctgattggcagggatgaaatacggagggaccggaacggatccattcatggcgggtggggccatatcgactgctcaaaaacagataacaaccacgatgacaaccggcagttgcgcaaaaagcactttgcgcgttgttgcgccggcacaaaagggttgatatcatggatccataaacaagaggaggcggttatcttgacgatccgacatatgataagccggctgcgggtaagcgccgggttatctcaggagcagtttgccgcgctgtttggcgtttcaagacaatcggtacagaagtgggagagcggcgtttcggtgccggagctcgaaaaactgatcaaaatcgcgaaatactttgacgtttcgctcgatgctctggcgctggagagcgatgcccgtatcaccgaggaactgaacttcagcaaaaggctgaagcctaaatacgccaatttacatgaatgggaatcctattcctccaatctgcttatagagtatcagcaggccgtcgaagaaggcctggatatacagccttacgaggatgtattcgcggcggttgcacgtcttccgaaaaatgagataaagaagagactcggcgacatcttattcgatgtcgtcctccaggcgaaaacagcaaaaggataccagtatatcgagccctctacgctcgaggaaataaggcggttgagaaatggtaccgggcaacggctgtccgttgataaaaaaacgctggaaagcaagatttacggggcgtggatgggcagaatttgcggatgtcttctaggaaaaaccgttgaaggcattaaaacgaaggaattgatccctttcttgaaagaaacaggcaattcccctatgcaccgctatatccggcacaccgatctgaacgacgggatagtagacaagtacaatttccgctttgcaggccggtgctatgcggatacggtagacgggatgccggtggatgacgacaccaattatatcgttctggctcaggaaatcgtcgaaaaatacggcagggagttttccccctacgatgtctccagggcatggctggatctgcaaagcaaagacgcctattgtaccgccgaaagggtcgcgttctgtaattttgtcaagggatttgagccgcctgaatccgccgtataccaaaacccgtaccgtgaatggataggcgcacagatccgcggcgactatttcgggtatatcaatcccggaaaccccgaacttgcggcggaaatggccttccgggatgcctccatctcccacgtcaaaaacggtatatatggggaaatgtttgttgcggcaatgctggccgttgccgcttgcaccgatagtatccacgatattctttcaggcgggctagcacagatccctcatacgtcgagactgtatgaaacgattacccatgttttgaccggctttgaaaacggcgtttcgcagcaagactgttttaaaacgattcataaccgctatgatgaatattcagagcatggctggtgccataccctatccaatgccgcgatcgtagcggcgtccctgctttatggaaacggccgtttcggacattccatctgtatggccgttgaagccggttttgacacggactgtaacggggcaaccgtgggctctgttttgggaatggcaaaagggatcggcagcatcgatgaacgttggacagagccgatacacgatacgctccatacctctattttcggagtgggaaccgtcaggatttccgaccgggtaaaacggacgttaagccacattccataattctgaaaaaacggcaccgaaagttcggtgccgtttttgagccaaggacatataacgggcatcgggggttgatgccggcctgcaaacaagggggaaaccgtgtgcgaaccctctttctttagtgaatatctcccgcggattttcgcccggccttccgcatcccgtcaggcggcgatgcttccagaggaggcgcctgcctgccgcagggtcatcgtcagcgttatctgacggttcccgcgccgcacggccacggtgatggtatcgcccacctgatgcgcgtccagcacacggttgtaatcgtccatggacgagatggaggcgccgcccatggtcaggatttgatcccccgcccggaacccatcggtgccggttacggacaggacatagatgccggtccgggatacgccgtactgaaaggcactcgactgtgaggtgaggtccactacctcaatccccgtatccagccgtccggtgacatatccgttaatcatcagttcctccaccaccgatttgactgtgttgcccggaatggcgaagcccaggccctctatgccggtcccggaggatttggcgttgacaatgccgatcaattcaccggcgctgttgaaaaggccgccgcccgagttgcccggattgattgcggcattggtctgcaaaagcgtcatggtctggccgtcgatgatcacgtctcggctgagtgcgctgatgatgccgctggtcacggtaccgccaagttcacccaggggattgccgatggccaccgccgtctcccccaccaccagttggtcggaatctccgaacaccgccggggttagcccggtggcctcgattttcagcaccgccagatcggttttagcgtccacgccgatcagcttggccgtatacgtgtccccgctgcgtgtgcgtacggtgtaggacgaggcgccttccaccacgtggttattggtgacgatgtatccgtcggcggataagatcactccgctgccggcgccggtctgtaccaactgcccggcataggaggccgagccggtggtgatctccaccaccgaatcggccgctttggccgccacatccgccaccgacagctcgccggtgccggtcttattggaaaccgactggtaaagaacggtgctgccgccatttgaggaagaggagccggattccgccgggatgcgggaaccgagatagcctccgcccaccccggccaccagagcgacggccgcgcagccggcgatcagcccggccgcacgggcttttccacggcgttttttcggttttggagaaggggccgtctgcccgccccatggggcggcgtaaggggtgtcccctgtccggttctgtgtgtatcggggatccaatggatcatatggtgtaaacgacgtcatacgaatacctcctttggcatcggctttgtgccgtgtctgtctcgttctggtatcagtatgcgcctcgactgtgtttttttgttgataaaaaatcccggtggttgtaaacaacctgtgaaagaattgtgtatggcgggccggtctccggttatttcggagacacaaggacataccccgaaaaaagcgaaccggagggaaattcctccggttcgctctattcagtcttctgttttcggatcttccgccagccgcagccccagctctccgagctgggccggatcggcgggggaggggcaggaggtcatcagctcggtcatgttctgcactttcgggaaggcgaggacgtcccgaaggctggcggccccggtcaattgcatcgccaggcggtccaggccgatgcccatgccgccgtggggcggagcaccataacggaaggcctcgatcaaatggccgaatttccggttggcctcttcgtccgtcagatgcagtgcccggaagatgtggctctgcagctccgggtcggtgatccggacggagccgctcgagagctcgatgccgttgagcaccaggtcaaaggctttcgcatatacccgggcgggatcactgtccaggtaggggatgcactcgtcgagcggcgcggtgaagggatgatgcatggcgacccattcaccgagctcctcatcccactcgaagaaggggatctccgtgatccagagcagattgtacccttcccgggggatttgcaggcggtcggccacctccagccgcagggcgcccagaatcgattgcacggcctttttcaccggtccggcgacgatcagcaccacgtccccgggttcggccccggccgtccgcagcagggcggccatctcgtcttcggaaaagaatttgccgaaggaggaggccggtccctccgccgtccagcggacccaggcgaggcctttcgcgccgatcccccgtacgtattcggtcaatttgtcgatttccttgcgggtcaggacggccgccgcagccttggcggtgatgcagcccactgcgccgccgcttagtgctgcggtggaaaagacaccgaagccgcagtcccgcacggtatcggtcaggtcggtcagttccatggcaaagcgggtgtccggcttatccgaaccataacggcgcatggactcgtcataggtcagacggggcagcgggaggggcagctccttccccagcacccgccggaacacctccgccatgaatccctcgccgacggcgtgcagatcctccacgtccacaaaggacatctccaggtcgatctgggtgaattcaggctgccggtcagcccgcaggtcctcgtcccggaagcagcgggcgagctgcatggtgcggtcgaagcccgcaaccatggtcagctgcttatagatctgaggagactggggcagggcataaaactcccccctgtgcaggcgggaggggacgagaaaatcccgggcgccttcgggggtggatttgataagcatgggggtttcgatctccagaaagccctggctgtcgaaataatcccgtgcggttttggcgatctcatgccgcatccgcagattccgctgcagctcgggacgccgcagatcgaggtagcggtatttcagcctggtcgcctcggccgtgttgctgttctcgacgatctcgaagggcggtgtctcggaacgggacaggatccgcagctcctccacctcgatctcgatgtcaccggtgggcagttcgggattgatagaggaacgcacccgcacccggcctctggcggcgaggacgtattccccccgcacactcctggctttctcgaacacagcgggagacgtggcctcgtcaaaggcgagctggacgataccggtgcggtcccgcagatccacgaagatcaactgcccaagatcccgctgccgctgcacccagccgaagaccgtcgcgtcctctcctgcgtgatccctccggaactccccgcaatagcgggtgcgcttcagtcctttgatgctctctgccatgacaaattcgtcctttccgtcgtccttcatttctcgaggccgtccgcgagctcttccccaaagaggtcggccatgccggcgagctgccggtccagcgatttttgatacagggtggtgtagaggctgtcatccagggcgatgggctcctcggcgccggatgccatgtctttgaggcggccctgtttttgggcgagctcattgtcccccaccacaatgacgtatcgggcgccgagcttgtcggcgtacttcatttgcgccttaagcccccggcccgcgatgtcgaattccaccgacaccccaccctcccgcaggcgggaggccatcgcgaagcattcccgcaccgcgtctggccccatgggggccagatagagctcggggcggggcggggcgggtatggaggtccccttggcttccaggatcatcagaagccgctcgaggcccatggcaaagcccagggacggcagctccggaccgcccagttccttggtcaggccgtcgtagcggccgccgccgcagactgtcgcctgggcgcccagggcgtcggagatgaattcgaataccgtgcgggtgtaataatccaggccccggacgatccgggtatcgatctcaaacgggatttcggccgcggtcagacaggccctgaccccctcaaaatgcgcggcgcagtcgtcgcacaaataatccagcatgaccggtgcacctttggcaatgtccgcgcaggccggggacttgcagtcgaggatccgcatcgggttgcggtccaggcgatcctggcaggtgccgcacagttcatcccgccgcgcttcgaaatacgccttcagggccgtgtgatagcgcgcgcggcaggaggggcagccgattgagttgatatgcagggacacccccgtcaccccgagggtttccaggatggtccgggcgagggcgatgatttcggcatccgcctgagggggggcggcgccgaagcactccaccccgaactggtggaactccctgagcctgcccgcctgcggtttttcataccggtagcaggaggttagataggcgaccttggccggcagggcgtcgttgtgcaggctgtgctcgagcagggcccgcgccatccccgccgtcccctccggccgcagggtgactgaccggcctcccttgtcctcaaaggtatacatctccttctgcaccacgtcggtggtttccccgaccgaacgctggaacagttcggtatgctcgaacacaggggtccgcatctcccggtagccgaagtcccgcgcaatggaaagcgcggtctgttccacatgctgccatttatagctctccgcgggcagcacgtcggcggtgccgcggggggccttggtaatcagtgccatattgccattccatcctttcgcctggccggtgggccatatcctcctccggatacgacgcagggaaccgcccctgtccgccccgtcagaagcgcatccgccctgaaggccgcacagctgccgttccctggtgaattcttccgggtaaagggattcttacggattcccggggttgacgatgttgcgccagtcgagatcgccccgctccaatccgtggatgagcacctccgccgtggcgatattggtcgccaccgggatgttgcgcatatcgcacaggcggaacatgtcgctttcgttgggctcatgggccttgacggtcatgggatcccggaaaaagagcaagaggtcgatctcatcgcaggcgatgcgggccgaaatctgctggtccccgccctgggaaccgctcatataccgggtgatgttcagcccggtcgcctccgccaccattttccccgtcgtgccggtggcgcagatattatgtcggctgaggatgccgcaatacgcgatacagaactggaccatgagttcctttttggcgtcatgggcgatcagggcgatgttcataccgtcaactccttcaatatcgtattctcaagcgggtcacattttttccagccgtgccaggcggacgtcttcccccagataccgcttggcgatgttcccgaaacagagggcggcgtcacactgccccggcagcggacggccgttggcgcccgccacggccacttcctcatcctcgggcagaatgccgatgagcgggacaccggccatatcgatgatctcgtccacatccggcattttgccggccatgacgagggagggacggagccggttgatgataaggcgggcagggagctgccgttcctcgagaaggcggccgatgatccctgcgtcacgggcgcagaccatatcgggggtagagaccacaaaggcctgcgcagcacccgccgccgccgtttcaaaccccggcccgatgccggcggggctgtccacaatcacatcgtcgtagtaccgggcgaagccgcggcaaaggcgggccatatcgtcgggagaggccagctgttccagccccacgggggcgggcaccaccgatacgttcgggcagaccggggaaggataaatcgcccggatgggttcacagcggccttcaaaaatgtccgccatatcgtaaaccgcagacccgatcccgagcattaaatccaggctgcgcaggccggcatccccgtcgacgagcaacacatgccgcccctggcgggccagcgcacagccgagccctgccgttacggtggatttgcccgcgccgccttttcccgatgtcacaaccgaaatcaaacccatatggaacctcccgccgccacccgacggcagcatacaaccaacttcagtatagcatatttccaaatcgcttgtaaaccagaatttgagccctgttccgccaaactttttttattcgcttcgtgcatctgccacaagcccggaaaagaccgcgcggaacagcccgccgtcagggcaaaagctgctgctccggggtgggggcggtgccggtcgatttggaagcaaaataggcgtcgagcacctgccgggccacctgatgggccggggtggaggtgccgttttccattaccaccgagatagccacctcggggttttcggcgggggcataggcgatgaaaacgccgtggtcggaacggtcgccgttgccgttctgcgccgttccggttttggcggcgacggtataggacgcgtcccggaaagagctgacggcggtaccgccgttttttgtaacggccaccatgccttcccggactgtctggaggatggcggggtcgatgtccagccggtccgcgacctccggctccaccacggtttctaccgtgccgtcgtagctgcgcacgctgtggaccagatgggtcttataccgcaccccgccgttggcgagctgcatggcgtaggcggcgagctggatgggggtgaagcggttggttaactggccgatcgccacctggatggtatcgccctccacccagtcgcttttggtgtcggggccggccaaaacccccgctgcctctccgatttcgataccggtcttgaccccgaagccgaaccgggtcagatacgaattcatgggtttgatcgtcagccggcgtcccaaatcaaaaaagaaaacgttgcaggatttctgcagggcgcccacgacgttgaggcttccgtggtggccggtgcatcgcggcgcgaacccgacgttttcgtagtagtggtaaacgccgtcgcaggaaggccccttctggtcggaggtgatgaccccctctgacaaacctgcgatcgcgatggccggcttgatggtggagccgcaagcaaaagtgccgtacagtgcccggttgaacaagggcttttccggatcgttgagcaggttggcatattcgctggagtaggtggacaaatcgtatccggggacactggcgctgaccaacacgccgccggttttgacatccagcagcactaccgacccgctccggatatcctgcccgcgccactttttagtcgcggtaggctgcatcagacgcatctcggccatcttggccatgatgaggtcctcggtggttttctgcaggtttttgtccagcgtcagcaccaccgaattcccggccacagccgccgcgctctcatattcgtcgacgatggcgccagaggcgtccctgaccagaacccgggtgccggtggtcccccgcagggaggattccatcgcctgctcaatcccgcttttgcccaggatgtcgttgagctgatagcccttgtccttgagggactcgtattcttcgggatagatggggccgagggtgccgatcaggtgaggggcgatggtgccgctgacatattcccgcaccggggtggcctggggggtcaccccaggataggcggtgttgttttctttaatgatataagccgtgtcccgggagatgtcgttgcagaaaacgaaggggtttttcaggctgaaatcccggatggccatctcgtattggatgccggccagccgccgctgctctgcgggggcatagtcttcgagcgcgtaagactcgatgagcgcggccatgcagttttccaccgtggcatagtccgccagccccagttttttgcgcagcgtggcgaccgcgctttcctggtcctccataaactggaacggctcggttttggtgatgggaagggtatcgttccactcctccccacggctttcaagcagcgcagccagcttgagcagaatggcgttttgcttgttccgcgcctcggcgccgctgccccgggggaagaacgcgccgtcgatcaccagggaaaaactggtgcggttgacggccattgggcgcagatagcggtccagaatctcgccgcgggacgccgcgatggagaccttggtctcggtcaggcggttggcctggctcgcgtaatactccccttccacgatctggatctggaacaggcggacgcagtagatgccgaacaccaccaccagaatgcctgccagcaccgccagccgccgtctgctggagcgattatacggattgctgtccgccatagtaatgccttcctttctgcagccgggggccgccccccttgttgtcgctggtaccgccgtttccggcggcagacgttgtataatccgatgaccgccccaacccccggggccgcagcccctttttgtataaaggcggggtcgggtgtcggcgtccccgccggctttcctaaaaagaaagtcggccagccgcccgggggttccaaggggtttcaccccctggcacgtctttgccttctttcttcgtgtggagaaagaaggtgcctcgcggcacaagcggggaaaaaactcttttcagtatatccgcgcaaaaagcgcggaatctccgaaaaggatgatggttgcgcggtaatcctcatctccacgtttttggagggtcttaagcggcgataaacgcatcattcgcggcgtttgaggatacgcgccgtcaggaaagtcgccccatacagcagcggggcgagcacaagcgtatacccgaggctcggcaaaatccgccgcagcaggataaaaaccggctccggttcctggagcaggagggtgtagcacagccagttcatcagccccacaaacaggagagctgccgccgagaggagcagggcggtcagcagattgttgcgcatgagaagggtgatcagaagcccgcaaaggcatccggttaccagaagcagcagggcattgaagccgagcagccgggcggcgtacagatcccagagaatgccgcaggcgatcccggccgcggcaccgccgacgggtcctgtgaacatggcgatgcagaccgtcagcggaaccaccagcagggggcggactccgaagaccggcgggatcaagcccttggtcgcctggagaagtgtgaccagtaggatgagcagcccgtaagcggtccatttgaggtaacggtcgcccagccggcgcatcggttccttttccgcgattttccgttccagggccgttccctcctcccgccgcaaagggctcaaaatgtattgacgggcccgcaccgtccccgggacaaggggacggcagaaaacgtgggtccccactggccgcccgcctgcctgccgtatggagacggaacggacagggtcatccgccgctgcccgcgtcggcgccctgtccggtgaatgatgtgatgacgaataccgacgtgaccgaacggacatccacgaacggccgtaccaccgcgtagtaggacaggccgtcggaggatggtgaaacctcctccacctcaccgatcaggagacccttcggaaagacgccgcccacacccgaggtcacggcgaaattgccgatggccgtgccggtttcgcggggcagcaggtcgagccgcagcagcccgtcctgcgccagggacgcgcttccgccggtgatacaggtgtcgccgttctggctgatataggcgctggcctgggtagaggggtcgagcagggatcgtaccttggaccaggtggggcccacctcgtacaccacaccgacaaggccggaaggcgtgatgaccgggtcgttcggctccacccccgcgagggagccggtgtcgatggtgaaattgccgtatttgtcgagcggatccaccgcgatgacgcggccgtcggcaaagaggtaatcattgttcgcttccttgagctcgagatactgccggtactgttcattgagccggcgcagctcatcgagctcgacgagctggccgcgcagctcgtcgatttccgcctgtttggcgtcaagctcatcgtggagagggcccgcggccgcgaacccgccgaagaaatttttgacgccctccgtgaccgcggcaaaggcggtctggatcggggtgatgatagcgccggtaatggtggccgggatggtcgagaagccgccggtggacgctgcgtagatcatgatgcccaccaggaacagggcgatcccggccagcactttgaaggccaggcttttcaggaaatctttcacagcgtcctcctgtctcggtccttaccgggcgcggccggaacggaaattgctgaccataccgatgtcgaggcacttgccagtgccgatcgccacacagtcgagcgggttctccgcgacatggaccggcataccggtctcgcggctgaccaacacgtccaggccgcgcagcatggcaccgccgccggtgagcatgatgccgttgtcgatgatgtcggcggacagttcgggcggcgtgctctccagagtggagcggatggcgtccacgatggcggaaaccgggtcggccagggcctcccggacctcctcggacgagatggtgatatttttgggcaggccgtccaccaggttgcggcctttgacatccatggtggtttcgtcctcataggggaaggcggatccgattcgaatcttgatatcctcggcggtccgctcgccgatgaggaggttgtacttctttttgatataggagatgatggcctcgtcaaagtcgtcgcccgccgtgcggaccgaacatttcgtgacgatatcgcccagcgagatgaccgccacttctgaggtgccgccgccgatatccaccaccatgcagccggccgcctcgttgacctggagaccggcgccgatggctgcggccatcggttcttcgacaagctccaccgctttggcgccggcgttgcgggccgcctcgtccacggcgcggcgctccacctcagtgacgccggaggggatgcagatgaccacgcgggggcggctgaatacggtggaatgcaccgcggtgcggataaagtacttcagcatatccgacgtgacgtcgaagtcggcgatgacgccgtctttcaggggacgtactgcggatatggaaccgggtgtgcggccgatcatttccttggcctcgctgcccaccgccatgaccatgttctccttgacgtccatcgccacgaccgagggctcccgcatgacgatgcccttgcccttcatatacacgagggtgtttgccgtacccagatcgattccaatatcccggctgaacaacttgcatctctcccttttctttttggcccggcgggccccatccggcttttttatacggcctttaccgccatggcggcggcaaccgtccattcttatccttgactgccgatactatattatatacgcggatggaaaatttctcaaccgcaaaccggcacttttttgaaaaaaaacccatcaaaaaatgcgttttttgcaaatcttatgaaagatttaagagatagggcttgagaaacgcccacagccgcgctccgggcaaccccatcacggtgtaaaaatcccctgcgatcccccgcacaaaccgcatcccctgcccctggatggcgtaagcccccgccttgtcaagaggctcgcccgtgtcgacataggcccggatctccgtggaatccagcggcatgaattccaccgccgtctcatccgcgaagccgtccccgatcccagggccgcacagccatacgccggtcaccacccgatggcgtttcccggagaggagggcaagcatccggcaggcgtcctctttaccccggggcttgccgagaatcgtgccgtccggcgcggccacgacggtatccgcccccaggaccagccggccgggataccgggcggccacctccccggctttgctcttcgccacccgtgtcacagcggcgggcagaggaagctccgggtcgggcggctcttcaccgagggccggcaccacgtcgaaggcgagacccagtttttcacagatctcccgccgccggggagaggcggaggccaggatcaaccgttccatgtgctcccccctcagcggacttttttatatagcagcagcgccccgccgatgagaagaacctgcaggacattgacctgcatatggaaggaaaagctcaggtcgatgatcgcgaggtccagcctcccgatgtcgaagccgatggaatccccccaggtcagccatttgagccaggatatctccccggtcagggtggtgatcagggcggacagcaccagagccgcgagcactagaaaaatcaaaatcagggtatttttcgttttcaccgttcaatcgtctcctctaggattcggatttccgagcttgtattgcccggcaggcctctcatgggtttacacattctcatcccccgcggcgggccttccgtcccggcaacatatgcgggaggccggagacggcgggacttgtaccggagataaacccatgggtttatctccacccaagccctcggggccgtaaccccttcatgtatgggcgttggtccaaaagattccgtacccgccgactttccaaaaaagaactccggcctcgcccctgaagggctctctatactggcgggcactggggccggtcaccggccattgtggcgtcccacaatggccctaaaaatcaaaattcctggggatccaggggggtcacccttggcgcctctttccccgttcctactcgattagcctcgggcaaatgcggaagcatttgcgagggccggggcaggccacgtatgatttcgacggcgttcgacccggccttcttgtcgtcaagaaagggggtggcccgcaggccagacccatttttgcggggcgtgttggagtttgtccgcgcatataaaacgttgtcctaacgaaaagggatatccaatgcgcggccatatccttttgtccccggcggcaaaagtgggcaaaaacgccgccggggttcccccggaccccagatggtcagccggttttcttttaggaaaaccggcgttgccgttttttcctgaaccgatgttcatacaacaagggaggccgaggcctccggggaccggttgggcgcgggactgaaaaaatgcggcaacccatccccggggccgcagccctttttatatgggcgggagctggggccggcgtccgagtcgattttcatagagagaaaatcgacaaaaccacccggggctccaaggggggaacccccttggcacgtctttgccttctttcttcgtgtgaagaaagaaggcggccctcaggccaaacctgaataaaacggcttttcggtatgtccacgcataaagtacgcagtcctgcagaaaaagaccatcgaatgcgcggccaaggctttatcccacgcccctgaccggatgacggataacggttttcagccgttccggggcgcatttgcgcgcgtcgctgagataaatctcatgatggtgccgctcggccgtgatatccgtcagcaatccgtgggcctgcgcgaatccgtccatc

SEQ ID NO: 1511 - DNA, 12437 bp, Unknown
  16S sequences of unknown bacteria
gccgtcccgtccagcataatgcagtcggcgggtacctgctgccccgctccgagcaataaaatgtcgtcgaggacgagttcagtcacggcgatttcccgctttttgcaatcccgcaccacttttgcggtgggggaggagagaatggagagtttgtctatttttctcttggcgcggatttcctgaaaaatgcccatgccgatattgcagaggaagatgagcacaaaggtaaactgcgagatcggggcgtgcgcggaaaggagcagcagcgccgccagaaaacagagcaggttgaaaaaagtgcagatattgccgacgaaaatgctcttgtacgtcttggaatattttttgcccgtcttgttgacgagtccctgttcctgccgctgttccacctgtattttggaaagcccttcgtcgagatcggcgttgaaccgcgcgacttccgccgcgtcgactctggcggtctttttgcgctttttcttttccttttctttggggaaaagggattggaaatgcttttcgcgcttttcctcttcggacgtatattcgattttttcctgttttttctttttcatgattcgtccctgaaacgagaattgatttctattcgaacaatcgtgtgcggcgttccaatagagccgaaaatacaaaggagtgcttcgcgtcctccgcctttttgctccgttttctgcgctgcgcttaaataggagcggaaaatacgggggaatgttccgcattcccgcctttacttttctattataccatagccttccgcaaaatacaagttttttgaggaatttgcgggacgttcatttcatttaattgcttttacggggggaaagtagtataatatggaaagaaacgcaactacaaggcagaggtaacgctatgatcgacatcaatcttatcaggacaaaccccgatttggtcaaggagaacatcaaaaagaaatttcaggacaggaaactgcccttagtggacgaagttttggagctggacgcgaagcgccgcgcgctgatctccgaaggcgattctttgcgcgccgccagaaataccctttccaaacaggtgggggcgctgatgaagcagggcgaaaaagcggaggcggaaaaggtcaaggcgcaggtcgtcgcggacgcggagcgccttgccgccatcgaaaaggaatcggaggagatagaggaccggctcaaaaaagcgatgatggcgatcccgaatatcatcgcgcccgacgtgcccgtcggcaaagacgactcggaaaacgtcgaattacagcgcttcggcgaagcgaaggtccccgactttgaaattccctatcatctcgatattttggaaaagctggacggcatcgacgtcgattccgcgcgcagaacgtccgggcagggcttttactatctgacgggcgacattgcgcgtctgcattccgccgtccttacgtacgcgcgcgatttcatgatagacaagggcttcacatacgtcatccctccctacatgattcacggcgacgtggtgtcgggcgtcatgagtttcgacgaaatggaaaacatgatgtataagatcgagggagaggatttgtatcttatcggcacgtccgaacactcgatgatcgggcgcttcatgggacagattctggacgggagcaagcttcccctgacgctcaccagctattccccctgcttccgcaaggaaaagggcgcacacggactcgaagagcggggtatttacagaattcatcaattcgaaaagcaggaaatgatcgtcgtctgcaagcccgacgagagcgacgcgtggtacgaaaaactctggaattatacggtggagcttttccgctcgatggacattcccgtccgtcagctcggctgctgttcgggcgacctcgccgatctcaaatacaaaagctgcgacgtcgaggcgtggagtccccgtcagaaaaagtatttcgaagtgggctcctgctccaatctgacggacgcgcaggcgcggcggctcgggatccgctataaggatacggacggaaaaaccaagcttgcgcacacgctcaacaataccgtggtggcgcctccgcgtatgctgatcgcgtttgtggagaatcatttgcaggcggacggcagcgtgacgatccccgaagtgttgcagccgtatatgggcggcaaaaaggtgatttcgcccgcgaaatgagagaaaaggaaaaccctgttcaaggcgtgtctgcggctcgcctctttcgcccgcgaaagagcgggaaataggtcgcctatgccgcgacgggattcgaaaaaggcgaggcaatcttttgacgggcgacgcgtcgccctcgtcccttatgtcgaatttttcgtcgggagcgccgctttcctctcctttcaatttagagcgtgtcgccgcaaggcagccgcggcgtcttcggataagttttccgcgagccgcgcgtcgcccgtccgggaaatacatccttcttatatttgttcgacgctttcctgctctgacgaaaatctccgttttccctgatttgtgtttgtgtcgatacgctgtataaaaagtcgcccgaacaaaccgcgttttttgggcgcggcattattaaaaatatttttttcgccggggatccgtgttttttggaagatttccattgccgaaaatcgctgttttccgagattggattttaactcttatgaaatatttgttcttcgatatcgaatgtgcgagcgtgtttaaaaataccgcgaaaatctgcgcgttcgggtattgtcttaccgacgaaaaattcaatattctggaaaaagaagacatcctgatcaatccgcagggcggctttcatctcaccgaccgcaagggcacgcaggggctggttttgccgtacgaatataaggatttcaaaaactatcccacctttccgcagctcgccccccgcatttacgcgctgttagaggacgaagaaacgctggtggcgggacacgccacgatgaacgacgtcaagtatctcaacctcgaaagcaagcgcttctccctgcgctctttccgcttccgtttcgcggacactcagttcgtgtatatgaaccgcatcggcgtgttcaatcggcagttcggcttaggctccatcgcggaagacctgggcgtggaatttacgccgcaccgggcggcggacgacgcctatgccaccatgcgggtcgccgaggcgatgtgccgggaagaggcgctgtccttttccgcgcttttggaaaagtacgggatcgagccggggcgtatcgagaattacgaggtgacgcagaattcctcgacggcgcagcgcgcctatctcaaagcggcgcaggccaaaaaagaagcgcgggaagcggcgcgcatcgagttccataactttgccgacagggaaaaacgccgtcgccaaaaagaggggcgattgaaaaataaaacggtgtgcttttcccatcctttggaggaacggacggaactttccaagccgcttttgtcggcgctgttcgcggagggcggcttttacggcttccgcgcggaggagtgcgatctttacgttcacttcgaaggggagggcggaccgagaataaaatccgcttccgcgcgcggcgcaaggctcgtcaccgcggaggaattttcttcctttttgaaaaaagaatccatccggggttgaaacgaagtcttatttttgcggcaaagtttaaagtggaagaagcggattcttgtgcgtaaaggcgcgcggacaagccgattgcttttgcccgaagagccgtttggaaaatatcgtgtaacaggagtcgcgtatgacggctttgcccgaaaagtttatgcaagctatgaaaaaacagcttcccccggacgaatgggaggctttttttgccgtctacgggcattctccgcagaaggggcttcgcgtcaacgcgctgaaaatttccgccggggagttcgcgaacatttctccctttgcgcttcgtcccgtcccgtgggaaaaaaacgggtattatgcggaggaggagaagataggctcgcacccgtatcacttcgcggggctgtattattcgcaggagccttccgccatgtgcgccgcgccccttttagacgcaaaaaggggggaaaaggtgctcgacctttgttccgccccgggcggcaagggaacgcagctcgccgcggcgatggcgggagagggaatcctcgttctcaacgagcccgtcttttcgcgggcgcagattttatcgcagaacgtcgagcggctgggcgtaaaaaacgccgtggtgctttcggaaatgcccgcaaaactcgcaaaatttttcggcgggtatttcgataagatcctggtggacgcgccttgttcgggggagggaatgttccgcaaaaacgccaaggaagcattgggggaatggagcgaggaaaacgtttctatgtgcgccgcgaggcaaaaggaaattctcgtcgaagcgacgaaaatgctcgcgccgcggggcaaactcgtctattccacctgcaccttttccgaggccgaagacgaggggcaggtaagcgactatctgcaaactcatccggaaatgcggctcgtcgaaagtcaaaaactgtatccgcataaggtcctgggcgaagggcattttgcggcgctttttgaaaaggtctgcgagccgtcggaagaggtctgcgagccgtcggaagaggtcgcgccctcccgattttttccgcccccgctcttgcggccccgcgttttccgggaaagcgaaaaaacgtatcgggaatttgaaagacaggctctgaaaacgcccgtcggcggcgtgttgcacgaagcggggggaatgttgtacgctctgcccgaaggggtgttcgattggaaggagttgcacgttctgcgcgcgggaatacggctgggagaagtcaaaaacggccgcttcgagccttctcattccctggcgatgtgcctgaaaaaggattcgtttaagagcgcgttagacttatccctttccgacgtaaggacggaaaaattcctgcgcggggaaacggtgacgctcggcgcggaaaagccggaaaagggctggtgcggcgtgtgcgtggacggcttccctatcggctggggaaaagtggtgggggataccgtaaaaaaccatatccccaaaggtctgcgcaaattttcttgaatagagccgcatacccgatcttgatcagacagggaaggaaacgggaaatagaaataggaggggaaacatagaaggaaacgggaaaggatcgacgcccgtcttaacggaatgatatgtctataaaaaaccgtccgggaatacctcgggcggtttttctatacaaaaaggggtcgcctgcaaaaatgcaggcgaccgtctttatcggaccgaccgaaaattaatcgtcgtagggatcgttatcgtcggtatttttgggctcttcctttttagcgggttcggacttcttcttgtcgtccgccgctatcgctttctttgcgtagcgccgtcttgccgcgcccggaatgttgcttgctgccgcacgggcttttttgaggtgcgctttcttgacgatcttttgaattgccaagccgatcaccgcgatgatcagggcgatcgcgatcaccaaggagctgatgaacagccacatattggtatcggattcggtttcgtcgtccgtgttgtcgtccccgccgtcgtccgtcgaatccgccgtcacggtgacttcgatatagctgtaatcgacaaacatcgtatagagaggattgttgggagactgtttcgaatcctcgtaatagagataggggattccttccgaataagtggaggccgcatagcttgtataggcgtttccgatttcgtccgcatccagcgtcgaatcgtatcttaaaaaggagggactgtcgaagaaggaataggtcgaatagatgacgttttcatactcttctttaaactgcttttccgtccatccgttttccttcttgatggtttccacggcttccttttccaaatcggagaaggaggaatccacggaattgggcttcaccgtatcgaagatcacgtagctgtctttggcgctttgagaagactcgctgccttcgcgcgttccgctccacacttccagacgatagtttttctccgcgctgcccgtgtgaatgtagaacgtgcaggtcacccattcgccttcggtgtcttccaccgtcatcaggagatttttcgcgtcgccctgcgtgccgtccgctttcacgttggtataacggggcgtcaatcccgcgacgtctttgagatcgagcacttgggcggtatagttccgatacgcgtaatatttttcgtccttgcaataatacgcgatgccgtcgttgccttccgtcttgggcttggaagaatcgtagttatatttatgatagccgtccgcgaggagcaggttgccggtttcctcgtccttttcgtaattggacagattggcgtagtattttccgtccatgtcggaaacgtagcccgaccatttcttattgacttcgtacaggccgtccttttctctcaaatagaacgcgacgtccgtctttttattgaaatccttgtcggagggatccttcgcgcagacgttacccgaatcgtcgtaccaataagtataggcgacggtattgatagagagcgtcttgtcgtatttcttcttggaagtatccacgaggtagatattcgcctgagtgcccgcgctcactttgaccttgatggaaacggtggcataggaggaggaagaaaccgtctgcgaagaaccgatatagccgtaggactgctgctgatcgttatagatgagaaggggctgggtggaagtgccgaaaatcttttcccaccatgcgtcctcgtcgtcgatgaccacgcccgctttcatggaaagcttatacagccagtggtttgtcttgtcggcggattcgttcatctccttgcggtagttcgccgcatacttcttgttgacgagtcccgcgtattcgttgtcgttgatggcgttgttggtgccgcccgcgacgacatagccgctgccgccgtaaacgcccgtatagttcttgggatcggcgatgcccgtttcgatggcgttttcgggaatggaagccgccgaatcaaagcccgcgtcggcggaagaaagctcttcgcccgtaagggaaacggatttcgcgtaagtccccgtcgccgcataggagaactgcttttccgtcatttcgtaggtttcgaaattggtgaaggccgcatatcccggatagaaatcggagtttttcttatccacgatggtggtgggaccgtaagagaacgtgagatagaaactcttgtccgattccgtttcgttttcgagaaagaagaagcactgctgccagccgtcgtaaatatcctcgatcgtttcgccgtcgttttcgagatcgtcgatgtccaccgtcgtgatggaagtggtgtcgagcgaggaaagggaagtttcattggtgccttccgtttcgtggaccgtgatggaagcgcccgtgaagccgctcatatccgacgttttcagccagaaggaaaccatcaggtaggaatcgggcgcgagtgtgaacgcgtcgtctttcagcgtggaggtgtaggccgcgccgtccgcgctcaaaagcatcaggactttggagttcgtatccccgaaaggatactccttaaagtcgttgcccatgactttcttcgcgtacttattggttgacgagttcaaatcggcgatggtataaagccccgtcacgtcgtcgaccgtgaggcggttgatttgaccgtaaagctcggtccccgcgggcagaccgccctgaggaacgcccgaaacgtaagtcgtgttgcccgacttctcctccgtaagtcccgttttcagtttggaagccgcaaggtcgtatgcgtcgaattgcgcgtgcagatcgagagcgtaatggaaagtttccttatattctttatccgcgcggaagagcctgtcgtccgtttcggtgtagatgcccacgacgtcatcgcggctgagcttgttttgggaaacgagctcggtcacggtttcgtcgtaagtttcgttggaaacgatggaacattccacgtcgtcgaagaaggcgtagccgtccacgtattcgagcttatccgtgccgccgccctgtccgagtccgagcaccatcgtgaaggtgctggacgcataggagcagcctttgagataaaaatggtactgcacccagccgttgtcgtcgccgtcgggattgactgcctgcgtatcgatgtttttgatctgcacctgatcgagggtgttgccgccgaccgtgtgagtgacgccgatataagcgcccctaagtccgttgacctgagagcccttttcatccgacgtgccgttgaaagtcatatccatggtcttcacccagacggagaattgcgcggaagtgcccggctccacggtgatggtggtggaagcggtgtacttttgcgctgtgcctttgccgtccgaataggagttgtgcagcatcaggatgtgggtgtctttatccttctcctccgcgccgtccgcgtaatgggtaccgggattcgcgaggggatttccctcagaatcgaggggaacgtcgtcgatggtgatattatagtcgtgcttgtcctcgtcgtagaaagagagatcggcgagcttatggtcgtcgtcctcgtccagccaggcgtcataaaaagccagtctgtccctcgcggtgaggctttcccaattcgcctttgcctccgcttccgtagcgtgcgctttgcccgaggaggtggtgaggtctttccatgcgtcgtcggaggtgtcgacgattccgctcgccgtcttggacgaggaggcgctgccctgcgcggaagaaccggtggacttggaccagcccgtcggcgacgtgataatcagatttttgccgttgttatcgtcgaaaaactcgaaactgccgtttttgatccgcgcggtgtccgtttccgtcgtcgtgacttcggaatcgtctacgctggaatcgtcgccgctgccgcaggcggcaaacgacgtcgcggccgccatcaacataaacgacgataagcagagcgcaagaattttcttatttctgcgttttttgtaacttgttgtcatgtaaacaccttcggttttgtttttttgatgctttgccagcattcgaaacgtatgctctactattttaatataaaatcgatttagaagcaagcgattatggtgacaattaaaagaaaaagttttataaaatagaaaaaattacgcaaaatacactgtaaaggggtgaagcgtagggaggaactcccgactttcgcaaaggcgtcggcagagaaacgcctctcgtttttttcggacggcggaaggaactgtttgacgcgtccctccaaaacacgtcgtttttcccgttcccgtcggaacggacgcccttttgaatttagggcgcgggaaattcctttttgcccgcctcgtgtgcggacggcgtcgatttcagtccggggaaggcttttgcaaagacggctttacgggaggtaagctccgctctgaaattgccgaagtccccgccaaggtttccttgcctttctctcctcccgccgtcggcgcaagcgctttggagcgcgaaggagcagaaaagggcgctgcgggggcgtttttgcaaggccgtctttacatatggacaagagtaaatcgaacattcgaaaactgattatctgcggctgcgcggtagggacggcgaacagcgtgttcggcggcgggggcggaatgctggccgtgcccctcctcgaacagacgggcatttcttcccaaaaagcccatgccaccgccatcctcgtcatccttcccgtttccattctgacttttatcttatacgcgatacgcggaatttacgatttttccgtactcattcccacggcgctcggcgttaccgtgggcggctttttgggcgcgaagcttttgggaaagctcccgcgaaaaaccgtggcgatcgtctttgccgtattgcaggcgctcgcgggcgcgtggatgttcggcttcgtataaccccgtttttcgtcgcctttttgcggacaagttttttccgttttacaatttgcggagtttttcccccatccccgcaaggtaaaaggaggaaccgcgtcccgaaaaaagggcggcagcggctcgcgttcccgctttttcgttccgaaagagtgaaacgatatgggaaacggcgcttggaacagagagccgcctcttgcccttgcggtttggaaagataaagcaatcaaaaaaataaaacgccccatgcgattgttcggaggggatagagagcgataaaaaatcctttccttaaagtttttttccatacggagtacttgtagatttctaagaactaaggttgaaaaaattttaaattttacatatgtcattttacatttatttattactcggaattttaggcgggattcccgcgggcatggggatgggcggcggcaccgtgaccatcccgctgctgattttggtcggcggcgtggagcagaagatcgcccaatcggcgaatctcttttcctttttgcccatgagcgtcggcgccctgcgcgtgcacgcggacaataaattgctggcgacggacggcatcggctggatgatcgtgcccgcgctggcgttttccgtgctcggtacgctgcttgcctatcatctgccttctcaggtgctccgccgcgctttcggcgtctttttgataattttgtccgtttttcagttccgccgcgctttttcggacgaaaacggttgaaaaattttccaaagtgtgttaaaatgaatagaaaagcttttcaggacacgggcgtgcgcgtttcttttccgcctcgggcttaaaaatcgggaaaacgaacttttccccgcaaaaggcggataaagaaagagaggagagggcgtcgacgcggaaattctgacgttccatccatttttcgcgatactttgtcgtttgtcgaaaaagtcttttttcgcctcggcggggataaagaaatccgttgcgttttgtgtcgttttgcgacggaggtttgcgctttcgccgccgcgtcgggggataacgaaatttcccccggtatgtttgtgagcggtggaatttgctcttcttttagtcggaaagcggttgcggcgaaaggtattcggctgtatgccgctttttgcaaaacggcgtttctgcgaaaagaaaggggctttgtcgcgctcttttgctttcgtcgacggaattgcgttttctctcggcggcgcccggaaaaccctgaaacgctctttgccgctctttggaacaagccgggaactttctccgaaaaaggagcggcgcgccgccattggtcggatttttttgcttcctgcgcgattgcggcgcggtattctctcttcgcgccccatccgacgaaaaatgtatccttccgtttctttgaaaaggcggcaggggaacagcggtttccgaaaaaatttgtctatgaaaaaatatcgctatatattattcgatctggacgggactctcacgtactcccatcccggcatctatcgctgtctgcgctatgcgctcgaatctctcgggaaacccgcgccgacggacgcccagcttcgcccgtgcgtcgggccgccgctcgcctattccttttccgtcctcttcggtctgtccgaatcggaaacggaacttgccgtcaaaaaataccgcgagcagtattcccaaaagggtatgtttgaaaacgagccgattcccggcgcgaaagagatgctccgcgcgctttccgaagcggggtacgcccttgccgtggcgacttcgaagccgaagatctttgcggaacgcatcgtcgagaaattcggctttacgccctttttaagcgccgtagcgggcagcggcacggacggcagccttcctaccaaggcggacgtcatccgcgaagccatgcgccttttaaacgctcctgccgggctttgtctgatggtgggcgatcagacttacgacgccataggcgcgcgggcgtgcggcgtggattttgcggggctggacatcggctacgcggaaaaaggggagttggaaaaacaaaatcccgactacttattttcgaactttcgtcagctgacggagctattgacgaaataaaggggtcggtcacaccctcccatacagttttgttcccgcgcgggcaacgcaacgggaaaggcatcctttcaaacaccgcattttttcgattacggataccgtgtcggaaggtttttgaacgttcggggagcgtttcacccgaaaagagagtaagaaaaaggcgcgaaaaggggaaaataggggagattgtccgaagaagagcggacagtcttctttcttatacttttgttttttactttttttgtgtctttttaacaaagtgtaaaacaaataatttgcaaaaaaggtcgaaatgggtcgatttggaaaaaaaatttcgaaaattacaaaaaatttttcaaaagggtatggacaaatacgtttttatgtgataaactatgggaaaacttattat

SEQ ID NO: 1512 - DNA, 14836 bp, Unknown
  16S sequences of unknown bacteria
ggcaaccgggtttgtcaacgatcaaaattcccggtcaccgcgattggtgaccggggattttttatggctttattccgccgcgttcatatagcgcgccaccagcatggggatatattcgttgttgtagaaataccgcccgcttacatcggcatacgccctatatttgccgccgtcgctcaccgaccccaaactcgaaagattttccagaatcaaaagctgcggctcgtccgtcgtggaaacgtccatcaggatgtactgcgtcgtaccttccacaaagctatccaccacaacgccgttgcactcgaaaatccgcccgtgccaggcttcgtacagcgttttcagttgctcatagtccatcttccaagcgttgcgcgaatattccgcaatggagggcaaatagtacatattaaaggcgatggtggaatcctgcttgccttccttcacggcccggaatcgcaccagattgtcgccaatggtggagaactgggcaatgaagctgaactcgccggtttcctgatttacctcaatcgaattgtacacaaaggagctatccaccacaatggacgcgcccggttctgttcggccgctgatcttttgttcgctcagcgaagtccgcgtaggcgtatcgtaatccagttccagcgcgatttccatcacgggccggttgatcacaatatccttgcgcgcttgcttgtgatagggcgtttgcaccaacagggaaatggcattgtcccccgttggctccacattgaccatcagcgacaaaagcccattgcgatccacatcggcgctcacatcttccccattgagggaaatggtgctgccgggaatgatttgcacctccaccggatacacgcttgtgtttacgcttatgtactcctcctccgggctgagcaccacaatgggcgattccggcgtgggaatttgcatctcgatgttgggcagctccgtcttttcgcccgcggcgctgaccatgataggcgaaagcgttatattggcgccttcgacctggttgggatcataatcgaaccaatcgctatcggcaatttccagccgcgccaccccgccggaaaacaggctaacggtgcgcgtctgctccacataaatggaatcgccatcttccccgtaaaaggtgatcgcgtggcctgggcgatagtcttccagcgtgatcgcctgcacaacgggcgctttggcccctcctgggccataggtgtttacaatgcgccggttgcgcagccaaaatgtcaaattgtatgccgcataacaaattccgcaaaacaccagcacggcgcaaacgcccgccaatgttttgcgcagcggcgaattcagcgcaaatcgtttgtcttgcacggtttcctcctttggtttttccctgctttgggcatagagacctcctctagcattttctattataccacgcttttgcgcgcgtgcccatacctttcgcaggaaattccaaaaagatcgggagaaacgccctgtatgtaaaatatttctcctaccgaccgtgcaaaaattttcgcgccattcatcgaaggcgagcacgatacaaaaaccatcaaccaggcaatcgcgtacaccgaccgccggtttgccaataaccaaagccgcccggcgcgatgcgccgggcggctccaaggggcttacccgatttgcttattcagcaatggtcacataattccagacgacgtcgcccgtcaccagaaccgcaaggttctggacgttcggcttcaccatgtagggattcacgtagaagtgcagcggagccacagcgccagtggccatgaggatttcctccgcctcggcgcacatcgcagcgcgcgcttccggatcggattcggccttgatcttttctaccagcgcatcataggcttcggcccaggtctggttgccttcgaggccccagtacgcgccgagaccggcgtccgcggtgttctcggtgtagcgggtgtagtcgcccacatcctggccgaggcgcggatagttgttgcccgagctgctgatgaagatctccaggaagttcacgcaatcgttgaagtccgcaacccagcccatacgggaagcttccgcgtcgccgttgccgagcttggtctgcagggtcgcccaggcttccgtgctgatggtggcggtgatgccaacgctgttccagcactcctgcacgtactgcacgatggcggagttggtggcattctggttgaaggcgaattcgaagaccggcacatcggtgaacatgatgttgccttcctcaatggagccagtgtaggagtagcccaggtcgatcaggatgttgatggcttccaccatgtcctgcgtgtaaaccgggttctcttccgacggagtcgccgtgccggcataccaggagccatagccttccgccgtgcggacgttctcattcaagccgtcagacagcgcgttcgggaagaagccggtggccggcgcttcgccgcccatggtgacgtaatccacttcgtcctgacggttgatcatcagaccgagcgcataacgcacgcgggactgttcctggatggtgagggtcttgccttccggcgagagatccttgtgcacgttgaacaggatatagtaggtgccgagctgctcgcccatcacgagttcgccgggatacgtggcgttcagacgctcaaactccgcgggatccatgctctcaatgaaatcggccgcgccggattcataggctgccaggatcgcaacgctgtcttccgccaggtaggcattgacgccacccagggacacgttttccgcgttccagtagtaggggttcttttcgaaggcggcaacgtcgtccaccgcaaagttggtcatgcggaaggggccggtgccgatgtaggtctcaggattcacggcccacgcgccttcggaatccgccaggtcgaccttcaccggatagtaggtggtgaagccgcacaggtcgaggaagtaagcgcagggattggcaagcgtcacggtcagcgtacgcgcctcgtcgtccgccaccacgttcagggtgccgtcttcattgcgggcgatgtagtcgaacagatagccataagccgcgcccagatccggatccgccgcgcggttccagctcttcgcgaagtcgctcgcgaagaaatccgagccatccgaccacttcagaccttcgcgcagggtgaaggtgtacacgaggccgtcgtccgaaatcgtgtagctttcggccatttcaggggcctgcgtcgccacgccgtccaccacctgcgtgcccatcaggccgcagaacgccaggcggataatgttcgaacccgcggaagcggagttcagcgccggatccatgctctccggggtgccgccgccatacatgacattgacgacttccccttcggccgaagcgccaacggcgcccatcgcgaagagcatcaccagggaaagaaccagagcaagtgtctttttcatggactgttcctcctcaaggataatctattgcacgcccacgccgggcgatacaatcctaaacgttgtggcaggccacaaaatggccgggatcgatttcccgcagcgcggggcattcctgcgcgcaccgggcggttgcctggcggcaacgcgtgcggaacgaacagccggagggcatcttcagcgggctgggcacatcgccttccagcacgatgcgctgcgcgttgcgcgccttttccggatctggcatgggcacggcggaaagcagcgacaccgaatatggatgcgccgcgtggcggtacagttcctgcgcgggcgccaattccaccattttccccagatacatcacggcgatgcggttggaaatgtgcttcaccaccgccaaatcgtgcgcgatgaagagatagctcaggccaaattgcgcctgcaaatcctccatcatgttgatcacctgcgcctggatggaaacgtccagcgcgctgaccggctcgtcgcacacgataaattctggcttggacgcgagggcgcgggcgatgccgatgcgctggcgctggccgccggaaaactcgtgcgcatagcgcgtcgcctgttcgccggagatgcccaccgttttgagcaattcatgcacgcgatcttcgcgttccttcggcgttttgcacaggtgatgcacgtcgatgggttcggccacgatgtcccccaccgtcatgcgcggattcagagaagagtagggatcctgaaacaccatttgcgcgcggcggcggtattcgccaatggagtgggcgtcgacctttttgccatcgaaccaaacttccccgcccgtaggcttatacaggtgcagcagcgtgcgccccaccgtggtcttgccgcagccggattcgcccaccaagcccagcgtctcgctgcgaccaatggtaaagctcacatcgtccacggccttgagcatcttcgttttcaaaaagcccgtagtcacgggaaaatactgcttcaaatttttgacttcgaccagtgtgctgttctgtgtcatgctccggcacctccgtccagattcatgcgaacgattctgccttcgctgtcgtattcgatggcgtccctttccatgccttctttcacgttcatccagcaagcggaaatgtggtccttgcctacgaacacttccggcgcgcgcccttccaggcatatcttcatcgcgcgctcgcagcgcggcgcgaaggcgcaacccgacggcatgcacaaaagatcgatcggcgtgccggatatgggcaccaagcgctccttttcgtcgatatcgatattgggaatggagcgaagcaggccgcgggtgtattcgtgacggggacgatagaagatgttgtccgccgtgccgcgctcgcaaacgctgcccgcgtacatcacgatcacctcgtcgcacatgctggcgatgacgcccagatcgtgcgtgatcatgatgatggccatgcccatcttcttttgcaaatcctgcatcagttccagaatctgcgcctgaatggtcacgtccagcgccgtggtcggctcatccgcaattaggatgtccggctcgcaggccagcgccatggcgatcatcacgcgctggcgcatgccgcccgagagttcaaaaggatattgcttcaggcgcttttgcggctcgttgatgcccaccagcgtgagcatttctatggcgcgttcccgcgcctgctgatggttgcggcccgtgtgcaggcggatcgcctcttccaattggttgcccaccgtgtacaccggattgagcgaagtcatcggatcctggaagatgatagaaatcttgttgccgcggattttgcgcatttcgttttcgccagagccgaccagctccttgccgcggaacttgatgctgccgcttacaatgcggcccggatgcgcgagaatttgcaaaatggagtaagcggtcacgctcttacccgaaccggattcccccacaatgcccagcaccttgccgctatccaaattgaaggaaatcccattgacggccttcacttcgccggccggtgtgaaaaaggaggtgtgcaaatcccgaacttccagcattgccatacgcgtaccctcccttatgaacgcagcttgggatcgaacgcatcgcgcaatccgttgcccagcaggttgaatgaaagaacgatcaagaaaatcgaaagcgcggggaacagcagcagatacgggtaggaaatcaagccgctgcgcgcgtccgaggcgagggaacccagcgagggcatcggcatagacacgcccaggcccacgaacgaaaggaacgattccgtgaagattgcgctggggatctgcatcgccgccgtgatgatgatgatggagacgcagttgggcaacatgtgcttgcgaatgatgtgcgccgcgctggcgcccgtggcgcgggccgcgagcacgtattcctgctctttgatagagagcacctggccgcgcacctgacgagccatgctcacccaatacagaaggccgaacacaatgaagatggaaatcatgcccgggcccagccggatgatcagatcgttcgtagaagtgctgataaaatctttgatggccaccgagagcagaatcacgatcagcacatccggcaaggaataaatgatgtccacaatgcgcatcatcaccaaatcgaccttgccgccaaagtagccggaaatggaaccataaatgatgccaatgatcacaacgatcaaggccgcgacaaagcccaccatcagggaaatgcgcgtgccgtagatcacgcggatgcaataatcgcgccccaggttatcggtacccatgatgtgcgggaacacgaattccccgttgtcgatgcgcgcctgctccttgcgcgaatattcaaacggcatcaggtgcttcgccgatacgtcctgctgcgtataattatatggatacacatacggcacgatgatggcgatcagcgtgataaagatcaaaaggcacaaacaaaacattgccagcttgttcgcacgcaggcggcgcatcgcgtcgcgcatataggaaacggattgccgctgcgttacctgctgcgccttttccgcatcgctggcggtggcgaatttcgccggatcaatctgaaaggaaaggaaattcttctttggcatgtttccgctcttatccacttttcgtcacctcgttaacccaagttgatccggggatccaacaccttatacagcacgtcggcaataaagttcatcatgatgatcatcacggcgaggaagatggtgacgcccatgatcatcatataatccgtgcgcagcatgctgttgacgaacaggcgtcccaggccgggcacggagaaaatgttctccaccaccatggaacccgtgaggatgtaggccatcatggggcctgcgtatgtaatgaccggacccatggaatttttgagggcgtgcttgaaaatcacgcgagtgtttttgaggcccttggcgcgcgcggtgcggatgtaatcctgacccaaaacgtccaacatggcggagcgctccaggcgcgtgatataagccatggggtacaaggaaagggacagcgccgggagcaccatgccgccgggctgcgtcgccatcgtgggcgcccagccaagccgcagggcgaagatgatgagcagcaaagtggcaatcacaaaggaaggcatgctcaccaaggcggtagtgaccacctgaatgaccttatccagcagtttcccgcgcttgagcgccgcgagcgcgcctaagatcacgcccacaacgatggccatgcccgccgcgctgagccccaatttcatggaatagctaaatccacccatgatcagctcgctgaccgtgctgcccacccacttggtggaaaggccaaagtccccccgcaaaatgttcgccagataattcaaaaattgcactggcaccggcttatcaaagccgtattttgcttccaaggcggcaatcgtctcgtcagaaagggccttttcggcattgaacgggcttgccggtatggcatgcatcacaaaaaacgtgatggcaatcaccaggaacatggtgagcactgccatgccaaggcgcttgaaaatgtacagcaggaatttggtgttcatcgcgtcgcatcccttcagttcatgaatcagccggttctatcgcagtgcgagcagatcccggcaacaccattgggaaaaacaaacatttgaattgattatttattataccttgttatagttcctgtgtcaatacttttttgcaagtttcggatgttaaatattcacgcgtcggattaacattccaaatcctcccccgctccgcggcgcatgcgaaaaaaaatcaatgaaaacgtcgcattttccctatcgacaaatcgcttctttgtgatataatggacgtagcatagtttgggagggtcttgatggagcagtttaagctgatggacaattttaaggaagagattgtcgtaaaacgcaaccggacgctagatcaaatcctgtatggtttttgctggatttccattgtggtgttcggcctgatcgcgctcacttcgttctatggcatcattggcgccacggggttcaattgggtttcgctcgtgatcgcggtggtctttggcgctttggcctttttgctgtggcgcaacaaagacaagctgcgtacggaatatgaatattcctttaccaatggcgatttggacatttccatggtgctggggaattcccgccgtcgctatttgacacgcttgccgctcaaaagcgtggaagcctgcgggttggtaaccgaccccagcttcaaccgctacgtttccatgcgcgatgtgaagaagcacaattggtttttgaaccgcgacgcgaagttgtattacttctatttcaccaaaaactcggtgaaacatctcatcgtgatcgagcccagcgatgaaatggtggaaatgattcgcagccgcaactacctcaattacggcgtctggcaaggctaacgaaaatgatttcttacttggacaatagcgccaccacccgtccggcggacgcggtggttgaagccatggcgcaatgcatgcgggagggatacttcaatccctcctcgctatatgctcccgcggtgcaggcggaaaagcgcctggcggcatgccgcgaagccattctctcgtcgctgcaggcgagggaacatttttgcctcttcacttctggcggcacggaagcgaacaatctcgccatcctgggcagcgtcgccgccatgcggggcgcgcctcccttggccgtgggcacgacggagcacccttctgtgctcgcgcctttcgagcatttgcaaagcttgggatatccagtgcaacgcatccccgttacgccggaaggcgaagtgaattacgcgcaattccatcttgcagaggacaccgcgctggtgagctttatgcaagtgaacaacgaaacgggcgcgctgctgaatgtggaacgcttcgccgcggctgtgcgcgccatggcgccaagcgcactgattcacatcgatggcgtgcagggctatttgcgcgttccgctttccctgaagaacgtggatatgtatacgctcagcggtcataagctgcatggccccaaaggaattggcgcgctggtggtgcgcaagggcgtacgattgctaccccgccagatgggtggcgggcaggagcgcgatttgcgctctggcacagagaatacgcccggcatcgccgggctgcacgccgccatagaggccatgcgccaggcggacctatctgccctgcgcaaaaaaaaggacgcgctgtacgaagccattctcgccgccgtaccagaggctttgcgcaacggccctgctctgggcgcgccgcacatcctcaacatgagctttcccggcgtgcgcggggaagtgctgctgcacgcattggaagaaaagggcgtgtatgtttccaccggttcggcctgctcttccaaaaagcgcaaggtcagcgccgtgctcaccgccatggcgatggagccagaccgcgcggaaagtgcgctgcgctttagcctgtcgccttacacgaccatggacgaaattgcatacgccgcgcaagccctgggggaactttaccccgttttgcgccgcttcaggaggaaataggcatgcgaaaggttctgctcgttcgctttggcgaagtatatctcaaggggctcaaccgcccctattttttgaaacggcttacggacaacatccgccacgccgtgcagcccatcggcgggcacgtgtggctgagcgattcgcgcatttatgtgagcaacgccgaagatctggaggaatgcgcccgccgcgtatgccgggtgttcggcgtgcattcggtgagctacgcctatgaactggacaaaaactgggaagaaatcgtttccgcctgcgtagaggccatgaaaccgctctccggcacttttaaggtgctcgcgcgccgctcggataagactttccccatggattccatgaccatggcgggcgagctgggctatgaagtgctcaagagcaatcccaacctgtccgtggatgtgcaccatcctgcgcacaagctgaatgtagaaatccgcgattttgcctacgtctctgtgggagaaattcccgcggtgggcggcatgccgctgggcacaggcggccgagcggcgcttttgctctccggcggcatcgacagcccggtggcagggtatcatctgatgcggcgcggcgtggtcgtggaagccatccacttccaaagtccgccctacaccagcgaacgcgccaaggaaaaggtgctcgcgttggcgaaaatcctgggcgaatacggcggcggcatgcgcgtgcatctggtgccctttacgaaaatccagatggaaattcacgaaaaatgccccgacggtctgggcacggtgctgatgcgccggtatatgatgcgcattgccgaaaaaatcgcccgcaaaaaccacgcgcaggcgttggtcacgggtgaaagcctgggacaggttgccagccagacgatggaagccattggttgcacggacgccgtggtgcatatgcccgtgttccgccccctgatcgggttggacaagctggaaatcaccgagcaggccgtgcgcatcggctcgtatgaaacatccatcctcccctatgaggattgctgcacggtgttcaccccgcgccacccgaacacgcgcccccgcccagatatgctggaagaggccgagcaggcactggataccgaagcgctggtgcgcgaagccgtggatgcgacggaagtaataaaagtttaatcttgaaaaaagcgccgcgcgaagggaggccggcaagtgaatcttgagcaatacatcgaatcgttaaagcgaaaccccgcgttcatgcaatgcgtcacctgctggcgcaccttgcccgagcgcccggcgcgctacgcggattttccggaagggctggatccacgcatccgcgccgcgctgggcaagcgcggcatcgcgcggctgtacacccaccagcggcacgccatcgaaagcgccatggctgggcgggacatcgtggtggtaacgcccacggcttcgggcaaaaccatgtgctacaacctgcccgtgctcaacgccattctcaaggatgaatccacccgcgcgctctatctcttccccaccaaggcgctctccagcgaccaggtggcggagttgtattcgctgattgaggaaatgggcgtggacgtgaaggcctatacctacgatggagacacgcccgcggcggcgcgcaccgccgtgcgcctggccgggcatgtggtggtgaccaatcccgatatgctgcaccagggcattttgcccaaccatacgcattgggtgaagctctttgaaaacctcaaattcgtcgtcatcgatgaaatccattcctaccgggggatttttggctccaacctggccaatttgctgcgccgtctgaagcgcatctgcgcgttttacggcgcaaatcccacgttcatctgctgctccgcgaccatcgccaacccgaaggaactggcggaaaccatgctggagcggcccgtggagctggtagacgataatggcgcgccttcgggcaaaaagcatgtgattttctataaccctccggtgatcaaccggcaattgggcatccgcgcgggttccattcccgaaacccggcgcattgccgaaggcttgctgaaaaacgacattcagaccatcatcttcgcgcgatcccggctcacggtggaagtgatggtcaaatacctgaaggaaatcacgcgcgatcccctcggcgcggcggggcgcgtgcgcggctaccgcggcggctatctgcccacgcagcggcgcgaaattgagcgcgcgctgcgcgcgggcgaaatcaccgtcgtggcggcgaccaacgcattggaattgggcatcgacatcggccagttgcaagcctgccttctgtgcggctatcccggtacgatcgccagcacctggcaacaggccgggcgcgcgggccggcgcaatggcgaatcgctgatgatcatggtcgcaacgtcttcccccctcgaccaatacatcatttcgcacccggactattttttcggccagagcagcgaaaaggcgttgatcaaccccaacaacctgtacatcctgctcaaccacatgaaatgcgcggcctatgagctgccctttgaaaagggcgaaacctttggcgcggtcgaatccacgggcgaaatcctcgcctatctcgccgaccagtacatcctgcgcgaggtcaacggccgctactactggatggccgaggagttcccccaggcgggcatcaacctgcgctcagccagcgaccagaacttcgtcatcatcgacattacgaatccgcaaaatcaccgcgtgatcggcgaaatggatcgcttcaccgtgcccatgctgctgcacaaatttgccatctacatgcacgagggccgtcagtaccaggtggaagagttggatttcgacgacaaaaaggcctatgtccgccatgtggacgtggattactacaccgacgcgaacctttccaccagcctgaaagtgctggacgagtttgagtcccgccccagcggcaaactaacccgcgcgcgcggcgaggtgttgctcagttccatcgtgacgctgttcaaaaagatcaaattcgacacgcacgaaaacctcggctgggggccggttacgctgccggaactggaaatgcagacctccgcctgctggtggagcttgccggaaacgccatccatcccctgctcgcaggaagaattgcaaacggcgctggtgggccttgcgaacctgatccgcaacatcgcgccgctatacctcatgtgcgcgccgcaggatctctccgtgcattatcacgtgaaagatccctataccaaccggccgacgatttacgcctgcgaccacattcccggcggcgtcggcctgtcagacaacctgtatgagctagaccgcgaaatctttgcgcaagccctgcagctgctggaggaatgcccctgcgaattcggctgccccagctgtgtgggcgcgggcgccgagggcggcaaacagcgcctaatcgccctgttgcgcgactggttggcgtaaacccctattcttctttcggatcttcttcgcgcccgagctcttgcagccgggcgtttacttttgccgcttcccggcgcgcggcgagataaaagcccagccagatgacgataaatatggcgattgccagcaggatagaagcagcgatgtatcccgtcccttctgtgggaatccattttaagcggaacgctaccaagaaatatcccgtgagccccacggcaaagtgaatgccaatcttcagccaggacggcaagcggtcaaaagtgtacacaatcgccgtgctcgcgcagcagatgcctacaaccactcctcccatcgcctgcgcgacaaaatcgtgcgttacgggttccaaaaatgcttctccggaaaccagcacgccggcaacgcccgtaaaaacaaagcagatgcatccccaggcaatgccaaaaaacagatagcgaaaaatcctgcgcgccatatttacacccccaaccgcgccttgaattcttgccggtaactgcgcgtgatcacttctttcacgccgtttttcatcaccacttccatcgtgccattaaaggacggctccacatggtgcacgctgcgcaagcgaatcagcgcggatttggaaatgcgcacaaattcccttcccaaccattcctgaagctcgtaaagcggctttgaaacggtatatcgctctccctttacgtcgtatagcgccaactcacgcccttccgtacgcaaaatttccacctgtctggggtcgagcacaaaatgccttccctctttctgccccgtcagccacgcgcgctctccctcccgctccaatagttcaatggctgcctgcagggcgggcgtgatcctttgcgcgcaaatccgcgcgtgcggctcggcgaggttcccatcgatgtgcagctctacgcgcatctccggcactcccttctttgtgcgttctccatcagtatagcgcctgcgcgtaaatttcgcgagcagtcgcgctgcgctttgcgcgcgcatacggcatcttgcgcgcccaaaagcgcaagatagccgctatggattgcaatcgcccaagaaagccgtaaaatggatggcagagaatgcaaaagaggtgcggcttatggcaaacgctctggcgcaggtggaacacctgcaattgcgctatggcgagcgatacgcggtgcgcgacgtatcgttcgacctgtgcgaaggggaaattctcgccatcatcggccccaatggatcgggcaaaacttccaccgtggagtgcctagaaggcctgcgaaagcctactagcggacgcattgcctttctgggccgcaatccccgggagaaccggcgcgcgctatacgcgcaagtgggcgtgcaattgcaggaaacgcagtatcccgacgccatccgcgtgcgggaattgtgccgcctttttgccgcgctatacgcctatccggcggacgaaaaagagctgctgcggcgctttggcctggcgaaaaaggcccggcaaatggtaaagaccctctctggcggggaaaagcagcgcctgtcgctggtcttggcgttgctgccccatccgcgcgtattgattctggacgagtggacggcaggcctggatcccgaagtgcggcatgccatgtgggacgcgcttttgcgcattcgcgcagcagggactaccatcctgctcgtttcccactttatggacgaagtcgcctatcttgccgaccgcctgctctacctctgtgacggcagaagtgaattttgcggcacgcaggaagcgttcgtcgcccattgcaagcagcgcgcgcccgcgggcgcttggcgggacggcgcttccttggaagaagcgtttctctccatcgcgccgcgacaagagattgtacattgggagactaactattaaaaatcaagggggaaagagcgatgctcaagaagtttttc

SEQ ID NO: 1513 - DNA, 32759 bp, Unknown
  16S sequences of unknown bacteria
gggcatcgccactttccaattcttgaccgagttgtgagttctctcacaactcggtcttttcttatctttcaccgataaacctgcccttcctttccgacactcccacaccccacccgccttttcttcctccttcctcttttctcccttcatccctcactgccttcctcccttttcgacgggagtgactcttttttctttttccccttgcaataaattatctgttatatataaattttggaaaaattttccattaaatgcttgcaaacgtatatataatatggtaaaatgttaataaatagatatattaatatttatatcgatataggccgatagaaatattaaaaaatggcgagggagaacaaaagatgaaggcgggaaataaaaagagatgttttgtaattttgttggttggtatttttttggtcatcttggcttggggaatatattcgcggggaaaaaaagaggattattctttcaaagataattatagaaacgatcttgcttttcaggaatggaacggagaagaggtagggacctctgtccgtctgctttctgggcagtatcccgcagccgaggaaacgataagtccggaagagttttccatgcgtgcgggtgcaagtgtgcgattgaatacggtaacgggactccgattcagggcggatgtttccgtcgatttggcggagcgggttgcggcgacggattcggcttctttcggtattgtcattgcgcccgaattttactttgaaaaagcgattgaactttcgggctctgagaatgtggattatgttcgtgccttggaagcgttggaagaaaaatacggggcaaaaccagctttggttatggagtgtgaacctgtaaaggaagaagactattgcttcatttaaggctctgtggcaaacattttgtacgaaaatacaaatttggaatttacggcggccgctttcatagaggaacaatcggaaaacggagaaataacttatacgtacgcttcttacgaagaagatgttctttcaatgggacgttcggtgttttatgtttccgaagcggcgctcaatgatgcgaatgccaattattccgacgaagaaaaggaaattttacggggatttatcggccgtgggatagaccatgcggcggggctttccgaagacgaatcggattcggtttcggaaagagagcttgaaattcggtggttaaaaaagccggaaacgacattgaacataggggaaacgttttctttggacgtagaaacggccgttcgctacggcgaggagacaggggcgggatactggttgagcatcgatgttcccgtgtattggaagtcggataattcgtctgtaattgccgtttcacgagacgggaaagttacggctttacaggaaggcgaagcaaagattatgatttgtttcggtgcaattacggatttctgcgaggtcgtttgcgccgcgttgcccgaatatacctgtgaacttgtcgacactactccgtatggcgtattggagatagaaaaccccgtatcgaacgtgcgggaaggaatgccgtttgaaacaaaaatccgcgtaaaggattatgaacgatgcggagaactttccttttggatagacggggagatttatactacggcaaacggagaaattacattttcttcgacggtatcggaagatactgtttttgaaattaaagacgtatcttcttccctggattatttttcgggatacggtgcaaatttatcgcttgattctacggcaaaaaatttggaaaaaataatacttccgacgaaaacaggtgacggaaaagcggttacgggattatcggacagattttttaatggggctgcgggaacagtcttacaaaagaatttacaagaaataataattcccgaaagctacgaaaaattaccgcagacgattttcaggaattgttcgaatctggaaacgatttatttatataatacaaacttgtcgaatatgtcgggaacttcacaaaattggtcggggtgtaccgccttacagaatatttatgtgcctgcggaggctttggaagaatataaagcaagtgatttttggaaggtcaaaacaggttgtttgaaagaaattccgaacgaaaaagagaaatgaataaattttttgcgaattttcattgaataatgattgacattttccccgaaaatacagtaaaatagtaataagtattttttaaggagatatattgtggacgcagacggcagtagtaggccctattcgctttttactttcgttttgatttcatttgaattaccgatttgagcataacttgtacactgtcagtgtacgggttatgcctttttgtatttcagagctttttaggagattaaaacggagttaatttatgattggagcagttattctacaaatagtacttatatttctcaatgcgattttcgcgagtgcggaaattgcggtaatttctacaaatgaaacgaaattgcaaaagatgtcggaaaagggggatcgacgggcaaagcgtcttgtaaagttgacatctcagcccgcgcgctttttgtctaccatacaggttgcaatcacgttagccggtttcttgggcagtgcgtttgcggcggataatttcgcggaaccgttggtggaagcattggtcggagcgggggtacccgttccccgcagcgttctcaattccgtatgcgtaatattgattacgttgattttatcgtatttcagtatcgttttcggggaattggttcccaagcgtatcgccatgaaacgagcggaaaatttatccttaaaactttcgggcattttacggttcgtatctattatcttcgcgcctatcgtgtggcttcttacggtttccacgaacggccttttgaaattgatgggaattaatccggtagaggacggcgaggaagtaacggaagaagaaattatgatgatggcggaagccggcagtgaaaagggctcgatagacagcgaagaaaacgaattcatcaaaaacgtgtttgagttcaaggaacagacggtcggagagatatgcacgcaccgaaaggatacagaccttttgtttttggacgaaagcgacgaggtatggaaagaacgaatccaatcgacacgtcacacctattatcccatttgcggcaaggatatcgacgatattgcgggggttctttccaccaaggattatttccgcctgaacgatcaatcgcggggaaacgtcatgaagcacgcggtttcccccgccgtgttcgtcacggaaaacacgcccgcaaacacgctgttttataagatgaagattactcgcgaatatttcgcggtagtcgtggacgaatacggcggaatgagcggtatcgtgaccatgcacgaccttttggagcttctcgtgggcgaacttacggaaaaagacgataaagcggaatacgaaattacccgtctcagcgaaaacgagtgggagattaccggtcttgcgcctatcgataaggtagaagaagctttgggaatcaaattccccgaggaggaaagcgagcattttgagactttcgggggatacgtttgcggtatgatgggaactttgcccgaagacggttctacctttgaactgagtaccgatttcatgaatatccgcgttctgtccgtacaggagcgctgtatcaaaaaagtagtcgtcacgctgcccgaaaagaaagcggaagaagaaaaagaaaaggaaaaggaaaaagaataacaaagaaatcgattctgcccggacgaaaaaagtccgggctttccatattgtgtgaaagcggcggatatgcttgacaaaacgggaaaaatcgttataatgatagaaaaacgtttcggaggaaaaaaatgataaaactttttcccgtactcaaagattatctgtggggcggatataaattgaagggacttttcggtcgggataacggcggaaagaaaatcagcgagagctgggaagtctccgttcatcccgacggtccgagccgctgtaaagacggcagactttttcccgaatacatcgcggaaaattccgttgccgtggataagaaaggttctgcttttcccgtgctcatcaaatatatcgacgctgcgcagaacctgtccgttcaggttcatcccgacgacgaatatgcacggcgggtggagaacgataacggaaagacggagatgtggtatatcttgcaggcggacgaaggagctggaatttattgcgggttttcgagaaatacttcccgcgaggaatttttggataaagtcaaggacggaaccgtagaggaacttttgaactttattcccgtaaaagcgggcgactgtttcctcatcaaggcgggcaccgtacacgccatcggtgcgggctgcgtcatttgcgaagttcagcagagcagtaacgtgacttatcgcgtatacgattataaccgccgcggagcggacggaaaactcagacccttacatatcgacaaagcggtagacgtcatccatttcgatgcctttcgcgacgagacggcgagcgggcagcccgaaccctttgagggaggtacactgcgccttttgacacaatgtaaatatttccgttgcagggagcttcttttggacggagaatttttcgaaaagaacgagacttcttttacagcggtaaatgtattgagcggcgaaggaaaaattgacggcgaaaccttctcggcgggagacagtttctttattccctgcggggaagtctattccctgacgggaaaagcaaaaattattttgacggcggaaaacgaggggggacaggtatgaattattacgcaggaatcgatttaggcggaactttcgtcaaatgtggaattgtggacgaagagggcaatattctctgtaaagataaaattcccacgggaaaagatcgtccctatcctgcgatagcggccgatatggcggatctggttcttcggcttgcggacagggtcggcatcagccgcgcggaattgaaagcaatcggaatcggggcacctggaacgatagacagtcagaacggcgtgatcgtttacagcaacaatatcagctggaaaaacgttcccctgtgcagggaacttcgcgagacgctcagtctgcccgtctatatcacgaacgacgccaacgcggcggcgctcggcgagaatttctgcggagcggggaagaaatactcgtccatgattttggtgactttgggaacgggagtcggtggtggaatcgtgatcgacggaaaattatttgaaggaaatcgttcggccggcgcggaaatcggccatgaagtcattcgcgtaggcggcgcgaaatgtacgtgcggccgccgcggttgttttgaggcttacgcttcggcgacggcgctgatttcccaaaccaagcgcatgatggaaagacatccggacagtgcgctgtggagtgtggcaggtactttggaaaacgtggacggaaagacggcgttcgacgccatgcgcgcgggggataaacacgcgaaaagagtcgtttccgaatatatccgctatctggcggagggaattacgaatctggcgaatgtgttccgtccggaagctgttttgctgggcggcggagtgtgcgccgagggggacgcacttttgaagcccttaaaacgcagagtgaagcggttactgttcggcggaagcgattatgcccctgtcgaaatctgtgtagcgggactgaaaaacgacgcgggaatatgcggagccgctcgtctggcgatgctgaaaagacagtaaaagcataggcagatatgcgatgaaataatatcaatgaaaaaatacggcacagcaatacgctgtgccgtattcgttgccggcaatcggccgattttatccgcgagccgtttctattcggcgaatttagccgaatagaggggcggttcggattttttggctcagttgcagccgcacccgcatccgcacgaaggggtgaggatcgcggaaagcgttccgttcttatacaggcaatagaggagcgcgagaatgatgggcagaccgcagccgctcaaaataccgtcactgaaacatccgtctttcgagcctaaaacgagcaacgcaatgagaatccaaagggtggtgttaccctgtgtgcagcaattcataaaataaaaacctcctgtgttttcaccgcaggggatatgtaaaatcgactccgaaagagagaaatggcctgcggttttatctttctattacatagtattacggacaggggaaaaaatgttccgattttcttcttttattttgttgccagaaaagaaaaaatgcggtataataataaagatatttttccgcgggcggatacgcctcgattttgcggtctgactcacgttgcgggaaagtatacatatttttttatcgtcacgggtatctttcggtcgtggaagaactcgatggaggcatttttatgaaaagcaaccgtttctttacggcgaggacgatagcgtatcttgctgttttgattgcactcgtcgtcgttttgcaactgtttgcaagcgcgatccctatgttcggcatcacgctgaatttcagccttattcccatcgtgcttgcggggatctttttcggggcatacggtggcggattggtcggattggtttcgggactcgtcacctttatcacgacggcggtcatggggcgggaaccgtccaccgcgtttctgtttcaggcaagtcccgtcattttaacgatcgtatgtatcggaaaaacgacgctcgcgggagtcgtcgccggaatattgtatcgggtgatcgggaaaaagaacgaactgattgcttcttatgtcgccgcgctcactgttgcggtcgtgaatacggggatctatctgctgggtatggtgattatgaaaaacgacgtcgcttcgtttttgggcacggaagcaaccgcgggcgttgtattcgtgacggtattcggtctgatctggctgaactttgttttggaaatcgtcgtcaatctgttgatagcacccgctttgtatcgcatcgtatcggtgatagaaaaaacggcgggaaggaaaaacggaaaaactgcttaaaaccgaaaaaggagaaaatcgtctgagaagggcgcgtttgcccgaaggcagcgtatcgaataaaatgattatctgtatcgatataggcaataccaacatcaaatatgcgatttacgagggcgagacgctgtgtatttctttccgcgtcgccaccgatttgaaaaaaacttcggatgaatacggctcgcagctcgtgaatatgttaaaggtgagggaaattaagcgcgacggaattacgggcgggattatctcgtcggtcgtaccatccctcgattatacgatcgagcgcatgtgtcatctctatctcggaatagagcctttgcgcatcgagcccggcctgaaatccggactgaatatccgctgcgacgacgcgcgagaagtgggggcggatcgtatcgtcaactgcgtttccgccattgtaaaatacggggaggaaaagccgatgatcgtcatcgatttcggtacggccaccacgtttaacatcatcaacgaaaacaacgaatttataggcggggtcattgcccccggaatcaaaggctctctcgattccctcgtcaacggtacggcgaaactgccgcgcgtggagatagaagctccgaagagcattatcgccaaaaatacgattacgaacatgcaggcggggattgtgttcggttttgcgggattggtagaatatatcgttacccgaatcaaaaaggagctaaaagcgccgtttacgaagacgatcgcgacgggcgggttcagtcaggtcatttccaaagaggtttcctgcatcgatgtggtagataaacttcttacgttggagggattgaaatatctctattatctcaatcgcccggaagaaggcggacaagcacccgtcaaggcataaaaattacgtgatcagctaaaataatattgacatcaaacattccaaaggaggcaagactatgatgaaaagagtgggcgtagcgatattggggctcggcgtggtcggaggtggaacgtataaaattctcaccgagcacagagaattttaccaaaagacgcagaacgtggatatagaagtggaaaacgtactcgtgcggaatcgggagaaggcgctcgctatgggcgttccggaggaatgtatagcaggaagtatcgcggaagtcatcgcgaatcccgccgtagatatcgtcatagaatgtatcggcggcgtggaggcggcaaaggactatgttcttgcggctctgcacgagggaaagagcgtcgtcacgtccaataaggagctcatctgcaaatattcccacgaattggaacgtacggctcggagaaattgctgcgggctttatttcgaagccagctgtgtgggcggagttccgattatccgtaccctgctcgacggcgtgcaggcgaattgtatttccgaaatgatgggaattatcaacggcaccaccaattatatcctgacgaagatggcggaggagaacgaggattatgccgccgctttgaaagaggcgcagaagctcggttacgccgaagccgaccccacgaacgacgtggagggttttgacgcgatgtataagctgtcgatactttcttccctcgctttccacaccaaagtaccttatacaaaggttttccgcgagggaatttcctctgtggataaaacggacatcgctttcggaaaacagctgggctatacgctgaaacttctcgcgatcggcaaaaatacgtccaagggcattgaagtgcgcgtacaccccacatttattaaaaattctcatcccctcgccagcgtacacgacagttttaacgcggtattcctcaaaggcgacgccatggacgacattatgctgtacggccggggcgcgggggcgcttcccacgggcagttcggtagtcagcgacgtcatttatgcagcgacccattcggacatcaaatattctactttcaagaataccgcggcggcggataaggacacgaagttcgtatccgatttcagcagcgcttattatctgcgcctgtcggcggcggataaggcgggcgtactcgcaaaagtttcgggaattctggcaagatacggcatttccatcgtcgaactcgtacagaaaggtacgtcggaacttgaagcggggacggaggaagaacaggtctccccggtcgcgtcggaggacgaggattcggcttgcggaacggaatcggaaggagaacgggttccgctcattctcatcacgcacgttacgacggaaaatgccattcgcggtgcggcggcgaaaatcgacgcttccggcatggccaaagtcgaagcgatcattcgggtagaatcttaaaaggaaaagggaaaagcgaggggaatacccctcgctttttaaacggaagaaaagatgaaaggtttaatcgttatgaacgcctatcccaacggcgaaaagttttatcgtcagagccgccgcatcgcggaggaattcaaagggataggaatagaggccgagatccgtcgaacgagcgagatagacgctgcgatccgcttcgacggaagggcggaagtgagcggcggttttgattttgcggtatatctcgataaagataaatatctgggacgaatcctcgaaaaaacgggcatgcggctcttcaattcttcggaagcggtagagcgctgcgacgataaaatgctgacataccttgcgctttccgattccggaatcgagattcccgaatcggtttcggcgccgctctgttatactccgagcgtacatccggacgaatcatttctctcgcgcacggccgcgagattgggatttccgctcgtcgcaaaaaaaagtttcgggtccttcggaaaagacgtgcgcctgatacggaccatggacgagctgcggacgacggaaaaagattttctatattgtccgcatttttatcaaagatacctcgcggagtcggcaggtcgcgatattcgcgtcatcgtcatcggcggtcgggcggtcgccgcgatggaacggcgggctcaaaaaggggaattccgctcgaatatcgaattgggcggtcacggagtttgcgtcggactcacggaatctttccgccttgcggcggaaaaagcggctgaagcgttgcaattggactactgcggcgtcgatttgttggaggcggggtccaaacctgtgctttgcgaggtcaattccaatgcgtttttcgagggcatggaagcggcgacgggaatgaatattgcccgattgtatgcggaacatatttttcggactgtgaacggataataaaaacttccccgcgttgcggcgaggaagcgagccctgtaaaggggcttctgttatgattttttatcgttgttctttgtttcgtcgggtttgttttccttgacggtatagctgtaatcgatgtcggggttcccttttaagagagcgcgcacaaaatcttcgttccaggaagactgtacggagatgacggaataggcctcgcccatatatacggtcagcttattcgtgtctgtatccaatactacggaagtgatatccttcaaagcgcacttgcttttgatgattccgaactgcgtagagaaatatttatcgtcgacgatatactgcgatttgataaggagcgaaacgacgatgaccagtcccgcggcgctgacgagaatgagaaagggatatttcagccaatcgttaaagacgtggagccctgcattttcaaaaatccgccagacggaaatcgcgatggccgcaatgcagagaacgatggctccggcgcaggcggcgagaatcgttttagaaaatcgaaaacgaaaatatttcggttgttgagaagcgcttttctttttcatggctctattataacacacgaaaaaggaaaaatcaaataaaatttgttcgcgtctgtattttatcgttcggtcgggcgggtattttgtccgtttccgtcttgcggtatttcgtttttccgtccgggacaacggggcggacgtttattttctccgggagcaaagtccgaattcccttttttgcgatgggatttttgttcgttgaaatccgtttcgccgggacagtcctttgctctcggacattcgttttcattcggataggttcgagaccggtcgtcggaagttcgtcctccgcggtcgcgtcccttttccggttgataggagtcgggccgtctgccgtgcgggcgacggggagagggcatttcttcgccgttgttcggtttcgcggggcgtgcgggtgtgacggggcgcggatgaacgggttttccttcttcggggccttccgtatgcccgggaaattcaggaaattcggggagaagaggcagaggttcgcctggaaagcggccgtgggaatcctcggaagattccgtcggcatttcgcggcgggtaggctcgccattgctgggctttgtcgatcccggagtcgagcaggaagccataatcggtaaagagaaacaaatcgttgccgcgcacagcgcggtcaaaatacggtgaatctttttcatatcgacagtttgcgtcggaacggggaaaattatgcttttttcccgtgggtatccggttgcgtttttgaaaaaaagtttgtataataatactatggaacattcagataacacggaagaactacgcacggcggaagaagtgcggcaacgaaaacaatttgcaaaaatgactgagacacccgttccgaaattggtggtcacgctcggtattcccaccatgctgaacatgatggtttcctcgttttacaatcttgcggatacctatttcgtatcggggttgggggaaaacgccacgggtgcggtcaacgtcgtcttatcgctgatggcgctgattcaagcaatcggttttacgttcggtatgggcggaggcagtatcatttctcggcttttgggcaagcgcgcccaaaaagaagcggatgaggtttcctcttcggcattttttgccgctgccgttgcgggaacgttgattcttgtatttggattgatatttttgacgcctttgatgcgtttgctgggctctaccgaatccattctgccaaatgccaaagaatattcccgctatatcctgattgccgctccgttcatgtgcatgtcctttgtcatgaataaccttttgcgctctcaggggaaagcgtttttgtccatgataggattggtgaccggtgcggttatcaatgtcgctcttgacccgcttctcatctttgggttcaatatgggcgttacgggtgcggcggtcgctacctttctgagccagatgatcagcttcttcattctgctctttatgttcctttccaaacggagcattacgagacttcgcatttcttctatttcccgcaaagcctcggtctattgggaaattgtcgtgacgggcttcccgtccttctgccgtcagattttatctagcttatgcacggttcttctcaattgggccgtcaagccctatggcgacggagcttttgccgcgatgggcgtcgttcaaaaagtattcatgtttgcgttttccatagcgctcggcatagggcaggggtatcagccggttctcggatacaattacagcgcaaaacgctttgaccgcgtctataaggcatatctgtttactttggtgttttctaccgctttgatgactctctttgccgtaatctgcgccgtctccgcgccctttatcatgcgtggctttctcgaagcggaagaatcgatggagataggcacactcgctttgcgactgcaatgtatctgcatgcctcttctgcctctcaatttcatggcggggctcacgtatcaggtcgtgggaaataaggcgctcgcttcgcttttgtcctgttcgcgccaaggattattttatattcccgccgtgcttgttcttccccgtgcgtttgatttattcggcgtacagtgttcgcaatccgtttccgatttactcgcttttttatttgccgttcccttcactgtaatgtttttcaaaaaacttcggattttacaaaagacagagggcattcgtccggcttcggaatttccgccctcggaagaaaaataaatggaagaactctcccgaatttgggagagattctttttacggaaaatcagagcgtttgagaaaaataaaaacgggttataaaaaagtatcggcagataaaatttttcacaaactgccattaagacgatctcggaggtatagaaatgattacaatccataaagataattttgaaagcgaagttctcggttctgccgttcccgtcgtggcggatttctgggctccttggtgcggctattgccgcaggctggctcccgttattgaaaggctcgaaaaggaatacggagatagggttaaattcgtaaaaatcgatacggacgataatgcgtctctcgctgacgaatacagtgtggataccattcctaccttgattgtattccgcggcggtgaggcgctcggaaccattgtgaatcctgcttctcaggcaaccgtcgtggattggttgaaagaaaaagaaattctttgacggagcaaaaggcatggacgagagaagatacgacgttgtcataatcggcggcggccccgcagggtatacagctgctctgtattgcgcgcggaacggttattccgtcgcggtagtggaaaaactttccgcgggcgggcagatggcttcaaccgaccgaatcgataactatcccggctttgaggagggcatagacggttttgagctgggcgaacgcatgcggcgcggcgcagaacgcttcggggcgattactctgttcgaggaagttacgaatgtttccctttcgggagaaaacaagacgatttttacgaatgcaggggagatttccgcccgtgccgtcgtcttggcaacgggtgcggaaccccgcgaattggggctgaaagacgaaaaagaattgatcgggcgtggcgtggcatactgtgcgacgtgcgacggaatgcgctataaaggaaagacggtcgtcgttacgggtggcggaaacagcgcggtggccgatgctttatatcttgcgaagatctgcaagaaagtgtatcttgtgcatcggcgggacagtctgcgagcttcgaaagtgtataccgcgccgctgtccgaaagcggcgtagaaattttatggaacagccgcatagaagagatattgcacgataaaagagtgacgggcgtgcgtattgccgacgtccgttcgggagaggaaactatcctcgattgcgatgcgttgtttattgcagtcgggcggaaacccgaaacggaaattttcaaaaatagtttggagctcgattccgcgggatatatcatcgcagacgaaagcactaaaacctcacttccgggcgtatttgcggtcggagatgtacggacgaaggcggtgcgacaaatcgtaactgcgacggcggatggcgccgttgcggcacattttatagaagaatatctcctctgagaaaaattgtgggaaacatggacatagtatacaggccgattgaattttccgaaacggagatcggattgttttcctcctttgagcgaaagcagaacgttacagattgttggcgtaaaatagagggaaaatggaggattgtcaatgctccttttaccgacgattggaacgaaaacgattatatagttttgacggagagcctaaaaaatacagtaaaggcgggcgggttggtttacggcgcttttgttgacggcaggctaaaaggtttcgtttcggttgacggcgcgccgttcgggaaggaaaggcagtacgcggatcttatgtacctctatgtttcgcgggatatgcgggggaggggaatcggccgcaggctgttcgagacggcgaaagagtatgcccgaaaaatcggtactgaaaagttgtatatttcggcgcattcggcggtcgaaacacaagcgttttataaagctgtggggtgcgtcgaagcgtcggaatatcagaaaaaacacgttgaaaaagagccgtttgactgtcagctcgaatgtgctttgaacgatggagcggctttatccgtaaacaaaaagcgcggaaatttttgaagatttccgcgcttttcgtttgaatcaatcaagaaatcatacttgttgttctatcggcgtatttccgagccctgaatcctcttttttataagtgagcttcaaaaacagaggagccaaaatggaggtcgcgataatgatgataaatacgaaaggatatacggcaggatctaccaaaccgccgtctattcccttttgcgtgcaaatcagaacgacttccgcgcgcaccatcatgccgatgccgacgcgcagactgtccttgcccgaataacggcaaagccttgccgccaatgcacaacctcccagctttccgacgagtgcggccacgacgtaacaggctccgaacaggacgaaagaggaggaaaagcccgaaaaatcgagattcatgccgattgtcgcgaagaaaataggggaaaagaacatgtatccgagcatatccgctttattttccacatacggggtttcctgcaaggttcctcccagcataatgcccgcgacgtaagcgcccgtgatgtccgcgacgccgaagattttttctgcgacgtaagcatagatgaagcaggctgcaagtgcgagtataggtacgcgacggttatgagggtatttgcgttctattctgttgaacagcttcctcaacaggattcccgcaccaatggcgataatgaaaaatacgacgattttaacacagacgagccaccaagccgcattttcccaccaggcgggcaggaatgagacgagggattcttccccgcctgcatcggaggtaaagcccgtgagcacggaaagaatgacgatgccgatgatatcgtcgatgacggcggcggcgacgatagaggtccctattttggtattgagttttccgagttctttcaatgccgccacggtgacgctgacggacgttgccgtcagaatagctccgtaaaagaggtaccccaaaaatcctccgccttgattgaaggcccaagctaccaatgttccgagagccataggcacgatgacgccgaaggccgtaatgaccacggaagctgctcccgacgatttaagttgcttcagatcggtaccgagtcctgtggagaacatgatgaggacgactccgaccttagagaatacgctgagttcttcttttataggatcggagaagaacatattttgcagcggttcacaggggatatatttcaaaagcccgatcaagagccctgcaatcagcatgccgataacggccggaagcccgattttttgagaaccgagtccgagaagttttgtcataataaaaatgaccgcaaggggcaaaagaatttcaaagggggacataaaaactcctttaagcttatccagaaatgtaaaaacgatcgaggcggaagagaggagataaaatttcactttcttttcacttttgtttcgatcggttaccattatacacccaacgcctttgaaaagcaaatgtttccatatacaaaacaggcgaaaaaaagaggaaatttaagagaaatcaagaaaagtttttgatatagtattgacaattttgaaaaatgtgatataataaaaggcggtgctcaaaatatgaaacagagggcatcggtgaaagataaacaaggagatgttgaggatgtatcgtatagtcaaaaagcaagcgctgaacccgacggttaccttaatggtaatcgacgctccgttcgtcgcgagaaaagctcttcccggacagttcatcattctgcgtgtggacgaagacggagaacgtattccccttacggtagcggattatgaccgcgagaaaggtactgtgaccattattttccaaattgtgggcgctacgacggaaaagctcaatcataaagaagaaggcgattttttggccgattttgtcggtcccctgggccgtcccaccgagacggaaggactcaaaaaagtctgcgtagtcggtggcggcgtcggctgcgccatcgcgctgcccgtagcgaaagagctcgccgctcagggatgtgaagtcacatctatcatcggcttccgcagtaaagatctcgtcattttggaggacgaattcaaggccgcaagcaagaaattttacatgatgacggacgacggctcttacggtcgtcagggaaacgtctgcgtgccgctcaacgaaatgctttccgcgggcgagacgttcgacgaagtcatcaccatcggaccgctgattatgatgaaattcgtctgtgcggcgaccaagccctatggcatcaagacggtcgccagcatgaacccgatcatgatcgacggaacgggcatgtgcggcggctgccgtctgacggtgggaggaaaaatgaagtttgcctgcgtggacggacctgatttcgacggccatgaaatcgattttgacgaggcgatgagccgttcgagaacgtatgcggattttgaacagcacgagagagatgccgcatgcaacctgttcaagaaggaggtaaagtgagatgcccaaatttaatatgaatcccttgaagaatcccatgccctcacaggatcccgacgtcagaaataaaaactttcaggaggtcgcgttgggctataccgcggaaatggccgtggacgaggcaaagcgctgtctgaattgtaaaaatcgtccctgtgtggcggggtgtcccgtcaatatcgccattcccgaatttatttccaaagtggcggaaggtcaattcgaagaagcgtatcagatcatagcgatgtccagttctctgcccgcggtctgcggtagagtctgtccccaggaaacgcagtgcgaaggtaagtgcacgcgcggaatcaaggcgggctgcgaagcggtgggcatcggtcgtttggagagatttgtcgccgattaccataatatgcacgcgacggaaaaagcgactcccgttccctccaatggccataaggtggcggttatcgggtccggtcccgcaggattgacctgtgcgggagacctcgcaaaaatggggtacgaagtcacggtgtttgaagcgctccatgtcgcgggcggcgttctcgtttacgggattcccgaattccgtctcccgaaagcgatcgtgcagaaggaagtggacaacttgaaggctctcggggtcaaagtagaaaccaacatggtcatcggcagagtgctgtctatcgaagaactcaaaaacgaatacgggtttgaggcggtgtttatcggatcgggcgcggggcttcccaaattcatgaatatccccggtgaaaatttgaagggtgtctattcagccaacgaatttttgacccgttccaatttgatgaaagcctataaaaacgacagctccacgcctatccagcacggcaaatgcgtggcagtcgtcggcggcggcaacgtagccatggacgcggcgcgcacggcgaagcgtctcggtgcggaagtacacatcatttatcgccgcggtgaagaagaacttcctgcccgtcgcgaggaggtagagcacgcgaaggaagagggcatcattttcgatcttctcactaatcccactcgtattttgcccactccgacggacaatccccgcgatccttcctatggttgggtgaacgggatcgaatgtattcgcatgcaactcggagaaccggacgcgagcggccgccgttcgcccgtggaaattccgggaagcgaatttaccattcccgtggactgcgtgattatgtccctcgggacttctcccaatccgctcttgaagcacacgacgccgggacttgaaacgctcaaacgtggcgagatcgcggtagacgaaaacggcaagacttccatcgaaggcgtttattgcggcggcgatgctgcaacgggtgccgctacggtcatcaaagccatgggggcgggtaaagttgccgctaaatccattgacgaatatatccgcagcaaacaataaaatgtaagagataaaaagcggctttccgaaattggaaggccgctttttcaaggaaagaaatggaaatagttatcagaaaagacataaagaaatatatggaggagctcaaaatctggctggaagcgcaaagagaaattcctctggaaggtatggacgaattttttactgccagagtaaaaatatatgatgaacatatgtctatatggaaagaggcctatcgcgttttgcctgattatcttcccgaaaaagtcgataaaattttggatctgggcatcggcacgggattggaactcgaaggaatatatcgaaaattcccctccgtgtccgtaacgggaatcgatttaagtcggtcgatgttagacgagctcgaaagaaaatattccggccgaaaatttacagcgctatgtggagattattttaaggaagatttcggtcaagaatatgatgtcgttgtctcggtagagtctttacatcacttttctccgataaagaaaggagaattatatcgcaaaatttatcattccttaaaatgcggagggatatttctgctctgcgattatattgcctgctgtgaagaagaggagacactcctcgcggaagaatgtatgcgaaaaaggaagatacagaaaatttcggacggcgacttcgtgcatttcgatacgccgttgactttgacgcacgaaatttcactattaaaggacgcgggatttgtttcggccgaagccgtaactagtattgaaggggctacgttaattctttctataaaataatttccgatacaaagtttttaatatttactttatgcggacttttatacaaatatttatagaaatacttgacaatttggaaaagagaattatataatatttacaaagtaaattccccatcttggagaaaaggagaaaatcatgaaaaaattttggaaatcggcggcggctcttttattgtgtgctgcgtttggagtctccgctgcgtgcggtgtagtggacgattcttccggcagcggcaagggagacagtaattcgggcgaaggaaccggagtctcctcacaactcagtcggaattatgtcactacggctttgcaacagtttgcagaagcaaaaaatctgacaatttcggtcgggggcgaagtaacggtttcctatatggagggaacggagtccgtttcggaaaaatatgaagtagatttggagctcgccgcatctttttccgattcgggtattgcgatgaaagcggaagggacgattgatcagacttcggaaggacagactgttacggaagaaatcggctattacataatcgacggtattgaatatatctataattccgaaggaaattattatacggcatgggaaacagaaattcctatggatgatatattcgaccttttctccggaatttccgaagggctcgtttcagaagatacggtcgagtttttcgcgggactcttggatcaatacggaacggtcacggaagattcggccacggtttccctcgtttatgatgccggcccttttctcaataaagtgattacaacaatcgataattttgacgaaacgacgactttggagacggcaatcaatgaaactttgaaattgttcggcattgagacgacagtcggagatatgctcgatagcttgaagcctcttggggcgatgacgttatcgcagcttgtctttgttgcagatcagatccttggagaatacaatacttctttgcgggagataaaggatacgctcgtcgccttagaacccgttcaacagttaataaacgatgcagttgcggcaggagcactgaccgaacaacaggcagcgacagtcaaaacgggaacgattgcagagattcttaaacagtttaatttagagaacgtcacggtcgataaactcgttgcgctgcttttttcagcggcgggcggcggaacagtgcaccccggagacgaaacgcccgaatcccccgaaacgcaatccgaaatcggtgtcgattttgaccttgcagctgcaatcgattacctgaaagccatgttaaaggaaatgactttgtcacagctcggaatgacgtttcccgatttagacggctttgctttttcaaaggcggaaatgggtgcggaacttattatcggaaagacagaagttgagaagttagagctgaacggagaggtcggctttgcgcaaacggtcggcgaaacgtcggtgggagaaatacaggcgaaagtatcctataaaatagaaacaaacgattcggaaatttctcttccggaagatgtcaaggtcatttattggtcttattggggaggagatgaggatgcttcacgccatattatcgtttacggaccgcgggtggacgagaacggcgaatatatttgcgaagggtatgtcgaagtgacggcaggggaaaatcgaaactgtctctatacctttacttatacgtcgcccataagcgtgaattttaccgaaatcactctcattattaccggaggtacgtggcagagcggagaggagggaggaactttttccgaaacggagctgaaagagattttcggggaaaatgttacggtcgaactgataatcggcgagagcggttgcgatttgtcggcctttcccttattcgaggccgaaacagtatatagcgttactttgtaaaattttgagaaggaaaggcagaagtcttttcttcttttttatgaaatataaaatttatgcaacatttcttctcggaatttctacttaattgataaggagcagcggaataggattgacgttaagggggaaaaatggtaaaatagcattatggatatgacgaaccgagaaacagagattcagacggaaagcgggcagatttcttcctcggaggaaatgttgtgcgaggctgaacctgccgtcggaacggcagggggcttgaccgccgtattaaagagaaaattcccgaaacccttttcattttttgtgaaatattgggggctttttgccgcgccgctcatcgcttttgtactttatatggttcagttggccgtttcgggggtatatccgttcggttcggattacgtggtcgcgagttacgacctttcggcgcagatttgtccctttatcgaacatctttttgatgtctttgacggaaaatcttctctcttctattcctatgcaattgcgggcggagcggacgtattcggaacatttgcctatttctttatcagcccgttcagttttatctttctgttattcggcgacggaaacgtatataacgcttgcggtatcgtcatggcgttcaagctcgctgcgattgctttttcgggcgcgtggtttgtcaaaaaacttttttcggagattcctgattttttgggcgtggcaatcggaatcgtctatgcctattgcggatatacctttgtcgccaatacctatatcaattgggtggactttctcatctatatgcctttctgtgcggcggccttcgtgcattttgtccgcacgaataaatttcttcccctttccatattgattgcttgttgcatttatacctgcttttcgattgcctgcttttccatgttggttgcgtttcccgttttagtttcgtatgcctttttctgcgtggataaagagaaaagaaattcgttcatcgcatacctgtgccttgcattttttgtcgctgttctgattgcgctgccgcttctcgttgccgcgttgatggcatatcttcgcagcggccgtgggggaggtctgttcgacgagttctggtatggatttacgacgaaagacggaaagcgtatctttgacattaaaggatatttcagtcgcagcggagaggctttatatcgcaaattcagctatattttcagcgattcaatctttgtctttctaacgatcgtctattttgtccgctctaaattgaaaacgccgttttccaaatttatgctcgcggcggggatagctactttggttcccgtcgttgtcgatgagtccatgttgctgatgaatatgggctcatatatgtcctatgcgttgcgtttcgggtttctcaatgctctgtattttctcggcggagcctgtctcgcgttgagagggatttgctttcaggccgatacggcctttgacggaacggaacttgaaaagaagggaaaagaaggctcgttgatattttatgcggttgtttcgctcgttgtggccgtagtgatatgctgttttgtgtccagcgatgcctatcttaccatttgggataattttatttccgattccgtggcgctgaataacgcgcacggtttttcgggaatgtttgctcattctctcggcggtttgcaggtcatcgcggtcttgtttattctcgtgggtttttctgccttgctgggaactttaatggtaaggaataaagagatcggcgcgcgcgttatgtcgattttgttgctttgcgtcgttgccgttcaggtaatattttataacgaacaacttatcgtcggaaaccgctctactcattataatttcgatcactatgaaacaatgactgccgtcctcaacgaacgcgatgacggttacttccggattaaagactatgacgacaaacttaccgctaatgtacctttttcctgtaattcaaattctttcagcgtgttttcttccgttatcgatggcgataactttgaaatcgtcgatttgttcggatattcggggaatggacggaacagcatgaaaagtgctcgcggtaattttttcggggattgctttttagggtataaatatttctttgtcaatgaggacagtaacgcttccgtctctaaactcagctatatagatccgctcgaaggtgccgacggaacttttgaaaaggatgaggacggcaatatcgtcacgcttcattctggagctttttatatgtatgaaaatacgtcggtatttccgttggggtataccgtgacggacggagcgttccgttttcccgaagaaaacacctccgccaatcgtacgaaaaatcagttggcgctatataaatttttgggtggcgagagtggtaaagctgaaaccgttacgacaaatatggtaaagacgctcgggaaggatttatggacgcgcgcggcggaagtacaggtcggcgcgggggaaatcactgcgaccgtaacggccgaagagggggaatatctgttccttaactttgtggcttccaagggctatacagtaactgtaaacggaaaaaaagcggaacttatcgacaacgatttgcattttctttccgtagctttggaagagggggaaaacgtcgtaaaattcagctattcttctccgtatataaaatattttgcggcagggatcgccgcagcggtggtggcgcttttggcggtagcgctcatcgtcaaaaagacgaaatttatgcagtctgtatcgggcgttatcgcttggacgggagtggcgcttgccgtaggcgtcgtgcttttctttatggcgtttcccgctgtcgtaggtctaataaaattgatttttgcactttggacaaaaattttctgaaacgggaaataaaaatattttgtgcgttgtcaagtaaataagtataaaataaaaattcttttgaaaaattgccgaaaaacgcttgactaaattcctccatgtaagtataatagtttatgctgttccgcgagaaaggtcgtagagcgacaaggcaatattgaggcatagcgcagtttggtagcgcgcttggttagggaccaagaggtcgtgggttcaagtcccgttgcctcaaccatggaagctcacatataaacgtatgtgagcttcctgtttatctaaataaaatcgaggtgtagcgcagttggtagcgcgcatggttcgggagttaatcgccgttcccgacggcaaaatttccgaaaacgccgaaagcccttgaaaacattgactttttcagcatttcaatttttcaaaaagcccgtaaaaaattggtctgaccacatgtttgaccacttacgaaaaaacgaatattttcctctttcgaggcgtagcgcagctgggagcgcgtcgcgttcgggacgcgaaggtcgtgggttcaaatcccgtcgcctcgaccattttaaccatgaaaacagaccaaaactttaagttttggtctgtttttcatttatttgtttattaggctgagatggggtaacggccaaaaaattattgtgttagaatagaaaaaatggaacaaaaaaccgagatgcataagaaagagcggaatcgtatgataaagaattcatttcgggatatgataaaaaatggttatgaggatattccctaatttttccactcaccgtaagccaatgaataccacaggaaacaaataaacaattgaaataacagatatacaataaaagggacgagcaaaaggacactcgctctatgaccgtttttccataaagcgaccataagccaaacagagataatcagcgtaaagatattgttcacgagtgccacaagataagccgcaaaacacgataaagaaatgaaaaaaacaaagaagctaaaaaattgaagaataaataagagcagacaaagctgattcgttttgttcgatctttttatggaatgaaaaatcagaacgaacaaagcaaagagaatgctccaagatagaaacaaaataaatttgttcggaggagaataagaggcgttaagccaattttggaagtacgttccgtgataaacgatcatactcaaaaggaaatagggaaaaaatatcaaaagaaaggactgaagctcctttataaaattgatatttttagataatcttaacataattcataatatgaaaagagagaaacggttatgcggaaacttttcagtctggtagcttcagtctgactttcgactttcgaaggatatatcaaacaaggctttggggattacttctcagagctttttctttgtttactgcatagtaaattttgagggttgaccataaggtcaaccctttgatttagtctttttcagctcagcgatttccgctttctttgcgattatcatctcttgaagcagtttctcgcattcttctctcgttttggcgtatacgttgaatttcctgcgcttgccgtcgggttgccgaggatagaagctgccttcccaaagccgctcgtttacttgatacatgcatcccgtgccgctcttgcgtattttgggcttatacggctcgaaattctcgcctgtatcgctcgtttggtctttccttggctcgtccttcggttcgggcaactgagcgtctgtaccgccgatttcccggtcgattctcactgccgcctgtactctcatctcgtccgtcacgtgggagtagatgttgagcgtggtttcggcggaaacatgaccgatcatcgccgagagcgtttttacgtctatgccgttttccagcgccatcgtggcgaaggtatggcgtagatcatggaaacggacgtgcttgcaatgcgcgcgttcaagcatgattcggaagcgtttggttacggcggacggatgcctgggttcgccgtctttgacgggggaggggaatatccattcgcatgtcgccgttttctttaactctcttaaaagctctactatatcggcaggcaggaacaacgtccttatcgagcttttcgttttgggaacggacacgcccttgacggtgacttgccttacaatcctcagctcgcccgtatgaagattgatgtctttccatttcagaccgagaatctcgccgcggcgcattcccgtggtcagctccagaaggaacagctcgtaatagccttcctcgctggcttggtggagcagccggataatctccgcttgggtgagtattttcatctctgcgtttttcttaggcgggagtttacagccgatggcgggatttttggtaagcatgccttcgtcgaccgccttttcaagagccgacctgcagatggcatgacaggcgcgtaccattctgtcagacagctgtgtgcctttgttttccacgtccttttttctgcccgtccgtttcagttttgcgtaaaactgctgcaggtcgttctgcgagagtttgttgagcggtatctgaccaatgccgggtatgatatgcacgtagatgcggttttcataggtggagtaggtggtcacccggagctttggtttggagaaatattgataccaaaaatctatccaatctcccaaaagcatatcgggtttcagccgttccgagatccttccgtattgctcttttagcgttgaaagtttttcaaggcacgcgtctttggtgtgggcgaatacgctttttgtctttggaagccctttttcgtcgtagccaatgactacgcggccttcccagcgcccgtctgtgcgaaggcgtaccgtgccttcgccttgttttcttttttgattggccatatcgtcattcctgtttcataaattttttcatcattttgccgacgatctcggacgcgtttcgttgcatatcgccggttacgtgggtataggtgtcgagcgtgaagcttgcgttggtgtgaccgaggatacccgccaaggtcttggcgtcgacgccgccttgcgtggcgtgagtggcgaaagtgtggcgtaggtcgtgaaaccggataagcggcagttctgcgtgtttgagtatcgttttgagttttctatacgccgtgtcggggtgcaacggttcggacggagtcatgtagtggggaaagatccactcgttgatggcgttgtccttttttgctttgagcagctctgccacgctcggcggcatgaggatcgttcttgtgcctgcattcgtcttggtttcgccgatagagatgccgccgtatctggttctgccgacagagcgcctgatgctcatcgtacctgcggtaaagtcgatgtccgtccatttgagtccgcatatctcgccgcggcgtaagcccgtcatgatttccacatagaagaagtcgtgccaatacggctctcgttggatagcgtccataaatgtatcgagctgactgtcctcgaggacttgcttttctccgtagctctttttcggtatggcagtgccgtttgtagggttacgcacgatatacctttccctaaccgcctcctccaaggcttcatggagtgtcatgtgaatctttctgaccacgctgtcagataatgcatacccgtacaaagggtgtggcttgacccgaccttcctttctgattttgttgtaaaatttctgaatatccgctgtggtaagataggcgagctgtttatcgccgataaagcgtttgatttgatgctccgcgatcgatctgtatccgtccattgttttttctttgattttgaatatcatatactcgtcgagccatttgtccatccatttgccgagcgtcatgcggcattcttcggtgaggtcgacgtcgcggtagaggttgataagcagatgaagctgtttcagcgtcgctttttggctctttccgaacacagatttatacatcggcgtaccgtctttcttgtgaccgataacgatccggccttcccagcgtccgtcctcgcgtttgcgtaccatgccctcgccttgcggtctgcgtttgtttcccatttactcaccctccgtttcttgtatatcaagacgctcgaaggtgtatttgctgtttcgggtagttaggagaatacgcttgtcctcgtattttaactctcctactccgattttcagatagttgagttctatatcgtatatcacgataaagtacttccccggaaatctgtgccggctttgatatacatgaatgattccgtaaaatccttcgtatgctttgtgccaagaccatttcctgtcgatgtccgatggggcggtcggctctaccgaaacgacttttccaaaatgttttctaatcagtttagccatcgtttcctcctttactgtactttttggtgtaccacaaacataccacaggttcgagagaatatccagcgtttttgcggagaattattattttattatcaatttctttttcatccccgctatagctctttcaaccctattgcctgcttcttgtcccgcagcgcttttctctgcctgcggtcaatgccgtggctgtttatccgctgttctttctgatatatctcctcggtatgctcgccgatgagattgccaatgtaataaaacaaatcgcacacgccgacaatgagccgtgcgttgagattgttgcggagggcatcgagtactttttcggcaggggtgtatccgttgtctgcggcgccttgcagaagttccttgcctttttcatattcgccgtattcgtaataaagcaacaacccgactctcgtttgcgtccatgcgtcgttccgcgcggagcgttggagccattccttggcttcttcgcggttcccttcgtcgaagagcagcttgcccagcgtatattcggcttggaaacagccgtgttctgcggcgcgcaaaaaatacttcttcgcttcggcgggggatttgtctttgagatacctggcgtattcatattccgcagttccgaacccggcgtctacggctttccgaagatatttcatcttctcgcccggcgtatcggtgaatttgccgtcgcggcagcttttataaataagatatgaagataaagcgtttccttcgtctgccgccaggcgcagccaatattccgcttcttccatatcgtcggtcttttcaagatagtaccggccgaggcggtagtaggcgaaaggatcgtccttcgaattagctcttacatataaatatctgaaatcgtccgccttgtctttgagtgcacggtaatcgtaatcaatatctcggtcgggctgttcgtcgagttttcccatcatcgccgcgcaccgcacaacggtattgcgaatcgatttgaattcctcgttctcctcgatagaaatcttttccggcattttgtcggtataggtacgaacggtttcgcatttatatccgtaccacgagtcgtaaagctccgcgattttctcgtcgttcccaagcatttttacgatctccttgacaagtgctttgctgcttttgtcaagataaccgtagacctttttgcctttatgcttttctaatttttcagaaagcaactgcattttcgcaatcagctcaggtgcgaagtcatggctgccgttttgaatttctgttaccaattctttgacgcgctcgcggtatttttctttaacgtcatctcgcgcggcggtttgctttttataaatggaaatcaactcttgccggaatatatcccccgcaagcgtttgcttgatattatgaatgcccgtgcgggagaggtagggttcttgcggatttgtcgaccataccatcatgtgtacgtgcggatgttgttccttgtcatggtacgcggcaacccaacggagattggaaggagcgattcccatctcccttgcaatatcgttgcgacgggaacgcaggagattcatccattgttccgcgcagttgtaaccgagccgctccgcatcttcacgagtgagagatatgatgagtccccatacgtttcctgtgtgttcgtctatttctttgctgacggcagagagatttattttcataccttcatcggagaacagaccgtttgaaccacggcgttccccgatatatcccatcataccgctccgaagaatttcgacgccttcgcgctttgcaatatattctacgtagccgccgcgggattgacctttttcggttatgtgtccgggcttgtagtagggggctttcaaaatgagtcctgtcattcaactctcctcattcgaagtgttcccgaatacgaagggtgccgttggtttccttcacctcgcggatgctttcctgacggatttcttccaggagatacgtgtcgtaagtttcacactctctcgccagtatcttggcaagataattttgatcgacggcaagtttaaacagaagcctgcaaatgcgttcctcgctgtctctgaccttcgcgccgatgacggattctaaggagggcagaagaaatttctcgatgtgctccttttccagccacgcgcagtagaagtccacggcttcccggataaaggcattgcgggatttacagcctttttcttctgcaagcctgtcgcagcgcgcccattgtttttgggtgaggctgacgcctctggattctaatagattgttgttttctttcatgagttttttcctttgctataatcataaaatttaataggcgctgtaaacagacatcatatattccttatggaatcttgcctttttggaggtacaatgctataaagactcctttttaacgccttgcagacacgatatatcgttgtgtcttgacaggggatagttcttaaaaaagccttataatgccgcggtttcgtttcgctcggcgttgccgggcgaggtaatatgccgggcggattagacccggctttatcctgctaaaaaattagacactcgcaaagcccgatatggcgcgtggtgcgtttaataggggagtctgtcgtaacgagtctgctcgtccagccattcgagcagtctatcccgcggaatgatggtgcgaccttgtacgattttcagcttggggaagttttcttcgcgcacaagctcgtatgcgctcgcgcgtgagattcccagcaagtttgctacgtccattaccgtcaggaacataggcagttcgtctgtgtttttatagattgaccttttcaaaatttatacctccgtattttttcatcgctttgctcagcaatgcgtggttctcagctatgcgtagctgttcctcgttgtaattttcctccaacggctggattggccgtatcgtgtagcatagactgccgttgtgagaacgaccgtcacgggttttcaccatcgtaggcttagtgcagaggaagcccttacgcacaagacttcccacatattttttgacggtgttgttgctcataccgcaggcgcttccaatcgtagagtagcttggatggcactgataagtctttctgtcctcgcagtacatgagaaacgcaagaacggcgatttcgcctgcaccaagccccaagcggaatatcgctttgggtaagggaaaataatccccgggagtatctctgcgtttagaattatagtatctcaatcatatacctcctttttgtttttcttctgtttgttttgtttcaaatttttacctcctgatgttttgatatttattaagggcaaacaaaaaagacctgcacaaaaaacggctgaaagcaatccgttttgtatgtacaagtctaaaaatttttaaaatatattatgcgtattcagttgtgtgcacaaaggtttatacgagcgcggttgttttaataaatgtgcacttaagaatttatatcagcatagttattttaacacacctggaagtatttgtcaatacttttttaggaacgtatgaatgcctttattatatggtttccaagatacggcatactcacggcagaagaaaaaattaagagcggaaaaaacatctcaataactatcgacgggatcgggatttcgacaaatataattccggaattcccggattctttgcctcacgaaatcacggtcgaattaagatgagcatttgaagcgtaaccaaaaaaatcaaaaatttcaagtgagttcggtattcgtgccggactcattttgttttatttgaaaggagttttccgaagcataatagtaataatctggttgcggccttttactaatgcggagatagaaaaatatgcttttgaaaaaagatgcgacaaagtatgtcgagaaaaggaacctgtttggatgatgcggtaatgggaaattttttcggaatatcgaaagcaggaatgttctatgatcatgaacacgaattttccgactcgacttaaaaaagccgaataaatttttcgtcgtcttaagaattcatggaaaaggaaagtttgcggtactttccgggcggtacgcccataaatttacgaaattgccgattgaaataggcttcgttgtcgaatccgcattcaaaggc

SEQ ID NO: 1514 - DNA, 32759 bp, Unknown
  16S sequences of unknown bacteria
cctcttttgctcataaaaaatgcacctccaaaagtgtctaacttttggaggtgcatatcattatttttcggtgcgttttactgttatttttaaagtttattcggtgaaaaaattcccctttactttttcgctgtgtatgtatctttccaaatttgcggttatttcgtcgccgccgtaaacggctgttccctcgccttttacaacgcccgcaaccgacggcacggcggaaacccctatcttttcaaggacagtcatcataccgtcataattgttttctctgtcaaggcctgtgttatagtaatatattttcaaaggctgttgctttgcaagattttcaagatattccggtattccccggcaggcagggcaatcttcacgaccgatataaataagccgattttcttttccgtcggcaaaccgtgacagttcctccaaagttatattttgaatttcgtacctttcattccgaatttttacaatattattatactgatttaagtatgtaataccacttttaaaatcgctgtaaacgccggcaatgcacaaacagagaaaaagaacagtaaaagcttttttgcccacggcatttgacacaatcaaagcaatcaaaagaaaaaatatacaaaaccgcagaaaagccacaggccaaatacccattttaccgcttatgtcaaactcgtaaccggcaaatttttcaatacgggaaaccccgtaccacattatggcgtttataatttgcgtgattacagctaccacaatgagtatcttgcttttaccgtcgaataaatctttcatcaggcacctccgaatatttataaatttattatccttataatattacaaaaagagtgaaatttcaactgttttggatgatatttcacaataaaaccgtagaaaagcaaagtttttccataaatatttattgtattgacaatccgtcctgcaagtaatataatttttccataattttaaacatacaaaaggaatatgtatttatggaaaaagaaaaccgatcttctgtcattaaatctgcctttccacagacaattcccgttttgacaggctatatttttttgggtatggcctacggaatagtaatgaaaagcgcagggtttaatcttttatacccgattttaataagtattttcgtatatggcggcagtttacaatttgcggctgtaagtatgctttgttccgcttttgcccctgtgcaaacattcgttgtggcccttgcggtgcaggcaagacatttattttacggggtttccatgttgcccaaatacagccgggcaaaaggcattaaaaagtttttacttatatttaccatgtccgacgaaacattctctgtttgttacagcgcacagcctccacagggggttgacaaaaccgactttatgctgcggataagccttttagaccatttttattgggttttgggcacggcgctgggtgcttgcgccggggcatttatcccctttgacaccaccggcattgactttgccatgaccgccctgtttgtggttatttttgttgagcaatggctgaaagaagaaagacacttttcttcgcttttgggggttggcgcctcggttgcctgccttgtaatattcggttcttcatcattccttattccgtctatggcagtgataattttggttttatttttgtcgaaagataaaaaggagggtgataaagtatgaatttagcccagtcgattacaacgataattgtgcttatggcggctacaatggttacaagatttttgccgtttttaatttttaagcccggcgatgatatgccgaaattcataaaatatctgggcaatgccctgccccctgcggttttcggtatgctggtggtttactgccttaaaagcgtaaacttttttgccgccccttacggaataccggaacttgccgccgttgccctaaccgccgcagtgcatatttacaagcgcaacactcttttatctatcgcccttggcaccgcttgctatatgttgcttataagaataatataaaattcaaaattaaaatctgcccgctgttttgtgtcgggcagattttttgcttgcggaaaatattttaaattcaagattttacttgcttttagttgggcaaaatatattaaaatttaaacaaattaagccctgtggcgtcatcgtggaaacggtctacttcaccctctatcacatccaaaaacatttcacaggtagggcaaaccgttgctcttgtcaaatgtccgccgaaagtgtgtccttcaccgtctgcggcggccatatgaatatggctgtaaaattcgccgttcatggtgttcaccgagcctgttagagaaactatttcgtgggggcctttaaaggagtttgccttataaaactttttgtccacatcgtaaacacctacggtaaaatcatttgtggcgccaagggcggaaacactgcataactttatattttcttttaaagccaccgctttaagctgttccaaaatttcctcgcccatatccatgcgcacaactattttgttgccaaacctcttgtattccataaatcaaacctccgttttttctttattatagcacctgccaggttgccgcacaacagaattattgacaaattttatatatggggctaaaatttaaacaataaaataggattaggagattgtttattatgaaaaatttcggtgcaagattttcactttatccaatgtcggacaaattcattcccatcattttaggtgcccttgaaaagacggatacaacagggctttacagcaataccgaccggatttcaacggtttacgggggaagtgcggaaaatgttgtgacggcagtagaaaatttatttgtaagttcttataccgaaggcgtgcatacggcggttgagggaattttctcgaattccgagagctttgatatttccgatacaaccgttaaaaaagaaattgccgccgattttcccgtaaaatgtatggttgcggtttacggcggagaaaaaagcgaaaatatttttgccgaatttgagagaacgacacaaaccaaaaacgaaaaaatcccctacggactgcgccttgatggcggtgtaaaccgggtatgggcggaaattaaagaacttgccttgtcattggaaaactccggtgaaaaatttaccctttattttaaaatgaactgcaacagcccgacggcagaataacagataagtcacacttaaatgaatgcacgcaaaaagcgtgcattttatttttaaacatttaaaagatatttaaggataatcctttgttttttcatattttaatggtattatactgatataaaattacaggagataatctatgctgaatacaaacgattttgtggatataacacagatgataccaaaagaatatctgcttattttcgtcattgccttgggtttggctctttttatagcagacaaaatcatgaaaaggcttttttggcctgatgacccggaggacgaaaacagccagcctgcgatttttgaaatgaaaaacaaaaaaagaaagtgaaatccgccgaatttcactttcctgcaaactactcgcctaatttataaacttcctcatataccgcctgcattttggggctgatgtatttatctttatgcccacagccgaagtaccattttttataccggacttttgactgcaaaatatccaaaaagtccagtgtggcacctgtggcattgctgtttaaatccaaaaatcgcacggttctgccgcttggggaatgggttataatgtaatccacacttccgccgactttttcaaggttggcaaggcaattttcaaaatccttttcgtttggcacattatcgctgaacaagtcgtcggttgggtcgtcggcaccgccgaaacacagaattttaacatcgtcggtttgcaaaatttctcctcttttgatgtagtaaattttgtccttggctatctcttttgccgcagcacctctgtaaactgtgtccgggtaagcggataaggcctcaaaatcctcgtgatagccatcaataaaaagaattttataaggtaattttgccaactttttcaaattcttttcccgttctttactgcgccatacaaaaccgaaatcccccgccacaaacaatgtgtcaagggcttttaacttttttgtgttttttgaggaaaatctttcaatctccccgtgtgtatcagcggtaatatatatcattttatcctccttacaggcgtaaatattctttataaaatcacatagctgtgatataatatgtttaatataattatacttaaaaagacaaggaatgtctatatgaaaaaatcttttaaacttttaaatatattcttggttgcccttacggcaataagtattttttctttcccggcaagcgccgcaagcggagcaaagtacgatttgggctttgatgtaaacgcaaaagcttacattgttgtgagcttggacacgggagaaacggtttttgaaaaggacgccgaccggcagtacacaccggcctctctgacaaaacttatgaccgcctatgtggttatgaaaaatgttgaggatttggacggcacaatggtaaccgcaccggcttcggtttacgacgaactgtacggaactaattcatctaccgcagatatacgcaagggcgaaactttatcggttcgccagcttttatacgccttgcttttgccaagtgcaaatgaggcggcaaatattttggcggattatgtcggcaacggctattccgaaaacttttatatgatgatgaatagcgaggctcaaaagctgggctgtacgaacactcatttcagcagtgctcacggcctgtttgcggaaaacaattacaccagtgcaagggatatgtaccttattgccaaggcctgttacgaaacccccggctttatggacattgtccagacaacccgttaccaactgccggcaaacacaaagcacgattctccttactatattttatcaacggtaaaaatgcagaatccgtcgtcaccttactaccgctcatatgttcacggaatgaaaaccggcagtctcgacgaaataggtcacaattttgtaagcctctgtcaacaaaacggtgaaagttacatctgcgttgtaatcggggcggataaaagcgaagatccaggtgccgcatttaccacaaccgcagggataatggattacttttttgcaaattactctatgagaaatgccaacaattccgcttacccggttacggaggtgcctgttaaatactctgccgatgcagatacggttcttttgtatgccgatacaccagtaatggctattttgcctaatgacgcagacgaaaccagttttcaaaaggtgtacaatctgccggaatccgtcagtgcccctataaatgagggagatgttatcggcacggtggattattaccttgccggggaaaaaatcggcaccagccaacttgtaagccatgacaccattgaacgcaactttgttatgtttgttgtgggcaagttccgtgaacggtatcagtccctttatttcagggttgttttgtgcgtaaccgccgtgcttcttatcggatatggcataatgtgctatgtgcattttaagaaaaacgaaaaaattcaaaaagtcagaaggagcagataagccgtgaagcatgtatatattattttaagccgttccagcacgatttttgcccttataattcgtgcctttacaaaaaaatattacaatcacacctcatttgcattggataaaagtcttaacacattttattcattcggcaggcgcaacccaaggcttatgtttccggcgggttttataaccgagggagtacacaccggttttttcgggcttcacccggatacgaaaatctgcgttttggaacttgaagtgacccgggagcaataccggcttatacaagaaagacttaaaccgtttatcgaaaatcccaaaaaatataaatatgacgttttccatcggtttttcaatatgcctttcaacaggccgtataaaaacaaaaacaactatgtgtgcagtgtttttgccgcaaatcttctgagagatatttacgatatgggcaaagattgctctttggtttatcccgaagatttttacaggcttaaatataataaaatttacgaaggaacagcgagggattataactatgaacagtaaatttgaagtgaaagacccgagaaatatttccataatgaccgacttttacgaaattacaatggcaaacggtttctttgaaaacggtatggaagacaccgtagcggtgtttgatatgtttttccgcagggtgccggatgacggcggctttgctctttatgccggcttggagcaggccatagattaccttaaaaatttaagttttaccgacaatgatatagagtatcttcgcagtaaaaatcttttcagcgagaaattcttggattatctgagaaattttgaatttaagtgcagcatttggtctgtgccggaaggtactcctgtgtttccgaaagagcctcttatggaggttgaagggcctattattcaagcccagcttgttgaaacggcacttcttgcaatagttaaccatcaaactcttattgccacaaaggcaaacagaattgtgcgcagcgccatgggccgcccggtacaggaattcggcgcacgccgtgctcagggcatagacgccgccgtttacggcagccgtgccgcatatataggcggttgtgtttccacttcaaacacaatgaccgacagagatatgggcattccggcctccggcacaatggctcacagttgggtgcagagttttgacagcgaatacgaggcatttaaaaaatatgccgaaacttacccggacgccacggttttgcttgtggacacctacaatgttattaaaagcggtattcccaatgccattaaagtttttgacgaagttttaaagcctatgggcaagcgccctgtgggggttcgcatagactccggtgacattgcctacctttcaaacaaagcgagagcaatgcttgatcgggcaggttacaccgattgtaaaatcgttgtctccaacgccttggacgaaaatattgtcagagaattgcttataaacggcgcaaagatagattctttcggcatcggcgaaaagcttataacaagccttacaagccctgttttaggcggcgtttacaaactggcggcaattaaaaaaggcgataaatatatccccaaaatcaagataagcgagagctttgagaaaataacaattcccaacaggaaaaaatggtacagaattttctcggacgaaaccggaaaagccttggcggattatatttgccttgtggatgaggacggcatttcaaagttaaaagaaattacaatttttgaccctcttgaaccttggaagaaacaaaccttgacaaatgtaaccttaaagccaatgcttgttaagatttttgaccggggcaagtgtgtttacgaaagcccgtcaattcatgaaattaaggcttttgccacagagcaaatcgacaccctttgggatgaagttaagcgctttgaatacccacacaaatattatgtggatttctctcaaaaattgtgggaagaacagcgtgctctccttgaaaaaggcggaaaataaaatttaaaatatcttaacataaaggcgaggagacaaaaatctcctcgccttttactgtatcgtattttcgttataaaatgggtaaaacaaaaacaccgcaggttgccctgcggtgtttaataagcgttaattcacttaaattacttaagttcaactttagcgccggctgcttcgagcttagctttgatgtcttcagcgtcagccttagaagcctgttccttgattgtcttaggagcgttgtcaacaagatccttagcttctttcaagccgagacctgtgatttccttaacgagcttgataacgcccatctttgatgcgcctgcttctgcaagaacaacatcaaattctgtcttttcttcagctgcaggagctgctgcgccgcctgctacaacaacaggagctgctgctgttacgccaaattcttcttcgatagccttaacgagttctgaaagttcaagaactgaaagacctttaacttcttcaaccaagttagtgattttttcgcttgccattataaatttcctccgtttataatcgtttttaaattagtgattgccgcttttgtaaattaagcagcttcgccctctttttgagctctaactgcatcaagcgcacgagccaaaccgctgaggttgcctgtgagagcagaaagaagcatagagagaaggccttctctgttgggcaatgtagccaatgttttgatttcatcaatgctcaaaactttgccgtccatgtagcctgtcttaattgcaaatttgtcttttgaatcttcgctgaatttgtgaagaactcttgcagctgcaagtggatcttcgttgccagcgatagcaatagccgtagtaccctgcaattcagaagacatatcttccaaatcagtacccttgatggcaattttcaacaatgtgtttttaactacttcgtagtgaacgccggcttctctgagttctttacggagctttgtgtcttcttcaacggtgataccgccgtagttgaaaacaacgccgccctgtgaagcgtccagcttagctttgagttcatcaacatagctttgtttctgaaccaagattttttcgcttgccattatgttgtcgcctctccttatttttattggaataacccgccaaggcggatttaactgtaaacgcaaataaaaagcctgctccctttgcagagaacaggcgtgtagacttaaatcattaacaacgcaaattctcggcaggcgggattaacctttatgcttgcgcacctgctgtctttgaacagcttaataattatataccattgtaacagatttgtcaacctgttttttcggtttagctataattagccgccgaatttagcgctgttgagcttaatgccggggcccattgttgtagcaatagttgctgaacgaatgtactgaccctttgctgctgccggcttagccttaacgatagcgtccataagtgtttcgatattctgtgaaagcttttctgtaccgaaagaagccttacctaccggaacgtgaatgatgttagctttgtcaagacggtattcaactttacctgctttagcttcgttaacagcctgagcaatgttagttgtaactgtacctgccttcgggttaggcatcaagccacgagggccgagaactctacccaaacgacctacaagacccatcatatcaggtgaagtgatgagaacatcgaagtccataaagccttcattctgaattttggcaaccatttcttctgcgcctacaagatctgcgcctgcttcaagagctgccttttcgttgtcgcccttggcgataaccaaaacttttacatttttacctgtaccgtttggcaatacaactgcgccacgaacctgctggtcagcgtgacgggagtcaacacccaaacgaacatggagttcaactgtttcgtcgaactttgccttagctgtgctgatgcaaacatcacatgcctcgccgaggtcatagagctttgatctgtcaaccagctttttgctgtctgtatatttcttaccgtgtttcattattatcctcctgtggttaaacggaaatttcctcccacctatgtgagtagttcaaacttaaaattattcttctactgtaacgcccatgctgcgtgcagtacctgcgatcatgctcatagctgattcgatgtttgcagcattgaggtccggcatcttgatttcagcaatcttgcgaagctgatcctttgtaagctgacctacctttgtcttgttaggaacaccggaagctgattcgagaccaagttctttcttgatgagaacaggtgccggtggtgtctttgtaataaagctgaatgaacggtctgcataaactgtaattacaacaggaataatgtaaccgatatccttctgtgttctttcattaaattcttttgtgaaagacataatgttaacaccgtgctgaccaagagcaggtccaacaggtggtgccggtgtagctttaccggccggaatctggagcttaatatatccagtaactttctgagccattttttaatacctccgttaatgtggtaagttatcgagcaggaactcttcccgctctcccacgggcgcaaaacgccctataaaaaccaacttgtggttcttaccttttttaaattggtttgacccgtaaaaggtcaagttccgaaagagtgtctctgccgaacatagatacttcgactttaactctcaaattatcggcgtcaatttcttttacaacgccgacgcttcccataagcggaccgtcgataatctcaacagtgtcgccaacggcaaagtcaatgcttttctttgttgtttcaacgcccatagcgtcaacctctttttgtgaaagagggcttggtttctgtgcgttagcacctacaaagcctgtaacaccacgagtgttgcgcacgatataccaggtttcgtccgtcaaaaccatctttacaaaaacataagaagggaaaagcatttcttttttaataatctgcttaccgtctttaatttcctcgctggtttgataaggaattgtaacctcctggattaaatcgtgaagattgcgattctcgataactgcttcaaggcttgttagcaccttgttctcatagcctgaataagtatgaacaacataccattttgcctcgtccatatctacacctcgctttgtggattatgcattcttgtaaatcagctgtaacaaccggccgaataccgtatcaataccgtaaataaatacggcagcaataagtgtaacggcgatgacgatcagggtgttgttgattatctggctctttgtcggccaaacaatcttcttcatctcgcccttgatgtctctaaagcgtttgccaaagccgccgaagaagtttttgattgaaccaaaaaatccaaccttttcgttcttgtctgccatctgcattaccccttacttagtttctctgtgaagagtgtgttttttgcaaaaacgacagtacttgttcatttctactctgtcaggagtatttttcttgttcttcattgtgtcataattgcgctgtttgcattctgtgcatgcaagtgtaattctaactctcatatcggcacctccattaaagttagcctccctctttcgtttgcaaaaattttttgcataaaaaataaaacccgcaaaagaggtaaatataatatatcatatacgccggtggatgtcaatacaaaggaggcagatttttacccccaagtgtcttttttaccattcgccgcatataaatattacgaggttgggttttacctcacctttataattatacatattttccgcagtttgtcaaagagtttaaaatttggtatttattttttttgtgctatatgctattatataataatagaatttaaacataacagcactatttgtgttacatatatggaggtcactatggctaagacaaaagtatgcgttattttcggcggtatgtctaacgagcacgaggtaagccttatgagcgccaaaagcgttatagacaacatacctaccgacaaatacgatattgtaaaagtaggtattacaaaaaaaggcagatggctgttcttccccggttcaaccgatgatataatcaacggcaagtggcaggaatacccggacaatgttccctgtatgataagtccggacagaacaaccagaggacttatcaaaatggacggcgacaacatctctattgaaaaaattgatgttgtgttccctgttcttcacggcaaattcggtgaggacggcacgttgcagggtcttttggaaatgagcggtatcccatactgcggctgcggcgttttagccagcgccgtatgtatggataaggtacacgcaaatataacatttgacaagcggggagttccccactgtaaatgggattttatgatggactacgatatgcctaaaatcgaggaaattgccgacagagccgaaaagaacctgggctatcctatgtttattaaaccggctaacagcggctcttccgtaggcgttacaaaggccaataaccgccgggaatttaagagcgccgttgcaatcgccctgacccatgacagagaggtcgtttttgaagaatttgtggaaggtcacgaagttgagtgtgccgtttacggcaactgccctaaccttaccgccagcgaggtaggcgaaatcggacggagtgcggaattttacgactacgaagataagtacatttccggcacgtcaaaaacatatattccggcaaatctgcctgaagaaacaaggcttgaaatccgcacccttgcaaagaaagcatttatggcatgtcaatgcaaaggtctttcaagatgcgacttctttgtgagaaaggacggaaaaattcttattaacgaaatcaacaccctgccgggctttacaagcataagcatgtacccgaaacttatgcagcaccggggcatgacatattccgaacttgttgacggcattattcagcttgccatggagggcaacagatgataaaggaaagaccaataggaattttcgactccggtctcggcggccttacctgtgccaaacggcttatggaaatgttgccgggggaggacatagtctttttaggcgacacggccagaaacccatacggcactaaaacaaaggaaaccattgcctgctataccaacgacaatgttgcctttttgcagcgcagaaatgtaaaaatgataattgcggcctgcggcaccgtatccagcaatgttcccataggcaaaattcaaaatttgcaagtgccttatgtagatgttataacccctacggtacaaaaagccgttgccgccaccaaaaataagcgcataggtataatcggcactgcggccacaataaaatcaggcagtttcaacaaccgcataaaggccatagacaagagcattgaaactgtttcaaacggttgccagcagcttgtaagccttgtggaaaccggatatatcgacgagggcaactttataacaaacagcgtttgcaaagagtatttaaaacccattaaagaatttgaagcggacacactggttttaggctgtacccactttccaattctttcaaaaataatccaaaatattatggggaacgatgtaactcttattgatgcgggatatgaggccgccagggaggccaaatcagttttggaggagaaaaatcttctcagagaaatcccctccggcaagcgcacattctatgttacaaaatccccggaaaattttgacaaaaccgcaaatatatttttgggaaagggcgcagatgtgcactctgttctgcgggatataaaggaatgaaaatcaaggaagattatataatcaccgttgacagcacctatatcggcggcggtgaaaccgacagtatgagccttaccacggtgggctcttactatattaaaaacggcaagcagtatatctgctaccgggagagcgaagccaccgggtttgaaggtcacacaacgaccataaaagcaagtgacagcggagtttcaataaaaaggttcggagaaaacagctccctgatgataatcgaaaagggtgcggtaaatgtttgcaactataagacccctatgggggaagttttgcttgatataagcggagttgaaattgaaaatcatcttgacgaaaaaggcggaatgttgactttcaaatacgagctgagcttaaacggcgaacttttaagcgaaaacaaaataattgtaactgttaaggagataaaataaagtgaatttagaaaaatttgacggattaaacactgccaaaaatcaaataagccaaatggtaaaatcagcttttaccgcagcctgtgaaaaaggtcggcttaccgccaacggcgacatcaaagactttacggtggaagttccccgggatttgaaaaacggcgacttttccacaaatgccgccatggtgaacgccaaggtattcggcacaaacccaagggcaatagctgccgcccttgttgaaaatatgtcttttgacggtacatttttcgacagagccgaaattgccggcccgggttttatgaacttctttttaaataactcttattttgaaacagttgtaaaagccgttttggaaaacaaggacaactacggcagaaccaactacggcaacggtgaaaggctcaatgttgaattcgtatccgccaaccctaccggccctatgcatttgggcaatgccagaggcggcgccttaggtgacattttggcagagtgcctcatttggtcgggttatgatgtaacaagagaatttttgataaatgatgccggcaaccaaatcgaaaaattcggtctttcccttgaagcaagatatatgcaaattttcgacaaagattatccatttgacgaaaagttctatcagggtgcggacattatagcaagggcaaaggaattttacgacattcacggagattcctacaaggacaagcccttggacgagagaaagcaggctcttatagactacgcattgccgaaaaatattgcggatatgaaaaagcacttggagaaataccgcatcaagtacgatgtttggttctccgaacaggaaatgagaaacagaggcgatgttgataaggcaatcgcaaaacttaccgaaaacggctacacctacgaaaaggacggcgctctttggtacaagggcacggctttgggtgaagaaaaagacgaggttttggtaagagcaaacggcatttccacatactttgcggcagatatagcctaccactatgacaagcttgtaacaagaaactttaaaaaagcaatagatatttggggtgcagaccatcacggccatgtgcggagaatgaaaaccgcaatggaggctctgggcattgattcaaacagacttgatgttgttcttatgcagcttgtaaagcttatgggtgacgcaaaggacgaaaacggcaatgttattttagacgaaagcggcaagccgaaaaaggttgaaatccgtatgagtaagagaacaggcaaggcaatagctcttgttgaccttttggacgaagtgcctattgacgccgcaagatttttctttaacacaagagagcctaacagccatcttattttcgaccttgacttggcaatacaggaaaacagcgaaaacccggtttactatgtacagtatgcccacgcaagaatttgcagtattctccgtgctttggagagagaaaacctgacatacaatgagggcgacacggtaaatcttgcacttctcaccgacccaagcgaaatcgagcttataagaactctctcttatatgcctaacgaaatcatcgccgccggcaagaactacgacccgtcaagaattacaaagtattcggtttcattggcaacggctttccaccgtttctacaccgcctgccgtgttatgggggaggattccgagctttcaaaggcaaggcttgctctttgcgtggcatctaagcacgccattgcaaactgccttaaaataatgaatattacaatcccggaaaaaatgtaacttttacacagcaaaaccgccgtaaaacggcggtttttattgtttaaacggtaaaattttataaaaatgtattccataaacttacatccgtgtgttataataatactataattaagcgttaaatttaaaaacggaggataacatcatgtttaaacttttaaaaaacgccacggtttacgccccggaaaaattagggaaaaccgacattttaatttggaacgacagaataatcaaaattgcccctgaccaaaaaatacctgagggctttgagggcaaagtttttgacctgtccgacaaaattattattccgggcattgtagacacacatgtgcatattaccggtggcggcggcgaaggcggctttaccaccagaacaagcgagataacttttgaagaaatcgccgagtccggcgttacaactcttgttggggttttaggcaccgacggctacgcacgccgtgttgaggatgttcttgtaaagaccatggctcttcgtgaagagggctttgactgctacttccttacaggcagttacaccttcccaatcacaacaatgagaggcagtgtggcagaagacattatattcaacgaactctgccttggcacaggcgaagttgctcactgtgaccaccgcagcagcggtatgacctatgaggaattcagacgcttggctgccgacacaagaaacggcgcccgcttggcaggtatcaaaggcgtgctgaacattcaccttggcaactatccgaatccggcagactacttcctgcgtctttgtgatgaggatataacctaccgcccacttatagtccccactcacattacaagaaaggactatgtatttgactcctgccttaaattccttgaagccggcggtcaggttgacattaccgcaggtggcgagggcgatccggcacaacattcatacggctcggtagagggtcttgaaatgatttataaaaaatacggcagccttgacagagtttccatgacaagcgacggcaacggctccgcacctatctgggacgagcttggcaatatgataggcatgggcaagggtagctgtaaagttcttcttgcggacctgaaaaaagcggcagacagaggaattatcccatttgaggaagttcttaaaacaatgaccacaaccccggcaaagatttacggtcttaaaaattcagccggcagaatagttgaagacggcaccgcaaacttcgctattttggacagtgatttcaatctttccgaaactatactcaacggcacggcagtttggtataacggcaaggttataaatcacgattgatttctaaacgcaaaataacagtcaaaaaccgactctctcaccttttcggcgagagggtcggtttctctttatccgattgtactcaataatcgtaccttgccacagggcttattttgtcgttaatcaagccaaagatatagtggtcttcccacttgttgtttacttcgaggcactttttgcaaagcccctctttttcaaagccgaatttttccataattctcaggctctttgcgtttctgggcataacataggagtctatgcggtgtaatttcaatatgttaaagcaaaagtttataagttcctctaccgcttcgctgcaaagtccctttccctggtaatccttgtccattttatatgatatagttccgcttttaacgctgccgaacataacagagcctatgcacaccgttcctattattttcttctccccttttaaggtcaggtaatatcggaattccgtgccgttcatggtgtccttgtagtccaatttaagcatttggcggcatccccgcttggtgtaatacatattcgggcgggcaggctccgtgtcctccaaggcctccttgtttctaaggttaaagtcccgcacctcctttgccagctttgggcttgaaagggtcatatacattctccgggtcacaagcatataacttcccataaaatcctccgtttaaagttaatttaaaacatttatctattgttttacttaaaaaaatattgtattataatatataaacaaagtaaactctaattattatacgcctttatacctttggtatcaaggtgaatttacagtcaagaggtgtaaaaaaatatgttttcacttaaagcaagggcggacagacttcgcaaagttatggagcttataaaggccgatgcctgtattgtgaaaagcgagcagagcagaaggtatcttacaggtatagacacagccgagggtgtggttgtaatcaccagagtcggcaacagatattttttggtggatcggagatatgaagaatttgccacaagacggctttctccccagggctttaccgtgcgcacagtaggtcggcactcggaatacgcaatgtttataaacgaaattatacagtcggataaaatttccgtggctcttttggaaagcaacgcaataagccacgaggattatttggagcttgaaaatgccctttacgccaaaataattccccttaaatcccaacttgacaaattgagaatggtaaaggatttggaagaggttgaaaatataaaaacagcccaaagaataagcgaaaagagctttgaggatctgttgccgtttataaaacccggcgtaacagaaaaacaggtacaggcaaaacttgttcagcttatgcttgaaaacggcagcgaccttgctaagttccatatcacctgcgtctccggggcgaacacaagccttattaacggccgggcaacggataagaaaatagaaagcggcgacgctcttatgttagagttcggcgcagtttacaacggataccgcagcgatatggcaagaacccttgttgtgggcaaagccgatgaagaatttaaaaaggcttatagaattgtacaagacgcctgtgttataggtcggctgtacattaaaaaaggtgtatccggccaggcagccgacggagaaatccgccgctacatagaagaaaacggttacagagattatttccgccactctctgggtcacggtatcggcgttcagctggcggaagcaccgtatctctcatcggattcaaaggatattttaaccgccggcaatgtggtaacccttgaaccgggtatttacatcaaaggtaaattcggtataagaattgaggatttgctgtatatctccgcatccggtaccgaaaaccttacaagaaccacaagagatttaatcgagctttaattcttgaccgtattaaaaataaaatagattttgtattttataaagttttgcaataaaaaatcaccttggcaggctgcccgggtgattttttgtttgcattttttattgctataaacagaatatttttattattaaatctttcaaattaaccactttgtcactttcgtaggaacaatgaagcattgctgtttttgaggctgttatttgccgccgaaatttgatttaaacaaatgggtttgacaaccattttgtcacctaaaaggtgacatttcccccataagacggcaagcccgacaaactgcaaaaccggctcgctttggtaagatgataagatgtaaggaatttacaaaataggctcgctttgatacacttgtttggctgtaaatcaacatttccaaccgaacgagtagcaaggctcgctttgatacgattgtttggttgtaaatcggcattttaaatcgagcgaatagcaaggctctctttggtaaagagagctgtcagcggcagctgactgagagattgataaatatttcgcatatataatattcggttacaaatcggcattttaacctcaacgaatagcaaagccttctttggtaaagagagctgtcagcggcagctgactgagagattggaaacattttacttatacccgatatttgtttacaaatcaatttattttataaagcccaagtcccgtaatttttcttacaaatatgcaaatctgcaatttacataaggtattcaatgaacacttcacgacttaatttatattgcttataaaacttatgtcttttagataccgataaacaaaaaagattcgatttctcgaaccttttaagtgataaaatattgtttttattgattttccaattttctgcgcattgcttcaagttcttcaagctgccccatgtccatccagctctcctcacttaccgggtaaacccccactttatatccaagactgcgatatttttccataatgtccgggaaagacacggcggtatccggctgtaaatcgtctattattttcggatctaccaaatacatacccgtatttgttaaaaagttcattgtgggtttttcggtaacggagtcaatttctccgttttcgcccatagtaaaaacgccgtaaggaattgtaacatgcttcaaagcgcaaacaacggttataagatttttgtttttgttgtgaaacttgataatatcgttgtagtccgcctcaataagcacatcgcaatttgtaaggaaaaacggtgtgtctatcttgcctttcaacagagaaagtccgccgccggtgcctaaaaatttgtcctcgtcaacaaaatccaccgtgtaatctttatcgtctatttcgttaaagtaggccttaatcatgttgcgcttgtggtttacaatcatcttgaaatcggtgcagccgaaagccttaaagcggtttataatatgttccactatcggcttttcccctaccggaataaggggtttcggcaaaatttttgtgtaagggtaaagccttgtgccaagcccgccggccataataaccaccggcaaaccatttacctttttggttttgattttactctcgtcggagaaaaccacatcaacgatatttccgtcggtgtccaacaaaggcaaagccgcaatggaattttgcaccatacaatcatttgccccggagcggctgcccacatttaaataaatagggttgtagttagccatttgagaaaccggagcttccaatttgcccccgtgcaaaatatgacggcgaatatcactgtcggtaataaccgcctgcaatttcatatccggggcgataaaaagtatttttttgccggtttcgttgagctttttcatggcgtcgataaccgacatatcttcgcttacaattaaatcttcaatgagcatttttcagattaccttttatttagttaaatcaagaatttcttcgcatacgatgcgaacttcttcttccgtaaggccggatgagcaaggaatgtttacaattttatcaacataatttcttgcgttgggcaaaggcatacacagagaatcaaggtatggtttctgatccgggttaagcaaccaaatcgggcgtgaccgaatatgtctttcggccaatttgtacataagttcgtttcttgtaatcttgcaatcttcaagataaagtgagtagaaccacatgcttgaacgaattcccggtgtgtaaggaataaggcgcaagccgtttttgccgttgagcaattcgcagtaaagtttaaagttatcgttctttgcctttacgaatttttcaaggttttcaagctgagccaaacccaaagctgcggcaatgttgttcatacggtagttgtaaccgacttcggtgtgaataaacagcaagttgtcctcttttttggacatatcctgcgcttcttctgtcaaaatggcaaggtggtgttttaccacatcatcatggcaaattgcaagtccgccgccgcctgtggtcataatcttgttgccgttaaaagagaatgcgccgtaatggccgattgtacccaaatgcttacccttatacctgccctcggttacaaatgtgcctacactttcggtggcgtcctcaataactgccaagttgtatttttctgctatgtccataaggcgttccatatccgccatgttaccgaatacgtgaacaggtatcatggctttaacatgagcacctgtggttttgtttataagtttgtcaccctgcatttcgcagtagttgtcaataaaatactgtacgctgtccgggtccatacaaaaatgtttgtcacagtcaacaaacacaggttccgcaccgcaaaagcgaacggggtttacagcggcgataaatgttaaagaagcgcaaataacttcgtcccctgggcctattcctgcgtctacaaggcagatgtgcaaagcggcagtgccggagtttgttgccacaacatgttcggaatgaatgtattccgccatggctttttcaaattttggaataagtgggcctgctgtggaaacccaagttgaggctatagcctcgtctacatactttctttcattgccgcaaaaattaggcaccgaaataggaatatttcttgtattcatatatattctcctgttaatgtaatttgcagctgccgcagtttacggcgctgtacctgatattttaaaatctgatttatctaattatacaactaaatcataaatatttatagtgtcaatttgtatctgtttgcctgtatttgtaaacaaaccgttaattttcatcttgtggctgccgattttccggcttgaatacattttttacaattataataggcgaaatgacaaacaaacatataatcaaaaatgcaagagcctgatcggcattaaaaatataccggcctaaatttttttccacaccatttatgtgtatggcctgtatgttcatgccgacgccggcatacattgcagggtctatgcgaagcctgttaaccttttttgcctttgtgtcaaaaactattttttcatcatcggcaatgttgggaaacagcctatttttggccgaaaagccctgccccggcttttgtgcgtagtacacttccgcctgccccggcggattattaaaacttatatcaagctgtatgtgatttatataaacaggctcttcaaattcaatcaaaatttgcgggtcttcggtgtttgaatagtaagttccctcccattcttctataccctcagtctcggtttgagaaaccgaatatgtgatctccggcatatttccgctgttttgtaattttttttcaagggcaaaatttataaagccgtagattggaaaacagataaccgccaccccgatacacattttaaccgcaagatatttatccgtcagtatttttttgattttcaatttattcaccgcctttaatgtgattttgacactttacggctttccgtaaattttttatctgtaaggaaaacatctctaaaaataagcaatgcggaaaataaaaatgtggtgacaacagcaaaaatgaacatgtgtgtataaccggggataaaatattcaagaaatcctttttcattatttattcgtattcccttaatatccattcccacaccggcatacattgccgggtcaatgcggatcattgtcattttctttctgtcgatgttaaacatcaatttgtcactttcggacgaatttgaaaattccctttttctctcggaaaatccctgacccggtttttgggcatagtacataaccgtctcccccgggttgccgttgtattgtacgtccatctctacacttgtaacataaataggtttttcaaaataaacgataatctgtgggtcaccgtcggtggaatagtaaattccttctttttccgccatagcaacggtttccgtttgccgaatgtcataagttgccgatggcatatttccggtctttatcaatattttatcaaccgcaaaattcacaatccccataatcggccagcaaattataatcgcagcaatatatgcttttgcaacaaaatatttatcccacaagatttttttaattttcatctactgtacctgcctttatgaaactgtattcagcattgccatcggcaagatattccactttgtaataatacacttgatttacacctattgtatttggatttacatcaatataatcgccaaaataatcagcgatattactgtcggaagaatctatcatcagatttgttatgccgtgttcttttaaataggcggcaaaatcttttctgttctgttccagttctgctcccgtcaatgtcatatcaatctccgggtagtcacggtaaataacattttccgcaagttcgtatgtgtataaaaaccaggtctctccgtcatcacccggcgctatcagatatattctgtcttgccggcctattgcgtcctttatcgtgtcggcttttttctcaattttacggtgttttgcaaatgtaagctcgctgtaaccgtaaaatgcgttttgcggcaaaatcgcatacacctgtataaacagaataaggcttgtaatcccggccagggcaacttccgcaagtttttttaaatttgcactcaggcagacttcaatcagcacacacaccgccaccataagccagaatgtgtagtagcttgaaatatatcttgcgtagccgtcaagttcataaccggatgccttaaaaataaacacatacaggaaaatatggaacacatagtaacctacaaagcctattgccgtgcctgcatatactgcccgtatatgttttttcatctgtttgtttgccagaataaatgccaaaaggaacacagcggtaatgatgataacacctatatatccccggccgaatatgctcattttccatgtgaaaaaggcgtctaacatactccgttttacactggcgaacttaggcagaggttcctttgcaaaaagctgtgtaacccctgcaataagcatttccgccatgcccatttccgcctcgccaccaagctcgaaacggtttaccgacataaccttagacatatgcactgtccacatggcaaaggacataactgaagttatgcttaccaaagcggcactgccgagttttttaaagaaaacagtgatttttttaccgctaaatccgtcgtttacaaataacagatgcaagaatataacaagggctaatatgtttgaaaaagcaaagcccatatcttttacatcggtcaaaaagaatataatcggcaaggctttcagcacaccggcaaggggctttttgtctgtgtaatacacccggaatgcgccgcaggcaataaccgccaaaggtatgtcccgcagtgtgcacatataaattgtttcaagatttactatccttgtgtaaatacggaaaaagtaaacggaaaagaacaatgctatatatcccattgcccgaacatggaactttttccaatcgaattttgatattgcagcccggtaacaggcaaaaaacattatatcgtaagccacataggacacccactgccgaaatccctctgtgaaaaattggaagaagtaggccaaaaccgtcaacgcaggtggggttgtattgcctatcatgctggattcgtaataagtgtaaatcgcattgtgtatttttgtaagtttttgggctgtgccccaaaaagaaaattcatcccatgtggagaaaataggctgtcttgtaccgaagtagaatattataaacagtgacgagagtataaacataaccgttgccggtgaaaaaaagctctttaccctgtcaatatttttctcctttgccgtttttgccgcagccaccaaaaaggccgcaacagccaaaatacaggcgactgcacagcctaaaaacagcttgtccaaaaaggcgaacattataaccaaactaagcataaggcacatggttataatataggttgccccccgccttgtttcggtaaatgtgtaaagggcaaatgcccctgccaaaattattaaaaacagtataagtacatggcttatcatttacttaccctttcccaaatttaatttatatctcgtttataaaagtatatttcacaccgttttcggtgtagtttaccttgtaataagcccgccggtcataccccatgtcatcagggtaataatccgcattggggcgtatgcattcccccgcaaagtaattctccgaatcaagaagaagatttgtaaccccattttctttaagatatttttcaaattcctctaatgaattttgcggattttccaagttaacctgtgtcggctgaataagaatattatccgacagcgtgtaagttgccacaaaccaaacaattccgctttcctcggcggagtaaacataaattacatcgtcaccggctatcacatgggctaatttatcggtttttgcctgtgtgttcatccttgcaacggaaatattttggctgtaattcaaaaaagtgttagccgggtttacggttttaaagaaatatccccgaaggaatacaaacaccgcaaacggcagggcaaatgtgattttcttttccttgttcgcctttcccacggcgcaaaggccggcaaaaaaccaagcaatataataagtactcatatagcggtcataacttgcaagggtgtaggcgtcgtctttaaaaataaaagcatagaggaacaaatggaaaatatagtatcccacaaaacccaccgccattgcgaaatacaaaaccgcaacagattttttatcttttttctccgccgcaaaaaaggccgcaaaaaacagaataaatataacccggcaggtcataaaaccgccgccgaacagcgacaccggaacagagaaaaatgcggaaatcatcaaagattttacatcggtaaatttttgcgtgggttccataaggccaaacaaagattttactccttcaatcagcataccgccgtaacttaccgagtcgccgctgcttaccggggcattggggtctatggaagcagccaaatgctttgcccacagaacatagaacaaaacagtgacaaccgcaacggaaagcgccgccaaaagcgcccccgcaaaacccttgaacctaaagaatttcccgttttttccgtcaaaaagcatatcgcaaaaaacgcagaaagccacaataaagccaagtgccagccccatgtccttaatcaatgtcaaaacagccacaaggggcagcaaacaaaatactctcttttcgtttttttcttcgtttaaaaaatatattcccaaacagccgccgaacagcacccccatgggaatgtccgccatgacggaaatatatgtataggaaaaactctctcctctgcttgtcacggtaagcaaaaacaatcctaaaaatgccgccgcaaatgcggaaaaagcaaatgttttattccttttttcaaatggtatcccaagcagcgcaaagcaggcaaaaataagcacatcatatgcgtaaaaacagcgccactccataaaagtgttgcttgcaaagtcaaacaagaatgtaagcaccgccaatgagggaggtattgaaacccccaaaaggcttgatttaacccctgtgtacaacattttgttttcccaaacaattttttgggaaagtccccagaaagaaaattcgtcccactggccaaacaaaggctgttttgcctgtaacaccacagccatggcaaaacaggctattaaaaaggccgttacgccgggggtaaaaaagccgaaaagtctctctttgattttattttttgatttataaagtgtgtacccgaaaagaaaaaccgaaaccgccaaagtgaaaataactccgggcaaaagcaagccggccatgccgaaaatcataccggagcaaatccacaggcacaaagcgattacaggtgtggcagaaggtgccgcatccgccaaaccgtatattgcataagccaggcacaaaaccccggcaagggttataaaacagttaagcaattatttttcccccgtttctgttttcttaaaaggcaataagccgagattttttaaaatctccgccgcacctgcaagcatagccgaaaaaacaataatgttaagccaatcggaagcctccggttttagacaaagacccaaagccatatttcggttaagtgtgaaatcggaaatttccattaaattcccccgtgaaaccgtagggtcaattcgcaaagaatatatggttttgtcacttactttacagccgtaaacattttcttcgccctccacaggcacagccctcaccatttttttcgggttgtaatcttccccgggcgctgtggtgtaaaacacacttatccgccccgagcaaaggttagatttcagtttaaaagtaagatagtaacacttaatttccccgttaaaaacaaattgggggtcgctgtcggtgcttacatatcccttttcgatttctaccatactgttgatttcaaaatcagctggctgcaaagtgatttccggaaagtttttaatctttaaatattcaaatgtcgaaaacgccgtgtaaacaaccattgtcattaaaaaagacaaggcaagtgtttttaaggcagaaaatttatctttcaaaatttacctcctacgccacaaaaacccgagccgggcgtggcagatagtaagttataagcataagagctgcggcaacaacacagaaaacacagcttgtaaccacacatgacatatcggtgttttttacatcgggctttgttctcttgccgaaatattgccccaaaaccatacaaaagcccataaaggccgggtaaaaatacctcatctgcaaacctattacctggggcagcgtaaccggcgtccaagacaggtacaaacccgttaccacaacggcgtaagtcagcagtgaacaaattaaaaaccgcaaagtttttctcgtgtcttcccttgtaaaaatattccgctgttttacacagcaaagaatgactgccacaggggtgagataatttacaagggataattttacatccaaatatcctaaaagtccgccgctgaacaggaaaaaagaattgttcagcaatgtgtcaaatgcaacagcccggtatcttaaaggattttttaaaacaaatattaactgtgccgcagggtcgctgttttccattgttctttcgattaccccgtaatttgaaaacgcttttacataaagccccatgccctgatacagtaatacaaaaaatacaagacacacagctccccggaacaacctgccgtgtttttttctgtttacctctatgtcaaaattttcctttttaacccctaagagcaaaagtaaaaacacacaatagctcattttgtgtacggttaaaataccataacttacccgaaaggcaaacagcattttattgtcaaacttttccgccaaaacacttgcaaacataacaaacataaggccgaaaagcacagcgtcgctgttgcaggaaccgcaaataaaaactatcaacggcattgccgccaaggtaaacataattattttaaatctgtctgcggttttaaaggcccaataggcgcaaatgcagaaaaacaaccgatttgccaatcgacagccgtaataagcccccagtgcgccgaagcccaaaagccttgccaaaaatatacctattgcaccgggaatatacggaataacctgaaaaattataatcgacaaatttccccgttcctctcccgaagaaacagcggccttgtaatccgtaaatctgtcataaacggtatctccctgttttgccgggtggccgttgttataggcagtgggaaaatatttcatcaaaaggcgcacatcgtttgggtaaatatggcttgcgtcaaagccccattgcccctctgccattgaataagcacgaagaaagtgtgtgttttcatccggcacttggtttggcggcgtggcaaaaacaaacagaacacccaatacaaacaggcaaaggcttaaaaacagccgggaatttttatccttaaaccttgccccgaaccggataattccaaacaccacaaacagcgtaaaaaatacggccaaactgccctttatctgtccaagccaagccggggaatatataaccctgagccaataaaccccaaaaaagctgattataaataaaagcaaacagcccataccgaaaatcagcacaggcctttttgctaaataattaaatttttctttaaccgcatccataattaaaggttgtagatgtccggcttgtaagcattcaaattgccgcgcatccattcaatagtttctgccaagccctgttcaaatgtgtaattcggcttccagcctgtgagaccgttgagctttttggctgttcccaaaagacggttcacctcgctcttttcagggcgcagacgatcctcatctgttacgattttggcatttgggtttatctgacgaataagctcgtttgccaaatcgcctattgaaatttctctctcggtggcaatgttaagctcctgcccgatggtattgtcgtgttttgcgattgtcacaaagccgttggcagtgtctttaacatagttaaaatcccttgtaggtgtgagagaaccaaggtgtatttcctccttgccggagagaagctgtgtgattattgtaggaataaccgcccttgcagactgtctcggaccaaaggtattaaagggtcttacgattgtaaccggtgtgttaaatgagcgataaaagctctctgccatacggtcggcgccgatttttgttgcggaataaggactttgaccctggtaagggtgcttttcgtcaataggcacatactgtgcggtaccgtaaacttcgcttgtgctggtaacaagaacacggcgtgtgtcaagttctcttgcaccttgcaaaacatttaaagtgccttttatgtttgtgtcaacataggtatccggtgaatggtaagagaaaggtatggcaatcaaagccgcaaggtggaaaaccgtgtcctgacctttcatagccgtgcgcacaccgttggggtcacgaatatcccccataataatgttcaaggcgtccttttcctccttggaaaaagtgtcaatccagccccaagtgccgaaagagttgtaagcgcaaaatgcggtcacgtcatatccttcgtgtataagctgctgtgtcagatgagagccgataaaaccgtcggcacctgttaccattactttttttgacatatataaatcctcgcttgtaattatattttaacaccatacattatagtataaataccgcaaaattacaatacaaagggaaaatggtttacaaaattttaatagatatacacgcaaaagttcgttttttaaaagttttcggctgtgtttcggctgtcggggtcattccgccgtttacaaaccgcaaaaattatactataatgtaatgtaacgcttttttagcttatattctacaaacagaggtttttatgagcagattacttaaaaaactgttttttatttttttgccgattggggtttatctcggcattttcgtatattttgaaccctataattactttgggatcaaaacaaaaaattacgacccggacagcgcaatagtccgtgtcagaaattatatgcaagacccggcagatgttatcatcttaggggacagccgtatggctcactttgatatggacacggttggagagcttgtcggcgagcctgtggggcagctgagcttcgggggtgcggcttttaacgagagcatggacttgctggaatttgcaatggacaaaaacccgaatttaaaaaccgtctacttcggggcgagcttttacaccttaaacgagagctactacaaggacagaatgagctccatagaaaaaacggcggaaaatccctttgcctacatcttgaattttaactataatattgagatgctaaacaacatcaaaaataccctttccggcggtgccgcccttgacgaaaaggagataggccactggacccaggaggattaccgctaccccgacggcacccggcgacctttccgcaaaaatttggaggaatatgccgacacaatatactcggtgtgtgaaaattacaaatccgataaggcggacgttgaaagatatatcgagcttttaaagcagtgccgagaaaaaggcataaccgtttacaccgttttgcctcccatggacaggtcaattcgtgaactggttgtggacaagctgggcataggtccggacatacttgaatttatagacagcgtaaaggattactcacaggttttaaattttgagtatgtggacgatgacccctttaccgagtacaatttttacgacggcttccacttggatatggaaaccggcctgccgatttttacaaaaatgctttttgagaggtaagagaatatgagccttgattttttgattttatatgaacatgttgtccgtgaatacgaaagtatcacccttttaaagttggagcttgaacgccgtggctacaccgttgacatccgccagcttttagacaggaaaaagttaaaatatttcacatggaaaaagccaaaggttttggtggcatccgccatgtacgacgacaaaaccatgaacagctttgtatataataatgtgggggtttgcaacaaggttgtaaatctgcactgggaacaggttttaagtgaggagcaggaaaacagcccgtttttcaactgcgggcagtctgcctcatacgccatgcacacctgctggggcactgcggcaagggacagaatcgtaaaatacggcgttcctgttgaaaacacaacaataaccggcccgattcaaatggattttttgcgcccacaatttaagggctattataaagacaaagaaaatctgtgtaaggaattcaaccttgacccaaacaaaaagctggcgctgtacatttcttctttttccacagcttatatgtccgacgaagaagttgaagaacttaacaagctggcaggtgtgggctttaatcaatttaaaataaccagccaaaaaaccatgaacacaaccttggactgggtggacaagtaccttgacaccgacgagggcaaaaacattgagtttgtctatcgccgtcaccccagcgaatggaacagccccatattggaggaaatggacaaaaaacacgaaaacttccaccttatcaccgactactcggtaaaacagtggattgtggcaagcgatgtaatcttctcttggataagcacatctattgcggaaatttactttgcaggcaaaagctgttttgttgttcgtccctacccggttgaatgggaatacgacccggttgtttacaaggactgcaatcggattgacaactacgaggactttatcaaatgctttacagcagaaaatcctccattccctatcagtgaggagcttatgcacgctcactatgattttaccgacaccccaagttatataagaatggcggactgccttgaaaaagtccttttggaggacgagggcgacagacgcccctttgaccactttaaacctaaattttcttggcttaaatgtttctctcttgtggttttccactgtatgttccgcctggggcttgacccgg

SEQ ID NO: 1515 - DNA, 2788 bp, Unknown
  16S sequences of unknown bacteria
ctaccgcaactttggaatatatgagaaaagtccgaacagttttctgcccggactttctcgctcaatcataaatcaattccgctttcacaatctcctctgcctgtgccttgcaagcgttcatctgccgcacccattccatttggttttcagctttcagttgctcggtcacgccgttttgctctgccagtgaccgcacgatcagctccatgcggtttcgtgccgcttcgtcaatcttagcgcaatactgtcttacgtacacccagctatgtccgggggattgctgtatacagggggctttccattgcgcatgaatcgccttacttttcaaacacctttgccacgtcttccagtaagtcccgaatgttcaggtgctgggggcagatgtcttcacactggccgcacttgaggcagtcggaggctttcgcggcgttcttggtgcggacgtcttggtagtaatagtcgctgttccagtcgtggaactgcttttttgtgttcatgcaggcgaacaggtcgggaatgggaatgccctgagggcagacctcggtgcagtagcggcagccggtgcagggaatcagaccctgtccccggaaaatcgcgcagactctggcaatggccatccgctcttcctcgttcagcggctgaaaatccttcataaagccgcagttatccgccatcatttccgtgctgcccatgccggacaaaaccatccggatgccggggaagctggccgcgaagcgaatggcgtagctggcgttggagccaccgtgaagcccatccagcaccttctgcgcatcctccggcagattcaccagagagccgccctttaccggctccatgacgatgacgggcttgccgtgcttgcagcagacctcgtagcacttccgggattctacggaggtgtcctcgtaatcgacgtagttaaactgaatctggacgacttcaatttggggatattcggtgaggatttgatcaagaacctcggctttatcgtggaaggaaatgccgaaatggcgaatttttccctcgtcccgcagcgccatgaccgtttcataggcgtgcatctgcttgtacttggcaaacaaatccttattctgggcgtgcatcaggtaaaaatcgaaataatctacgccgcaggcttccagctgcttctggaagaagggacggatgtcctcgtttttctcaatgtagtggccggacagcttattggtcagaatgtacgcctcccggggataacgggaggtcaggcattttttcagcgcgatctcgctctggccgtcaagatagccgtgggcggtgtcaaaatagttgaagccgttcgcgagaaacatgtccaccattttggcggtttcttcaaaatccacttccttgcccttcatgggaaggcgcatacagccgaaaccaaaatttttcttcacttcgtcaaaacaggactgcatattgggattcctccttgatttcccggtatttttcatataccacaagtatatcatccgatagtaacaatcggtcaattggcaatttctacaaatattgcagcgggttttctatgcggcctgctttgttttagcaattttgcgaatcaggctctcgtgcatgacggccatgagcaccagaatcaccagcagatacgcaggcagcagcgaaacggaaatatgctgggcgagcagaccaaacagcggcggcatcaggcaggtgcccacataggcgcaggccatctgaacgccgatgattgcctgagacctgtccgcaccgaaatgcgccggggttgagtggatgatgcaggggtagatcggcgcgcagccaaggccgataacaacaaaacccaccagagaagcggtcgccccgaagggcagaaacagaataatcacgccgcaaccgatcagcccctgcccgagacgaaccatctgggtatcgttcagcttcatggtgacaaagccgctgatggcacgaccagcggtaatgccgatgaagaacatactggcgaaggaggctgcagtctccgggaggacgcccttgtggagcgtcaggtagctgcttgcccacagtccggcggtctgctccacggcgcagtagcagaagaagcaggccagaacctctttcacgccgggaatccgcaggatttctttcagggaaaggggcttcgcttccgtctcgtttcccgaggtatccacgaccttggggcgcttcttccagagtggcaggctgaaaatgagcaccacggtcagcaccagctgaatcacggagatggtgcggtaacctgcgttccatgtgccgccgctggtcatgacatagcccatgatgtacgggccggaggcggcgcccacgccccacatgcagtgcagccagctcatgtgcttgcttttgtagtgcagcgccacgtagttattcagggaagcgtccacgcttcccgcgcccagcccgtagggaaccgcccacaggcagagttgccagaaggcattgctgacggaaaatccccacagcgccacggcggtcatggccacgctgacggccgtgaccttccccgtacccagccgccgggtcagccggtcgctttgcaggctggaaacgatggttcccagcgcaacaatcatggaaatgataccggcataggaaaccggcacatcgagctggggatatatggtcggccacgcggaaccgagcagggaatccggcagtcccagactgatgaaggacagataaatgatgatgagcagaagttgaaacatggtaaaaacctccgggcttctcttagggtctatctgaaaaccgggaatatgaccaacagcga

SEQ ID NO: 1516 - DNA, 2082 bp, Unknown
  16S sequences of unknown bacteria
gagcacatgacttttaatcatggtgtccggagttcgaatctccgatgggtcaccaaaagacaaaagcgtctccaatcggagacgcttttgtcttttatttatttcaatataacgtgattcattttctttccaaaacaggttttgccgagacaaatacaaagcaaaaacctacgacggcgcaaaatacgacaaaaaatttattgttcccgttgacaaagcagacaagataatatataattaaatcagtaaattaaccatattgcaatatggggattcggaggaatataaaaatggctttttgctcaaaatgcggcaaacaactcgatgaagactcaaagttctgtaccggctgcggaacacccgtcggaacggtccaaacaaatcaaaacggaagcgtccgtcccgaatattcgacagcgcaggtcagaaaaacggatttttccgaagattttgcaagtaacgacaaacatgaaaaccgtgccgttgcggcagtttcctatgtaggtccgatgttctttctcccgcttgtggcaacgcccgactcaaaatttgcaagatttcatgcaaaccagggcgtggcattgtttatgctttcgttggcttacagcgtggtttacaaagcgttgctttggttcttctctgaaattctgataggcgcggcgctaacaaaattctcattctcatacttcggttacggcgcggcgaccaccgtgtacgggataatcagcctgctgctcacgcttgtatgggtcgcagtcattgctttgtttataatcggaattgtcaatgcgctcaaaggaaaagcagcggaacttcccgttataggcaagataagattcttcaaataagaagtcttcggacggctgaacgaactcagtctgaatcaacaaaaaatcatgcgggaagacgtcttttgatgccttcccgcctcattaaaaaggataaaaaaaatatggaaagaaaattttgcacggcgctgtgtcttatcttggcgcttctgttttttaacggttgcggatttataaatttcagttttgaaacgactgaaccgcaaacgaccgaaacagagataacgacaaagataaccgatgactttgattttgcggtcgaggatgttccaaaacggcctcccgaccctctcggaatacgggaactcaaatatgaagagatgccgacatttgatagtctgaacgctctttcggaatatatactgtggtgtctgttaaacgaaaatatgctcattgaatgctatatttcgaaagacttcgcaaaaaaccgttctgagggaacaaatattcttgaaacggcattcggcaatgcctttacatattatctgtttgcgggattcgaagcatttgagttctatgttgaaaataacgatgaagagaaagacctttatgcaagaataaaactgtactatccgcaatgggaaaaagaccttgaagcaaaagcggaagcccttgaatatattgcaaaaaatcctgttcccgagaacggttttcaaagttttatagaagaacaacggtatgcaaagcagattcacgattttatagcgaaaaaagtgatgtactcccctctcggatatgaagaagacggattacagggtgaagactcttatgaaaacatgcaggaagcatggaatgttcttgcggaagaaaataccgaggctgtctgcgcgggatatgcaagagcatttgcgcttatctgccaatatgcggggatagactgctcatacgtcacaggtaatgaagaagaaaacatcggacacgcatggaacattatatatccgacagacggcagcgaccccgtgatagtcgatgtaacttgggacgataacttttctgtcgataataaaaaccaaaaccatgtcgcgaaagcgttcttttattgctattcggacgttgacagataccattttcccgataagaatatgtttgacttcatagaatatctgcacaaataatactttgtttaaaacaaaaaagcattcagcgtttttgaactgccctaaattgtgcggacagtacaaaacagccttaatggcagaaaatattaagttttaagcaatgaactgacatcgca

SEQ ID NO: 1517 - DNA, 2352 bp, Unknown
  16S sequences of unknown bacteria
gttttacagcacggatgctacgaaactgtctctattacctatcatagcacatcaaaaaagaaaaaggaattagcggttgttgcgccttgcaatcccgctgtaaacagagtataataataaattcgaaaagacttttttacgataatctacaaagaaaaggatggtagactatgacacagtcaagaacacatacctgtaatgagctgcggcttgcagatgccggaaagtctgtaacgctcgtcggctggtatgaaaatttacgaagagtaagtaaaaatctcggcttcctgattctgcgtgacttttatggcacgacgcagatcgtgatcgagaccgaggaaatgatggatcagatttccggtgtaaatacagagtccacactctccgtttccggtgttgtccgggagcgttccagtaagaacccgaatcttccgaccggtgaaatcgaggtcgttccggagaaaatcgagattctcggaaaatgcatttacaacgagcttccgtttgagatcaaccgttccaaggaagcggatgaaaatacacgtctgaagtaccgttaccttgacctgcgcaatccggctgtcaaggagaaaatcgtacttcgctgcaacgtagtcgctgagctgcgccgcagtatgatggaacacggatttctggagatcacgaccccgatcctcacctgctcttccccggaaggtgcacgtgactatctcgttccgtccagaaatcatccgggcaagttttatgcgctgccgcaggctccgcagcagttcaaacagctgctgatgacttccggtttcgaccgctatttccagatcgcaccgtgcttccgtgatgaggatgcgcgtgcagaccgctctccgggtgagttctatcagctcgatatggagatggcatttgcttctcaggaagacgtatttgccgtgctcgaggacgttctcccgccggtatttgaaaagtttggtacttataagaaagcttctactgccccgttcacacgcatttcttatcgcgatgcgatggagaaatacggcacagacaagccggatctgcgcattgacctgactgttcaggatgcgaccgcatgcatggcagactgtggcttcggaccgtttgagggcaatgtcgtaaaggccgttgtcgtagacggattcaagggtacgagaaaggtcatcgataagctgatggctgacgtagaagtacaggcaggcagtaagggctactggttcaaggtagacgaaagcggcgctctgtctggcggcattgcaaaattccttcaggagcgcgcagaggatgtaaagactgctcttggcctgaagccgggtgacttcgtcggcgtatgcgccggtaagaagcttgctgcccagaagaccgccggtgtgctcagaaagtatcttggcgccgcttctgaaggccatatgcgaaccgactgctacgagttctgctggatcgtagatttcccgatgtacgagatcggcgaggaatccggcgagctggagttctgccacaacccgttctccatgccgcagggtggactggatgcgcttgagaataaggatccgctcgatatttacgcataccagtacgatctggtctgcaacggcgtagagctctcttccggtgctgtccggaaccacgacccggagatcatggtaaaggcattccagctcgtaggacttggcgaggacgacgtaaaggcaaaattcccggcaatgtacaatgcattctgttacggtgctccgccacacgccggtatcgcaccgggtgttgaccgtatggttatgctgcttgccggtgaggacagcatccgtgagatcattccgttcccgatgaacaagacggcacaggatgtcatgatgggcgctccgtccgcagtcgatccgaagcagctctccgacgtacacattcagctggaccttccgaagaaggaagaagcataaaggagcactggctatgacatttgcatatcctgcaatcattcatccgacagaaaaaggctacaccgctactttcccggatctgacggactgtgcggcggaaggagacacgttaaacgagtgtctggacaatgcctaccatgcgatgtacaactggctttacgtggagctgaccgagtttgaaggccatcttccgccaatctcccacaaggaggatcttatcctgcaggaaggtgactttgtccggaatatttcggcgatcatgcgcctgacagacggatgggatgagtaagcagataaaaatttgataagagaattaccagcctggagcgatggaaatgagcgcgccgggctggtatttttttgaacgcagataagcgaagcgactgcgttcatgagcaagtagcgaagcgga

SEQ ID NO: 1518 - DNA, 16873 bp, Unknown
  16S sequences of unknown bacteria
taccaagctgtccaaccataatattgtcaagaaaactaaccaggtttgtaactgcattttgcatgatcatgggcaatgccagtgcaatgtatcttttataaaaatttctatctccaatatattttctgtgaaacttttctaacataaatccctctctttatcgaatccccattttaataccagttcagcataacatatttccgtgggattttatatcttctttttcattaatttgtatcggatggtctaccgactcaagtgggtttcttcaaatgtaagagtgaatggatttggcatagtaagaaacatcaacttcattgattgaggttttacagcttttttgtgcattcttccattgcaagcccggggaaaagtaagtatactttagctgattattgacagaattaaaagaggattttgcatggatacacttgcaatgctggaagaactgctggggcaggatcaatttgaactattaataccgaaagacggtatgtcaggggaactacgtctggtttatctgatgaatgacgctgttgagagctttctggtattcaaaaacgcacgaatgacaggagcttatctggaagattatgagggtgagcttacatattctatcagtaaggatgggcgtgggtatgcgctggtagtctggcagggagaacatgccatcactattttgtttgaaatgctggaattggaagtacacttgtatgattatggcgagattgcccatttctgggtcccaaagtatgaatatttacggcagctggaatatcggatcgcgattctcagagataaatatgaatatctgggagcggaatactgcacaccggaggaacagaagctggcacatctggcatattttccaccgctgaattactgctgttacccggcggttccggaaaaatatattgttcccatcgaagatccatggaatccatcagaacaggcgctgaatgtgatggaagagctggcggaaaaagctggaaacaggaaacttgggcgaatgcttttgttatatagaagatttccgtatccgtttctggcaaagcgaatcgcaactatgcttcatagaacaagttgcatgaatgtagtggatctgcttgatcggtgtcttcgggaaactgtaaaaaaatatccgcgacgttcttttggaaagaaggcagacagagaatttgaacgattgctgtcactggcagaaaagaaaaaagaagaattggaaaagcagggaatccgggcagatgtactgcgggaagagccgtttactacagcccgggacaaccttgaagtccatgtatatctgatgatctgggagacaaggggaagagaccgtcaggtgcggattgagactatagaacaaggaaaagaaggaagtacatggtaaagatagatctgatcacaggatttctgggatctggaaaaacaacttttattaaaaaatatgcaaaatacctgatgactcagggcatgaacattggaattctggaaaatgatttcggcgcggtcaatgtggatatgatgctgctgaaggatctggaaggagatcagtgcgaactggagatggtggcaggcggatgtgatgcagactgccatcgaagaaggtttaaaaccaagctgatcgccatgggtatgtgtggctatgaccgggtgatcgtggagccatcaggaatctttgatgtagatgaattttttgatgtgctcagagaagaaccgctggatcagtggtatgagatcggcagcgtgatcacgatcatgaatgcaaagctggaggacaccttgtcagatgaagcagaatatctgctggcatcggaggcggccaatgcgggatgcgtcgtgctcagcagaagtcaggatgcatccccggaggagatcgcaaagaccagagtacatctgaactgtgctttgcaggcagtgcattgttccaggcagtttggagatgagatcattgagaagaactgggaggattttacggaacgggatctggaacggattcagaacagtgggtatcatgtggaagactatacaaaactgcattttccggaaaaggaaagattccagtcggtctgtgtgatgaatcaggagatgacaagacaggaacttgagaaaaaggtacagcaattatttgcagaagcttcctatggaaatgtttttcgcgtgaaaggatttcttggattgccggacggtaattggatggaactgaatgcgaccagacatgagatgacatttacaatttgcacagaaggacaaaaagtggtaattgtaatcggggagaaattgaatcaaccaatgatagaagaagttttaggaggcacagcaatctaatggcactgatattgatgaaacagattattgtcttgtttttgatgatgggatgcggacttgcagttgtgaagctgggaatgttgaaagtagaggatagcaaggcactgtcggttgtatccttgtatctgttgttgccgagtgtggtgatccattcctttgatattgaatatacgccggaggttatgtctggatttttgcttgcattggcagcggcattggcttttcatggcatattgtttgttatttgtacagtattgagttcgatttttcatctgggtgctgtagagaaatgttcactgatttatactaatgcaggaaatattatcatgcctttggtggcagcgcttcttggcgaagaatggcagatctatgcaacagcatttctggcagtacagatgacgattctgttcagccatgggcagtctgtaatggaaggaaagccaggaatcaattggaagaagatcgtgacaaatccgaatatgattgcggttgtagcaggtcttgtgctgtttttgacaccacttcagctgccggatgtactggcagatacgatgacatccatggcaagggccgtaggaccggtcagtatgatcatgttgggaatgacactggcggatattgagtggaagaaactgttcaccgggaaacgagtttatggtatggttttggcacggatggtgctgctgcccttggtggcggtattctttttgcgaacatgggggatgatgtcatcggttcctgacagtcggtcgatcttgctggtgacattacttgcggcaattactccgactgcatctacaattccgcagatggcacagctttacgatcaggatgcagcatatgccagtgcgatcaatgtgatgactaccgtggtatgcgtagtaacgatgccgttgatggttatgttatatatgatgtaagaaaagaggcggaatggacaaaacagtgaaatattatatggcaccattggaatcagtgactacctggatctatcggcaggcacatgcgaagatatatggaaggcttgacaaatattttatcccttttctggagcctcatgagaaacgtgatttcaagaccagagaattgcaggaaatcctgccggaacacaatgaaaatatatatgcagtgcctcagattctgacgaacaggtcagagggatttataaagcttgcaaaggcattgaaagactggggatatgaagaagtaaatctgaatcttggctgtccgtctaaaacggtagtgacaaaaggaaaaggatccggatttctggcaaagccggaggaactggagcgatttttggcggaaatatttgatgcattgtcgggagaagtaaagatttctgttaagaccagaattggaaaagaggatccagaagagtttccggcgctattggagttgtttaacaagtatccaatggaagaactgatcattcatccgcgggtgcagaaggatggttatggaaatgtgccaagacttgagctttatgagctggcagaaaagcaaagcttgaatccactctgctataatggagatctttatacacgggagcagatccggaattttgcagagagatttccggggacggaacggttgatgtttggccggggattcctgcgcgatccaggtcttttatataatgaaggaaaagattcaaaagatatttttgaaaagttctgggcatttcatgatctggtatatgaaggatatcaggagagaaatatgggagaccggaatgtgctgttcaagatgaaggaactctggtcttatcaggtgtatcaattttcagaaccggagcggttgtttaagacatttaagaaggtgcaggattgtaatgaatatgaacagatgataagaaatctgcgcagatagaagaaaatagtgaacaatacgaaaaaagtcttgacgtaccttggttatctgtgttatagttgacaggcgaatggaagtttaggctttttttttatgcctaaaaattggtgattttcgcaggaatcaccagcaaaaaaagtataaaagcgaggtggaaagttgtgcgcgtaaagatcacattggcatgtacggagtgcaaacagcgtaactacaacatgaccaaagaaaagaagaatcacccggacagaatggaaaccaagaagtactgtcgtttctgcaagagacatactcttcataaggagacgaagtaatccgcaaggaacgaaagggaagtgagaaaatgggagagacaacaaagacccagaaaacaagctggttcaaaggcatgaaagccgagtttaagaaaattatctggccagatcaaaaatcacttacaaaacagactattgcggtagtcagcgtttctgttgctttggctctcattatcaaaatactggatatgctcatgacctatgggattgacattctggtaacactgtaacaggggaaaggtgattttatgtcagaggcaagctggtatgtagttcatacctactcagggtatgagaacaaagtaaaagccaacattgagaaaacaatcgaaaacagacacctggaagatcagatcctggaggttcgggttccaatgcaggatgttgtggaactgaaagacggcgcaagccgttccgttcagaaaaaaatgtttccgggttatgttctgatcaacatgatcatgaatgatgatacctggtatgtggtccgcaatacccgtggtgtgactgggttcgttggccctggctctaagccggttccgcttacagaggaagagatgagaccactgggaattcattccgaatccgtacagattgactttgcggagggtgacagcgttgtcgtgatcggcggtgtatggaaagataccgttggtgtgatccagtcgatcaacgataacaaacagagtgcgacaatcaatgtcgacctgttcggccgtgaaacgccggtagaaattagtttcacagaaatcaaacacatgtagcatgaaaaaaagtgggagggacattcccgcaaacaccacaaggaggtgccttgaattatggcaaagaaagttactggttatattaaattacagatcccggctggaaaggcaacaccggctcccccagtaggaccggctcttggtcagcatggtgtgaacattgtacagttcaccaaagagtttaatgcacgtactgcagatcagggagatatgatcatcccggttgtaattactgtatatgctgacagaagctttagtttcattaccaagaccccgccggcagcagtgctgctgaaaaaggcatgtggcctgaagaccgcagctgccaattccaagaaagagaaagtcgctacgatcaagagatctgaagttcagaagatcgctgagctgaagatgccggatctgactgcaggaagccttgatgctgctatcagcatgatcgcaggtaccgcacgtagcatgggtatcactgtagtagacgactaataacacggttgctgacatacagacgtgggagggagattcccgcaattaccactaggaggttaaaaagattatgaaacatggtaagaaatatgttgaggctgctaaagtatatgacaagcagactcagtacgacagagacgaagcagttgctatcgtaaagaaacttgctactgcaaaatttgatgagaccatcgaggctcatatcagaaccggatgtgacggacgtcatgctgatcagcagatccgtggtgccgtagttcttccgcacggaaccggtaaacaggttcgtgtacttgtattcgctaagaatgcaaaagcagaagaggctcaggcagcaggcgctgagttcgttggagctgaggaactcgttccgaagatccagggtggctggttcgatttcgacgttgttgttgcaactccggatatgatgggtgttgtaggacgtctgggtcgtgtacttggaccgaagggcttaatgccgaacccgaaggctggtaccgtaactatggacgttactaaagcagttaacgatatcaaagctggtaaaattgagtacagacttgacaagaccaatatcatccacgtgccgatcggaaaagcttctttcaccgaggagcagttagcggacaacttccagacgcttatggatgccatcaacaaagcaaaaccggcggcagttaaaggtcagtacctgaagagtgttgttctgacacctactatgggagctggcgtaaaagttaacccgctgaagttagcataaaaaagtgttgacatcccgtatatatttatgatatcttataacagttgaagatgactgcccgaagacagcaggtgccgttaggcataaggttaaaacgcctgccgaggaatgcattcgattgagaatgactgattacccctctgtgtctgcggcatagaggggtttttcatccttaccactgggaaggttatccgacgattgaaaaatctataaggaggaaaccattcatggcaaaagttgaactgaaaaaaccggttgtagacgagatctctgcaaatctggaaggtgcagctggtgttgttctggtagaccattgtggtcttactgtagagcaggatacacagcttcgtaaacagatgagagaagaaggcatcgtttacaaggtttacaagaacactatgctgaattttgcaatcaaaggaactgagttcgagccgctgtcccagcatctcgaaggaccgtctgcaatcgctatctctaaaactgatgcgactgctccggcaagaatcgttgctaactttgcaaagaaagcagagaaacttgagattaaagctggtgttgtagaaggaaactactacgatgctaagggaatgactgcaattgcaaacgttccgtccagagaagtgcttcttggaaaactgcttggcagcatccagagcccgatcgcaaactttgcacgcgttatcaatcagatcgcagagagcaaagaggcataatcgaaattactattatgaaagccgcatgacggcaatgatacaattattattggaggtaaataaaaatggcaaaattaactactgcagaatttattgatgcaatcaaagagcttactgtattagagctgaatgatcttgtaaaagcttgcgaggaggagtttggtgtatccgcagcagcaggcgttgttgtagcagcagctggagacggcgcagcagcagctgaagagaaagattccttcgatgttgagctgaccgaggttggcccgaacaaagttaaagttatcaaagttgttcgtgaagctaccggacttggcctgaaagaagctaaagacgtagtagacggcgctccgaaggtaatcaaagagggcgcttccaaagctgaggctgaggagatgaagaccaaacttgaagctgagggtgcaaaagttactcttaaataattcagttggatttcagagaggatatcgcaatgcggtatcctcttttttattcatgtttttgaaaaaaactatttgacatacttgaaaaaatatggtagtatggacaatgcactattgtggtgaggtatgggtataaatcactgcgtaggtgcatgcctaaatggcgccattgtttaaccgaaaaagcagtgagtaaatatataaggggtgaaatgtcaatggaaaagaacagaatcaaacctaccaagtcaggacgcagcatgagaatgagctattcccgtaaaaaggaagttcttgatatgccgaacctgatcgaggttcagcgcgattcctaccagtggtttctggatgaaggattgagtgaagcatttgcggatatttctccgatcaccgattatagtggcaagctcagcctggagttcaccaactttacgcttgacgtggaaggtgcaaagtacacgatcgaggagtgtaaagagcgcgatgcaacatatgcggcaccgttgaaggtcagagttcgtcttcataataaagagaccgacgagatcaatgagcacgagattttcatgggcgatttgcctctgatgaccgagaccggtactttcgtgatcaatggagctgaacgtgttatcgtcagccagctggtacgttcaccgggtatctattatggaatcgatcacgacaaagtaggtaaacttctgttttcctgtactgtgatcccgaaccgtggagcatggctggagtatgagactgactctaacgatgtattttatgttcgtgtagacagaacccgtaaagtgccgatcactgtgctgatccgtgcactcggatacggtacaaatgcagagattatcgatctgtttggtgaagagccgaagattcttgcatctttaacaaaagacacttctgagagctatcaggagggtctgcttgagctgtacaaaaagatcagaccgggtgagcctctggcagtagagagcgcagagtctctgatcacaggtatgttcttcgatccgaagagatatgatctggcaaaggttggccgttataaattcaataagaagcttcatctgaagaaccgtgtatgcggtcaggtgctggctgaagatgtagtagatgcttctactggtgagatcatcgcagaagcagataccaagatcgatcatgatcttgcagtaaaactgcaggattccggcgttccgtttatctgggtaaaaggtgaggaacgtaatatcaaagtgctctccaaccgtatggttgacctgagcaaatatgtagatttcgatctccatgagatgggaatcaaagagtctgtatattatccggtgttggagaagcttcttggagagtacacagacgctgaagagctgaaagaagcaatcgaaagagagatttccgagctgattccgaagcatattaccaaggatgatattatggcatctattaactataatatgcatctggagtatggtcttggaaataaggacgacatcgaccatctgggcaatcgtcgtatccgtgccgtaggtgaacttcttcagaaccagtaccgtattggtctttcccgtctggaaagagtggttcgcgagcgtatgacaactcaggatccagagagcatttccgcgcagaccctgatcaatatcaaaccggtgactgcagctgttaaagagttctttggttcttcccagctgtcccagttcatggaccagaacaacccgctgggtgagctgactcataagagacgtctgtctgcacttggacctggtggtctgtcccgtgaccgtgcaggattcgaggttcgagacgtacattactctcattatggaagaatgtgcccgatcgagactcctgagggaccgaacatcggtctgatcaactctctggcatgctatgcaagaatcaacgagtatggattcgtagaggctccgtaccgtaaaattgataaaacagatcctcagaatccccgtgtaaccgacgaggttgtttacatgactgctgatgaagaggataattaccatgtagcacaggcaaacgaggcactggatgcagagggacatttcctcagaaacagtgtatctggacgtttccgtgaggagactcaggcatacgataagaccatgtttgattacatggacgtatccccgaagatggtattctccgtggctaccgctctgattccgttcctgcagaatgacgatgctaaccgagctctgatgggatccaacatgcagcgtcaggccgttccgctgatgctgacagaggcaccggtcgtaggtactggtatggaagagaagactgctgttgactctggtgtctgcgttgttgcgaagaatccgggtactgttgagcgtgcagtctccaacgagatcgtaatccgtcaggataacggtgttcgtgatgtatatcacctgaccaagttctccagaagtaaccagagcaactgctacaaccaaagaccgatcgtattcaagggagatcgtgtggctgcaggcgaggtaatcgcagatggtccgtccacttccggcggagagatcgctcttggtaagaacccgttgatcggattcatgacctgggaaggttataactacgaggatgcggtactgttaagtgaaagactggttatggatgatgtatatacatctatccatattgaggaatatgaggcagagtcccgtgataccaagcttggaccggaagagatcaccagagacgttccgggtgtcggtgatgatgcactgaaagatctggacaacagaggaatcattcgtattggtgcagaggttcgtgccggcgatatcctggttggtaaggtaactccgaagggagagactgagctgactgctgaggagcgcctgctacgtgcgatcttcggtgagaaggcaagagaagtgcgtgacacctctctgaaagtaccgcacggtgagtatggagttgttgtagatgccaaagtatttaccagagagaatggcgatgagctgtctccgggagtaaatcaggcagttcgtatttatattgcacagaagagaaagatctccgttggtgataagatggcaggtcgtcacggaaacaagggtgtcgtttcccgtgtacttccagtagaagatatgccgttcctgccgaatggtcgtccgctggatatcgtgctgaacccgctgggtgtaccttcccgtatgaatattggacaggtcctggagattcatctgagccttgctgcaaaagcgcttggtttcaatgtatctactccggtatttgatggtgcaaacgagcatgatattatggatacccttgatctggcaaatgattatgcaaatctgccgtttgatgatgcagaagctgcagagtggaaggcaaaaggcctggatcagactgctgatggcaagccgtgggccggcgagacatttgttggaaaacatggagaagatcttcttccggatgttctggattatctgtctgagaacagagaacacagaaaattatggaaaggtgttccgatctcccgtgatggaaaggttcgtctgcgtgatggccgtactggtgaggaattcgatagcccggtaacaatcggtcacatgcattacctgaaactgcatcatctggtagatgataagatccatgcacgttctactggaccgtactctctggtaacacagcagccgctgggtggtaaagctcagtttggtggacagcgtttcggagagatggaggtatgggctcttgaggcttatggtgcttcctatacactgcaggagatcctgacagtaaaatccgacgacgtgatcggacgtgtgaagacctacgaagcaatcatcaagggcgacaatattccggaggcaggtattccggagtccttcaaggtactgcttaaagagctgcaggcacttggactggatgtacgtgtgctgcgtgaagataacacagaggtagagcttggtgagaacatcgattatggtgatgttgatatccgttctatcctggaaggcgacagcagacgttttaacaataacaatgatgaatcctttggagaccatggcttcagcaagcaggagttcgatggcgaagagctggtagacgtcagcgaagatgacgactacgatgatgacgagtctgtcgatgcagatgaagatatgggatatgatgaatagaggaggtgccgctcatgccggaagtaacgaataatgataattatcagccgatgagcttcgatgcgatcaagatcgggctggcgtctccggagaccatccttggatggtctcacggagaggtaaccaagcctgagacgatcaactatcgtacgctcaaaccggagaaagatggtctgtactgtgagcgtatcttcggtccgagcaaggactgggagtgccattgcggaaagtacaaaaagatcagatataaaggtgttgtctgcgaccgttgcggcgtggaagtcaccaaatccagtgtgcgccgtgagcgtatgggccatattaaactggctgctccggtgtctcacatctggtatttcaaaggaatccccagccgtatgggactgatcctggatctgtctcccagaacactggaaaaagtcctgtattttgcatcctatatcgtactggatgcaggtaagaccgagctgatgtacaaacaggttctatctgagaaagaatatcaggacatgaaggaaaagtatccggagccgggtgctttccgtgtaggcatgggtgcagagtccattaaggagctgctgcagtccatcgaccttgagaaagattccaaagagttaaaagaaggtctcaagactgcatccggacagaaacgtgcccgtatcatcaagagactggaagtagtagaagcatttcgtgagtctggaaataaaccggaatggatgatcatggatgtgatcccggtaattccgccggatcttcgtccgatggtacagcttgacggtggacgttttgcaacatctgacctgaatgacctgtacagaagaatcatcaacagaaacaaccgtctgcaaagactgttggatcttggtgcaccagatatcattgtccgcaatgagaaacgtatgcttcaggaagctgttgacgcactgatcgacaacggaagaagaggccgtccggtaaccggacctggaaacagagcgctgaagtccctgtctgatatgctgaaaggtaaatccggacgtttccgtcagaacttacttggtaagcgtgttgactactctggacgttccgttattgttgtcggaccggagcttaagatctatcagtgtggtctgccgaaagagatggcaatcgagctgttcaaaccgttcgttatgaaagaattggttgcaaatggctccgctcataatatcaagagtgctaagaaaatggtagagcgtctccagacagaagtatgggatgtactggaagacgttattaaagagcatccggttatgctgaaccgtgctcctacactgcatcgtctgggtatccaggcatttgagccgatcctggtagaaggtaaggcaatcaagctgcatccgctggtatgtactgcattcaacgcagacttcgacggagaccagatggctgtccatctgccgctgtcagtggaagcacaggcagagtgccgtttcctgctgctttccccgaacaacctgctgaaaccttccgatggtggtccggtagccgttccttcacaggatatggtccttggtatctactatctgactcaggagagaccgggagcactcggagaaggcaaattcttcaagagcgttaatgaagcaattctggcttatgagaataaagtaatcacccttcagagccgtatcaaagttcgtgtatccaagagaatgccggacggaactgttctgacaggtactgaagagtctacactgggacgtttcctgttcaatgagattcttccgcaggatcttggatttgtagatcgtaccattccgggtaacgagctgaaaccggaggttgatttcctggtaggaaagaaaggcctgaaacagattcttgagaaagttatcaatacccatggtgcaaccaagaccgctgaggttctggatgacatcaaggctactggatataaatattccaccagagcggctatgaccgtatctatttccgatatgaccgtgccgccgcagaaaccgcagctgatcaaagaagcacaggatacggttgataagattacccgtaactacaaacgtggtaagatcactgaggaagagcgttataaagaggttgttgagacctggaaagatactgacgcagttcttacaaaagcgctgatggatggtctggataaatacaataacatcttcatgatggctgactccggtgcccgtggttctgataaacagatcaaacagcttgccggtatgcgtggattgatggccgatacaactggtcataccatcgagctgcctattacatccaacttccgtgaaggtcttgacgtactggagtacttcatgtctgctcatggagcacgtaaaggtatgtccgataccgctcttcgtaccgctgactctggttacctgaccagacgtctggttgacgtatctcaggagctgatcgttcgtgagacagactgtgcagagggcaaagatgagattccgggaatggaagtaagtgctttcactgacggaaaagagatgatcgagtctttgcaggagcgtattacaggacgttttgcatgctctgatatctgtgataaagatggaaacattcttgtaaaagcaaatcatatgatcacaccgaagcgtgcagctatcgttgtagcaaaaggtgtggataaagatggcaacccgcttgataagatcaagatccgtaccgctctgacctgtaaatcccacattggtgtgtgtgcgaagtgctacggtgcgaacatggcaaccggtgaagcagtacaggttggtgagactgttggtattattgctgctcagtccatcggtgagccgggtacacagctgaccatgagaaccttccactccggtggtgtagccggtggagatatcacacagggtcttccccgtgtcgaggagcttttcgaggccagaaaaccgaaaggacttgcaatcgtaactgagatcggcggacttgcgaccatcaatgatatgaagaagaaacgtgaggtcatcattactaataatgagactggcgagtccaagacttacctgatcccgtttgattccagaatcaagatcatggatggaactactgtagaggctggtgatgcactgacggaaggtagtatcaacccgcatgatattctgaagatcaaaggtgtacgtgctgttcaggattacctgcttcaggaggtacagcgtgtatatcgtcttcagggtgttgagatcaatgataagcatattgagatgatcgttcgtcagatgctgaagaaagtacgtgtagaggataacggagacagtgatttccttccgggaactctggttgatattcttgactatgcagatgaaaacgagagattgctcgaagaaggcaaacagccggcagaaggtaaacaggtactgcttggtatcaccaaggcatctctggcaaccaattccttcctgtcagcagcatccttccaggagaccaccaaggttcttacagaagctgctatcaagggcaaggttgacccgctgatcggtctgaaagagaacgtaattatcggtaaactgatcccggctggtacaggtatgaaacgttatcgtgatgtaaaactgagtacagacttccaggatgaggatgctctgagttttgcagaagagacggatgaaccggcagaaactattgaactggatgagaatacagatgcagaaactaatgctgatacagaagtttctgaagaaaccgtttcaacagaagaataagagatacaaatcccctgggatcgtaagatcctgggggatttttttgtaaacataatcgaacatgtggaatgaatgaagattgtcatatgcgtttcttatgcttcgccagaggccgaaaaatggtgattcttccaagaaaacagaagaactgtaccatcagaatgccaataaagatgccgatgctgtcgatgccaacatctctgaccgaaggaccgcgccctgccacgaaagactggtgatattcatccagtccggcgaatccaacacacagaaatccggctaacagtggcagccagataccgcggactccatatacatagagtggaaaggatatagatatagctagcagaaaatattctgttacatgtgcaatcttacggactgtgtgatggattcgatcagtatagtgaaccacttcagcgtcagaccaatgcagttcgaaggcatcattggcagattctacaatgatttcgctgactttataactcaggcttccagagactgtcccaggctgagcagaaaaagagaagatcacatacatcataaacagcgcaggcagaaaagataacggttttaaaattcctcttaacaatacttttatcataaatacctctttttatttgaatgataggagtattttatcatatagcgactttaaccaccaacatattctttggaagaagtcagatttaacttctttacagaacaaaaattgcgagaaaagcattgaaatatccatgctttttctataaaaccgcttgacaagcaaaactcaatttaatataataaacaagcatgcgtgtttaggcatgtattcagcaagtctgaaaaacagcagtcatcacaattcatcaggaggtgaaaggaatgccaacattcaaccagttagtaagaaaaggtagacagacatctgttaagaagtctacggcaccggcacttcagaaaggatttaactctctgaagaagagaccgatcgatgcatctgcaccgcagaaacgtggtgtgtgcaccgcagttaagaccgcaaccccgaagaaaccgaactctgctcttcgtaaaatcgccagagtacgtctttccaacggtattgaggtaacaagctatatcccaggtgagggacacaaccttcaggaacacagcgttgttctgatccgtggaggaagagtaaaggaccttccgggtaccagatatcacatcgttcgtggtacactggataccgctggtgtagctaagagacgtcaggcacgttctaaatacggagctaagagaccgaaagacgctaaaaagtaatttaataacagaatcaagtatcacaaacagaactatgattgttggcgtcgcgtaagcgcc

SEQ ID NO: 1519 - DNA, 8529 bp, Unknown
  16S sequences of unknown bacteria
cttttcggcagcggcaacgactttcgccgcttcgttgtaaggtatacgactgcgatacctataaacggcataaacgcctgatatgtttttgcctgtacctgtatggcaaccttggtaagatcggcaaggccgataacagttaccagcgatgtatccttaaacagagttataagctcgttgccgagggcaggaagtatgttctttattgcctgaggaataattatgtgcctcattacaggaacgtagcccataccaagagatctgcctgcctccatctggcccttgtctattgacataatacctgaacgtatgatttccgaaacatatgcgcccgagtttatacccattgtgattaccgctatcataacaagatttctgcttgatgcaaatactataaatcccataatcagcagctgtaccatcattggcgttcctctgattacggttgtatatattttgcatatggcattgagtatgcccagaagtatattcttatggcccggagactgctgatcgtgtgatgtacgaatcaccgcaaccagtacgccgagaattacgccaaggcataaagcccccagcgttacttcaaatgatattcctagacctttcagatatgcaacccacctgttgttttcaatgaaactctgggcaaattgcgcttcaagacctgaaaacatatttgttcacctcacatttcttttgtcttatcaatgaaaaaggggatggcatcagccaccccttattaatgctaatgtttattcagccttgatatatttgtccagaatctcctgcacagtgccgtcttcgatgagttccttcagcgcattgttaacagcctcaagaagctcagggttgtcttttgaaacacctattgcatagtcttctgatacgaattctgtttcaagaatcttaagtccgtcgtttgctgccacaaattcctttgcaggctggctgtcgataacaactgcatttaccttgcctgcaagcagagcctgaatagcagtagctccgtttgtgtatgcgattacgtgatcttcgccgaatccgccgttttcaggagtgtctgaacagtaaataaatcctgtagtgccttcctgtgttcctatcattttgtctttggcaagatcatcaatagtcttgatgtctgagtcctcaggaacgataacaacctgtacgcctgttgcatatgagtctgtaaagtcaacgttcttctgtctgtcaggagttactgtaagacctgccatagcgatgtcagccttgccaccctgtactgatgtaagcactgatgagaaatccatatcgtcaactacaagctcaagaccaagctttgcagcgattttctctgcgatttcaacgtcgataccttcgaatccgccgctgtcatctgtcatttcatatggagggaaggctgcatttgttgccatatgaagcttgcctgcttctactgttgataaaccgttttcatctgttgaaccgccaccacacgctgtgaaagcgaaaaccattgcaacggttaaaattactgctaataattttttcataactaaattcctttcttattgtttgcagatgtataataatattcgctgaatatttattaattgtaacgaacaattgtgattttactactgtttttatgatatgtcaataggttttcataaaaaaatatgaataaatatttaaaaaaactaaaaaataccgcataaacgcaaaaaaataatgaataaaccgtgaatatgcataaattttatgcacgaatgaataaaatctccttttaatatgtaggaaattgatatatacttatatcataacatacacagaagggcactgatttaatggaagaaataagagatatactgaggaaatttaatgaggaacgaagctggggcagatttcacacaccggaaaaccttgccaaatccatatcaatagaggcaggggagcttctggaatgtttccagtggaacaatgaatatgacagagaggctctgtgcgatgagattgcagacgttatgctgtactgcataatgcttgcggacgcaatagacgccgatttaaaagctgagcttctgcgcaaaataaagaagaacggggagaatatcctgcagacaggagcagaggcagcagcgccaaatataacgagttgcagcagtatttatacacaaaggagaatggtatgagcagatcatcggaaaaaatctttagagaaatgcagaagcttatggaacagaatgaatttgaaagtgaggagcaggcaaatgcggcgctgcaggaacttatagcgcagtacaatgaaagtctgaattctaatatagaccgtgagcctgaaacgccgtgggattatcttgatatggcaatggaggctccgacagaaaaagaagcactgaaatatgcaaaaaaagcactggagcttgatgaatactgtacggatgcagaggtgatgattgctgatattcagtatggcagagatcctgaaaaattcaaaaagaagtttgaaaaaatcataacgaagacagaaaagcaccttagagaagaaggatatttcgatgatgactgcataggcaggttctggggaatatttgaaacaagaccgtatatgagagcaagatacaattatattgagcttctgcttgctcttggcaaatacaaaaaagcagtggaagagtgcgaggagatgcttgaactgaacagtaatgacaatacaggtatcaggtatacacttatgggactttatgctcattttgaagacgaggtttctgcaatgagactttacaaaaaatacaatgagtgttcggtgcatatgctgctgccgcttatagccctttattacaaagcagacagctataagacggcggagaaatacctgaggctcataaggggagagggctttgatgactttttccttgattttgatgatattgatgatattgatgatatttatgatgacgaagacgatgatatgcctttcataggcggatactgcagaggctcggaggaagaggttgaatatgcaatcgaacaatgttcattcctgtacatatcgactccgggtgtgctggaatggatagaaaacaaggtaaacaaagactattaaaggacggcagttatgaatgacgacagaagcaggcttccggtagccgtaatggattcaggcatcggaggaataagcgtattgaaagaaatagtaaaactgatgcccaatgaggactgtatattcttcggggactccgtaaatgcaccttacggcaccaaggagctttcgcagatacaggaaatcgtaatggacagggcgcagtatctttattcaaaggggattaaagctctggtggtggcctgcaatacggcaaccagcgctgcaatcgggcttctcagggacagatacagagatattccggtgataggaatagagccggcgctcaaacctgcggtttcgggagacgagaagcataccgttgtggttatggcaactcccatgactatcagggaagataaattccggagccttatggcaaaatatgcagacgagggcactgtatacccgctgccgtgtccggggcttgcggacctgattgaagacggtaatacagagggcgagaagcttgagaaatatatactggagcttctgatgccttatcttaaggaggacatagactatatagtgctgggatgcacccattatccatttgcaagaaaaacaatacagaaagtggcgggagacaaggtcaggataatcgacggaagtctcggcacggcaaagcagctcaggcgcagactcaaagccgcgggactcgaaaaccctaaaactgacagaggcatcatagtgtttgaggacagtattcccgcaaaaacagagctgtgcaggcagatgtttgaaaaagatatttaaaaaattatgtatacattaaaaatatcagtagatttattctgaatttcgtatataattaaaatattaaagataaacagcagttgtttcaggctgcagtaaggagagaaatatggcaaaagtaggagttacagaaactgtattaagagatggtcatcagagcttaatcgcaacaagaatgactaccgaagaaatgcttcctattctggaaaccttagataatatcggttataacgctcttgaaatgtggggcggtgcaacttatgacgcctgcatcagatttcttgatgaggatccgtgggacagacttagaataatcagaaaaaaagttaaaaacacaaagcttcagatgcttttaagaggccagaacctgctgggttacagacactatgcagatgacgttgttgacgaattcgttgacaaggcggtatcaaacggtatagatgtaatcagaattttcgacgctttaaacgatatgcgtaatatcgagagagcaatccaggcaaccaagaaatgcggagctcacgcacagggcacaatgtcatacacaatcagccctatccatacaaacgaggtatttgtagagcttgccaaagaaatagagcagatgggagcagattccgtatgtatcaaggatatggcaggactgcttgacccgtacaacacatacaaactggttaaagacatcaaagctgcaatatcaattcctcttgaaattcatacacacgcaacaagcggacttggcagtttaacatatatgaaggcaatagaggcaggcgctgatatgatagacactgcgctttcaccatttgcagagggcacatcacagcctcctacagagcctatagctttcgcattcaagggaactgaatacgatttaggacttgaccttgatttattaaacgaagcatcggaatacttcaagcctatcagagagaaatacattgccaacggattaatggatcctaagcttatgggtgttgatatcaatactcttaaatatcaggttccgggcggtatgctttcaaatctggtatcacagcttaaacaggcaaatgctatggataaatttgaagaggtactcaaggaagttcctagagtaagagaagacttcggatatccgcctcttgtaacaccaagctcacagattgtaggtacacaggctgtgcttaacgttgttatgggagaaagatacaagatggttccaaaggaagcaaaggatcttgtaaagggtatgtacggtaagacaactgttcctatcaagcaggaagttgtagacaagattctcaagggcgaagatcaggttacatgcagaccggcagaccttcttgaacctgaacttgagcagatgaaaaaagaatgtgcaaagtggatgcatcaggaagaggatgtactcacaaaagcattattccctcagcctgctgaaactttcttcaaaaaaagagaagctaagctgtatcagatagaccacgatcttcttgacgaagaaaactgtgtatatccagtataatatatgacaaagaggggcgaataccgccccttgtttttttgcgggaaatacctgcagagtatacaaagataaaagtgacgggagtcgaatatgaaccgcaatatcactataaaacctgaggttgcaaagcaatttaaaaaagcaatggacagcggtcaggcggttttgttcagcgcgccatgcggaatgggcaaatctgcctcagcacatgcgctgcttgagggacgcagagtgctggagatttcggcaggagaaccggagtttcgaatacccgaacctgacggaagctgggatgttctccttgtagacagcctgcagaagatagacgagcctgcagtgcagcatgcgctgtgcggcctgataaaagaacataacgccctgcgttttgtactgatgtcaagaggctcagcgcccagctggatagttcatcttcagtatacagacgcaatgataataatagatacagacgatctgatgctgggcagagaagaaaccagaaaatttttcgaagcgagaggaatatcagcaggccccaaagagcttgataatatatacagggagacacagggctatccgctggtgctgtctattctggcccgccatatgttatcgggtgaagttttcggcaataccgttataacggagattcagcgagaactgtttatgtattatcaggaggcaatatattacaggctggagcctgatatacggagatttctgcttgatcttgcgccttttgagatgcttaataccgagcttgccaaaacggtcagtggtaacagcagagcgggagaaatgctgggaaagatacacaaaaaaacctcaatgtttctttatgacaatatagatgagttcagaatgtggcccgtcttcagacagtttctgatgtgggagagggagcaggagtacacagacgagcagacacaggcgctttacggcagagccgccctttattatgaaacaaatgaggactacgataaagctctggaatgttatacaaaggagggaaaccgttcaggagtatcagctctccttgtaaaaaatgcacggaagcaccccggagcaggcaactatgaggccatggaaaaatactatatgatgcttgatgacagtgagattgtatcatctcctttgcttatgcaggcaatgagtatgctctgcgcgctgcgaggggattatgagacctctgagaaatggtatgatacactcaaaacctttgccggaggcaaatcccacacagacgcctcatacaaagaagccagaagcagaactgcatggcttgatatatcactgccgcagagaagcataaacagtgtttcagtggcaataacaaaagcttttaaccttataaaaagcagagaaatcatgctgccggccttttcggttacaagcactctgcccagcataatgaacggcggcaaggacttttccgaatggagcagaaaagacgatctgctgtatgccgttatgaagaagcctgttgaaacggtgcttggaagagacggcataggccttgcagactgtgctattgccgaaagcaaatttgaaaaaggggaacgggtatccggaagaatattttcccttgtctccaaaatgggagatattcagaccaaaggtacacccgatatagagtttgcgctggtgggacttcttgtcagaactatgattgacgagggcagagcctgtgatgcaatgcagaccgcagtatctatacgaaagagatttgaagaagcgggaaacagcagattctttcccaatatagatgctctcatatgcagaatcaatcttatgacaggaaatacagaggaggtggatatgtggtatcagcggcaggcgccgaaagatcctgtgaatttcagggtcatgcaaagatacagatatctgacggaggcaatggtggagatctcgtcaggtgaaaatcaggctgccatagtaacactggcgccgatagttccctattgcaaagcctgctcaagacatatagacggaattcatgtaaacgtgctgacagccatcgcaaaatacagaagcggagcttcggactggcagaataatatgagcatggctctcgatgcggcgtcacgctttggctttgtcagaactataggggaatacggcgtggcagtacttaatcttctcggaagctgcgaatgggaaggaaatccgaagttcttaaaaaaagtcacagaagccgcaagacagcaggccgtgtattatcctgattttatgaaggttgcagcagagactgtagaacctctgacagcggcagagctgcaggtcctgcgcctcatatgcgcagataagagcaactccgaaataggagagatactcgatatcaaggtatcgacagtcaaaagtcatgtaagccatatattgcagaagctgtccgtaaagcgcagaaatgaagccaaaacgatggcagaaaaactgaaactgctgtaaatgaataaggtaaacaacagggcgatcggaaacggtcgcctgttatagtgggaaagaagtgcgggtatatataaaacagctgggttaaggaagaaaaaatttcatcgtttcatactttggtaggatgacagattgttgcaggggttgttaaaatagagataactgaccttgaataaggtatatattgatattttacaggaaggaaaagacttatgaagaagaaaagaatattaagcttattactaagtatgattgtatgtattgcaatgatgcctgtggcagtatttgctacggaaaactatgacttgtatgtaaatggtgaggggtttacgaatgaaaaactttctattgcttgtggagaaggaaccgcaagctacgacccgaatacaaagacccttacgcttaacaatgccacaattacaaatggcggtaaaagcgatgaaagtcctaagtacggtatcagagtagtcggagacaccgatttaacgatcaaactttccggcacaaacagcattactttagataacggcggcggaatttttgcagacggtagcagtgataattacaatattatcggtgacggtaagcttacaatcaatgtaaaatgggatgcactctatacgcttaatggcaatatcagcatatccgaaggtgcagagcttgatataacttctgccaagggctgcggaattac

SEQ ID NO: 1520 - DNA, 2398 bp, Unknown
  16S sequences of unknown bacteria
ccggctccggcaggacatcgtaagccgggtcgcgcggggttccggcgcggtagggataaagctcctcacgaacggcgcgggcggcgaactgttttattctatctggtatgagtatttccataatttgccttttattactgtgcgatgtctctgattgcatctataagcgacgtgagattgctctctgctttactttcgagcttcgcgtaatccgtcgtccatacgctctttttaccaacggcgtccttgaatctgtcggctgtgccttccatcggcagtgtgtagatatagccgaagtcgaacgacacgccgtcgcggatgatatcaaacatctgcgctgagtcgttgtccgtgatgtacttgaccttcagcgcggtctcaaagtacgccggtgtgacgctcttccagctctcatacgcgagggcttcacaaacggcggcagcgcgttccttgtcggcgcagtcggtaggaatcgtcagaaccgaatatgacgtcagaacagtcgtagcatagtccgtctgagactcatcccacttcgggtacggaagcacgccgtaaccaaaattaacatcgcggaacgcgtcggtgtgcataaaccatccggtcgcgaggagcacgtttccgtcgcggaatatactattatacatagtctcctgctcacctttcttgtcgaaatagataccgtcagtgttgtagatcatgtcggtgagcttcgagataacgtcggtgttgtgcgcgtttccgaaaacaagcttcgggtcatcgccggagatgtcgactatatcgacaccgagcgattcaatgaatccggtaaaatggttcgaactgttcaggagaagtccgaactggtcagcctgacccgccttcgtgtcgccgtcaaggtctgcgtagtagagcgacgatacctcgcgcatcttgtcgagcgtccacttcccgtcccgcacgacgtcgtagaggttttcaactccgagcttttccgcgagatcgaggttctcataaacacagaacatattcttgatcattccgagagacgcgtcgccggtgacaaaatagtactttccgtcaatcgaggacgctttcatgaacttgtcagaccaccacggcttttccgggttgatatatggaagcgttgacatatccgacagtattccgtccgagacgaaggacggcatgaaataaccgagacctgccgcaagatcatacgacccgtccccggcgagaactccggagcggaacttcgtcgtgaactcgctacggtcgtcccagttgtgcgtgaacattacccagttgatatcgagattcagccgctcggacactatgcggttcctgttgtagattgagtcgttgacaatgtcgccgtcagattcctcgacccagaagtccgctccgcagtatccgccgtagtcctcgacaagaatcgtgaactcgtccccgttatagttcagctccggcagatcgtcatgaatctcggtttctccggcggttgttgtgtcggtcgcctcgccgccgctggtcgtcacgacgtcaccacttccggagccgcaggagacaactccggcaagcatcgccgcgagaataaaaaaagttgtgattttttttgatttcatattgcaattcctccagatatttggtataattaattatacaccattttcagggaacggtaaatgacagcagaaaattctttttaaccgagcccggcaatattatgaacatattgtaaaggatatcttatgaaagaatttgatatcgcaatagacgagatactcgaagtgttaagcgactctatagaaaaagaccgtccgtacattccggacatcccacgcgatcacagctctatcggcgtcgtgatgaacggggtgctgaacgtcatctcatcggattattccttcaccgcgaaaaagggagacgttttcctcgtcaagtccggtaatatcgacatatcccgcgcgctcaccgatattgtcagctacatctacatagatttcatatctccgccgatatccacctcgccggagaccttcgacctcgtgaaccacgttcgcgagccggagctcatcacaaatgagttccgccgcgcggagaagatctgggcgagcgggcactttctccggacgatccagtgccgcgagattatttactcgataataaaccgcattgtttccgaaaactacgccgacaccgagtccgcctacaagtacgagcggataagaccggcgatagagtatataagtcatcgttttccggaggatataagacatgacgctctcgcgtcgctctgctcgatgagcgccgggaacctctcgaggctgttcgcggaggtgaccggaaagccgctctccgcctacataacgtctgtgcgcatcgagaacgcgaagaggctcctcgcgacccgcgc

SEQ ID NO: 1521 - DNA, 3119 bp, Unknown
  16S sequences of unknown bacteria
aaattctcgctcaggtcgccaaattcacggcagcgcttgacctcctctaaaaggacgggccgctggttttgaatccggtcttccagctcctgctgcattaagcgaatatcctgttttgtcaattcgtcgtgcataaaactgcctctttcctttgggcgcggggcttagacaggcccggcagtccctacaaatatattaccacgttacggcaaacgcgtcaatgaaaagcgcgttaaaaatccttaaactgatgcgcccggtccctcgttgggggcgcggtctgtcggcgcggcatcctgctcgacgacggggataaaatgcttggcaaacttctgcttgccccggctgcggacatagaaaaagccgatgacagagaacacgaccgcgccgataaaattgacgaacaggtccttcatcgtgtcatacaggccgatatccaggtagccacccaggccgagggactggccattgatgctggtgtcggtgatatcgcggatgacgatgggggtattgctattggccgggtccagcttcacagaggagatcacgtgcaggacggtgtccttttgcatgtctgtctggaaaaaataatccatggcaaattcaaaaaattcccagagaataccgatggtcatggaaaagcagaacgccaccagagccaaaaacagcggcgagagctccagctggaagcgcttgttgcgattgaataggtccaccagggagaaaccgatggcggcggccataaagccattgatggtgtgcatcaaggtgtcccacccagtgtagcggacataccagcaggccagctcgcccaaaatttctgcagcgaaaataaagcagaggatgatgatctccaacgtgtccggcagatcgacccggaagttgcgctccacgaaggcgggcagcagaaacagcaccagcgtcagcgcgcaggtggcgacgttttcatagcgcccgcggatggcggagagcaccagcgctgcgacgacgatggcccggagggtgaaatagacgataaatttgcctttgtgctcgtgaaattgctgccgcagactctggcggtcataggggggcagcggggattgtagctttttctttgccatagggggctccttcctgtgggggattaagggaatcgagataacgctgctcccgtgtctggcaggtaaacagcaggatctgacgctgctgggccagctgccggagcagctccagcgcacgggccatgcgggcatcatcaaagcagaccagagcgtcgtccaggatgcagggcgtctccggcggggccaaaagctgggcaatagccaggcgcagggcgagccagatctggtcgcaggtagcggcgctgtagcagcggctggaatgggcgacggggtcaccaggctcttgcaggcggacctgcagctgccggtccagctctaattgccggtgtggtgtgccggtcagccgggccagatacgttccggccagctgccgcagcggcggggcgaagcgggcctgcagggcatcgctggccagctgcagaacgtccagtgccaggccgagggcttcgtaatgctgggtgagcgccgctagccgttttgtcagtgcgcttcgttgctgctgcagttgtagcagcggcggataggcttccagacgcgcctgatcggcggcaagctgctggcggcagcttgcccggcgggcatccagggcctgcatggcgtcatcgcgcggctgcgtggggagtagctgcagcagctgcagcgcggcgtctgcctgccgggcttgcgcttcggcctgggcgcggcgttggggcagcgccagggcgtctaaaatcgcggtctgggcttcctcgcgcgtttttgcctgggggaatgctgcggcgatctcggctggtaggtggtctgttgccatctgtcgggcaggccgcagcgcggccagggcgctggccagggacagaacgccgcaggcgatggcggcgggcagactacggcgcaggagcgccgcagccacggccagcaggagcgccgcagcgaggaagggccagcggcgatgcttttggcgcggcggctctgccggggcggcggcaagctgggtcatccattggcgcagctgcgcatcttccggcagcgcggcctgctgctgcgtgagggcagccagttgcgcatttgccagcttcgcttgcagctgggcatcctggcgggcggcttccgtttgggcagcgcagtgggatgcggcgtcgcgataggcgtcgtccagctgggcgagctgcttctgctgctgggcacaggcgtcctccaacgcgctgcgctgggccagggcctgctcacattggaccagctccgcctgacaggcagggatcaggccggctttatgatgctggcagcggcgttgcagctgctgcagctgctgctttgcctgggcaaacgtcgcctcctgcggccccgtcgagacaaggcgctgcagctgctgctccagagcctcgtcataagtcaacgcgtgggcctcctgggccaaaaagacgctgcgggcaaagacactccggggcaggcctgtcaggatctggccgcaggtcgccgcctgtaggctgtcgatgggcacaccggagtccgtatcataagcgcggaagaccgagaacggcgctttcggtgtgctgctgcgttcgatggttactgcccggccctgccacacaaggtcgatgcgcccggccataggtttgccggaccagggctggtatttatgcttgtccgccagggcggccttgctgtcgcgctggctggcgtcgatgccgtagagcatggccagcaggaaggcgcaccaggtagatttgccgccctcgttcggggcgtacagaagattcaggcccggctggagcgtcagtacggcgccgtccagcttgccgaaggaggcttgcagacgcttgaggatcatggcagcgtcacctcacggccgtccagggccttcagccctaattccagtgccagctccagggtctgccgctgtgcggcgtccggcgcggtctggatggcgctgtgcatcttcttggtaaagaggccccgcagagagtcctccgcggcatctgcggggcgcagcggcggctgtgtcgcgtctaccagctgcagggaggcaaaatggggcgc

SEQ ID NO: 1522 - DNA, 2208 bp, Unknown
  16S sequences of unknown bacteria
tgttcaagacggtgcggtagaagacgtccgcgtggtaccagtggttgaggccggcgcccatgatgatcatggagcggccgttggtcttgatggagttgtcggcgaactcgcgcgccgtggagacgacgagctcgggtgcgacgcccgtgatggcctgctgccaggcgggcgtgaaggcgacgtcggcgtcatcgtagcccgaggcgcactccccgcccaggccacggtcgatgccgtactgcgagagcaggatgtcgtggacggtggcgatgtagtgctgctcgccatcggaggtggtgatggagcggacgggcaccttgcgcacgagcacctgcttgccgtccgtgccgaagtacgggaaggcggcgtccacgaccccgtcgctcgactcgacgaaggagagcttcgggtcgattgccgcgccggagaggctgtcttcgagcttgaggttccacttggacttgttgccccagcgcgcgcccatcgtgccgttgggcacgaccagcttgccggacagctcgtcgacgacgaagaagtcgaactccgggttagccgcatcgacgcccatgtcgtgggcgttcacgaacctgcccggctcatacgtgtcgccgcgcctgtccatgaagacgacgaacggcatgtcggtgaactgcttggcgtaatcgaggaagaagggctcgggtttcctccagtagtactcgttcaagatgacatgtcccatggccatggccatggcggagtcggtgcccacgttgggctgcagccacgtgtccgcgaacgtgcagaactcggcgtagtcggggctgacggcgacgaccttcgtgcccttgtagcggacttctgccaggtagtgcgcgtcgggcgtgcgcgtctgcgggacgttggagccccataccatgagatagcccgcgttgtaccagtcagaggactcgggaacgtcggtctgctcgccccagacctgcggggatgcaggcggaaggtcggcgtaccagtcgtagaaggacagctgcgcgccgcccatgagctggttgaagcgcgcacctgccgcgtaggagagcatcgacatggcggggatgacggaaaagccgatgttacggtcgggaccgtaggtgtaggcggtgaaaagctcggatgccgcgacgatctcggtcgcctcgtcccaggtggagcgcacgaggccgcccatgccgcgggccttcttgtagcgggccttctttgccgggtcagacgcgattgacgcccacgcgtcgtaggcgctcatgccggcgccacgtgcctcgcgccacatctcggccagctcggcgcgcaggtaggggtacttgatgcgcagcgggctgtacaggtaccacgagaacgacgcgccgcgctggcagccgcggggctcgtggtcgggcatgtcctcgggggtctgcgggtagtcgtgagcctggttttcccaggtcacgataccgttcttgacgtagatgttccagctgcacgagccggtgcagttgacgccgtgggtggagcggacgatcttgtcgtgggcccagcggtcctcgtacatgttctcccagccgcgcccgccctcgcgcacgacctgatggccggtcgcactcgggccgaggggtccttgcggtggggttgcgtctgcaggcgcgatgttggagtgcctgccgaagagatttcccatgctcttcctctctcttttcgaacgacttcggcgcagaggggataagcctcgtgcggctttctccccctcaagcgcacgtacgtccctgtcgcgtacgcgttcccgtcgaaaggttgccagttgcttgtccgagcttgccctatgcgcgggctagcacttgatctcggcgttcttgcgggtgtagacgacccaggtcagcacgagcgtcgccaccgtgaacacggccaggatggcaagcgccatctcgaagctctgctggaacaggatcggaatgatgaacgagccgtaggctgcaatcgcggccgtgaagcccgtgacctgcgaagcctgctgcttgtcggtgaagatgttgggcaccatgcggaacgaggcgccgttgatgaagccggtggtgaggaacagcaccatcatggcgctgaagaacatcgcgaagttgtgaccctggatgctcacgataagcacgagggtcgcggcgagcatgatgatgagcgagataaacgtcaccttggcaccggagttgatcttgtcggacagcc
